(19) United States
(12) Patent Application Publication
(10) Pub. No.: US 2014/0140959 A1
(43) Pub. Date: May 22, 2014

(54) Energy Absorbing-Based Diagnostic and Therapeutic Methods Employing Nucleic Acid Molecules Encoding Chromophore-Producing Enzymes

(71) Applicants: Aladar A. Szalay, Highland, CA (US); Jochen Stritzker, La Jolla, CA (US)

(72) Inventors: Aladar A. Szalay, Highland, CA (US); Jochen Stritzker, La Jolla, CA (US)

(21) Appl. No.: 13/998,130

(22) Filed: Oct. 4, 2013

Related U.S. Application Data
(60) Provisional application No. 61/795,025, filed on Oct. 5, 2012.
(60) Provisional application No. 61/850,256, filed on Feb. 11, 2013.

(51) Int. Cl. A61K 41/00

(52) U.S. Cl. CPC A61K 41/0057
USPC 424/93.2; 514/44 R; 435/235.1

(57) ABSTRACT

Provided are diagnostic and therapeutic methods using a composition containing a nucleic acid encoding a chromophore-producing enzyme(s), such as a melanin-producing enzyme or enzymes. The nucleic acid molecules can be used for directed or localized delivery to tumors or other cells associated with disease resulting in production of a chromophore product that can be used for diagnosis and therapy, including of tumors and metastases.

### RELATED APPLICATIONS

[0001] Benefit of priority is claimed to U.S. Provisional Application No. 61/795,025, filed Oct. 5, 2012, entitled “Energy Absorbing-Based Diagnostic and Therapeutic Methods Employing Nucleic Acid Molecules Encoding Chromophore-Producing Enzymes” and U.S. Provisional Application No. 61/850,256, entitled “Energy Absorbing-Based Diagnostic And Therapeutic Methods Employing Nucleic Acid Molecules Encoding Chromophore-Producing Enzymes,” filed Feb. 11, 2013.

[0002] This application is related to corresponding International Application No. [Attorney Docket No. 33316.04836.WO01/4836PC], filed the same day herewith, entitled “Energy Absorbing-Based Diagnostic and Therapeutic Methods Employing Nucleic Acid Molecules Encoding Chromophore-Producing Enzymes,” which also claims priority to U.S. Provisional Application Nos. 61/795,025 and 61/850,256.

[0003] The subject matter of each of the above-referenced applications is incorporated by reference in its entirety.

### INCORPORATION BY REFERENCE OF SEQUENCE LISTING PROVIDED ON COMPACT DISCS

[0004] An electronic version on compact disc (CD-R) of the Sequence Listing is filed herewith in duplicate (labeled Copy #1 and Copy #2), the contents of which are incorporated by reference in their entirety. The computer-readable file on each of the aforementioned compact discs, created on Oct. 4, 2013, is identical, 10.1 megabytes in size, and titled 4836seq.001.txt.

### FIELD OF THE INVENTION

[0005] Provided are diagnostic and therapeutic methods using a composition containing a nucleic acid encoding a chromophore-producing enzyme(s), such as a melanin-producing enzyme or enzymes. The nucleic acid molecules can be used for directed or localized delivery to tumors or other cells associated with disease resulting in production of a chromophore product that can be used for diagnosis and therapy, including of tumors and metastases.

### BACKGROUND

[0006] Each year over ten million people worldwide are diagnosed with cancer, and there are over six and half million deaths from the disease. Treatment with various chemotherapeutic agents, including chemotherapeutic compounds and radiation, are an important part of modern clinical cancer treatment. Biological therapies, such as gene therapies, cell therapies and oncolytic viral therapies, also are viable treatment modalities. Early and accurate diagnosis of tumors and directed therapy of tumor cells remains a limitation for many diagnostic and treatment methods. Hence, there exists a need for improved diagnostic and/or therapeutic methods. These and other needs are addressed herein.

### SUMMARY

[0007] Provided are methods for killing or inhibiting growth or proliferation of cells, which are involved in a disease, by an energy-absorbing therapy. The method can be practiced by: a) administering a nucleic acid molecule encoding a chromophore-producing enzyme(s) to a subject, where the nucleic acid molecule is directed or localized to cells in the subject that are involved in the disease process and expression of the encoded chromophore-producing enzyme(s) produces a chromophore product in the cells in the subject into which the nucleic acid molecule is delivered; and then, b) exposing the subject to an energy source that is absorbed by the chromophore product to effect local production of heat and/or toxic chemicals in the cell and/or electromagnetic radiation, thereby killing the cells or inhibiting the proliferation of the cells that express the enzyme(s), thereby effecting treatment of the disease. The encoded nucleic acid can encode one enzyme that catalyzes production of a chromophore (including electromagnetic radiation or other radiation absorbing molecules) or a plurality of enzymes in a metabolic pathway for the same or different chromophore(s). Absorption of the energy by the chromophore(s) can produce localized heat in the cells or lead to production of a toxin by the cell, to thereby kill or inhibit or prevent replication of the cell. Step b) typically occurs after a time sufficient for the nucleic acid molecule to be expressed to produce an enzyme, and the chromophore product whose production is catalyzed by the enzyme produced.

[0008] Also provided are methods of use of nucleic acid molecules encoding a chromophore-producing enzyme for formulation of a medicament for killing or inhibiting growth or proliferation of cells, which are involved in a disease, by energy absorbing therapy, where the chromophore-producing enzyme catalyzes production of a chromophore product when introduced into a cell; and the chromosome product absorbs energy from an energy source.

[0009] Also provided are pharmaceutical compositions used for killing or inhibiting growth or proliferation of cells, which are involved in a disease, by energy absorbing therapy, where: the compositions contain a nucleic acid molecule encoding a chromophore-producing enzyme(s); the chromophore-producing enzyme catalyzes production of a chromophore product when introduced into a cell; and the chromosome product absorbs energy from an energy source.

[0010] The following discussion of particular embodiments and details applies to the methods, methods of use and compositions. The cells, targeted by the methods, methods of use and compositions provided, are those that are involved in disease whose killing or inhibition effects treatment of the disease(s). Diseases include, but are not limited to, one or more of a proliferative disease, an inflammatory disease or an immune-mediated disease, such as a myeloproliferative disease, a lymphoproliferative disease, or a solid tumor disease. Proliferative diseases include, but are not limited to, cancer, atherosclerosis, rheumatoid arthritis, psoriasis, idiopathic pulmonary fibrosis, scleroderma and cirrhosis. Cancers include, but are not limited to, carcinoma, sarcoma, lymphoma and leukemia, such as cancer of the tongue, mouth, throat, stomach, cecum, colon, rectum, breast, ovary, uterus, thyroid, adrenal cortex, lung, kidney, prostate or pancreas. Proliferative disorders also include tumors and metastases. The cells involved include, but are not limited to, an inflammatory cell, an immune cell, a tumor cell. Tumors and tumor cells include solid tumors, circulating tumor cells and metastatic cells. In particular, the cells are non-melanoma cells and/or the tumors treated are not melanomas.

[0011] The nucleic acid molecule encoding the chromophore-producing enzyme(s) can be delivered by any suitable vehicle. For example, the molecule can be operatively inserted into a vector for expression in a cell. Vectors include, but are not limited to, viral vectors and non-viral vectors. Viral vectors include oncolytic viruses. such as, but not limited to, a Newcastle Disease virus, parvovirus, vaccinia virus, measles virus, reovirus, vesicular stomatitis virus (VSV), oncolytic adenoviruses, poliovirus and herpes viruses, or a derivative of any of these viruses that is modified to contain nucleic acid encoding a heterologous gene product. When the virus a poxvirus, it can be a vaccinia virus, such as, but not limited to, strains, such as Lister, Western Reserve (WR), Copenhagen (Cop), Bern, Paris, Tashkent, Tian Tan, Wyeth (DRYVAX), IHD-J, IHD-W, Brighton, Ankara, CVA382, Modified Vaccinia Ankara (MVA), Dairen I, LC16m8, LC16M0, LIVP, ACAM2000, WR 65-16, Connaught, New York City Board of Health (NYCBH), EM-63 and the NYVAC strain. Lister viruses include LIVP. The viruses can be clonal strains of an oncolytic virus. The sequence of nucleotides encoding a chromophore-producing enzyme can be inserted into or in place of a non-essential gene or region in the genome of an unmodified oncolytic virus or is inserted into or in place of nucleic acid encoding a heterologous gene product in the genome of an unmodified oncolytic virus.

[0012] Exemplary unmodified (not including the chromophore-producing enzyme) viruses include, an LIVP or derivative thereof comprising a sequence of nucleotides set forth in SEQ ID NO:1 or 188, or a sequence of nucleotides that has at least 85% 86%, 87%, 88%, 89%, 90%, 91%, 92%, 93%, 94%, 95%, 96%, 97%, 98%, 99% or more sequence identity to SEQ ID NO:1 or 188. LIVP and derivatives thereof can contain, for example, a sequence of nucleotides selected from: a) nucleotides 2,256-181,114 of SEQ ID NO:55, nucleotides 11,243-182,721 of SEQ ID NO:56, nucleotides 6,264-181,390 of SEQ ID NO:57, nucleotides 7,044-181,820 of SEQ ID NO:58, nucleotides 6,674-181,409 of SEQ ID NO:59, nucleotides 6,716-181,367 of SEQ ID NO:60 or nucleotides 6,899-181,870 of SEQ ID NO:61; or b) a sequence of nucleotides that has at least 85% sequence identity to a sequence of nucleotides 2,256-181,114 of SEQ ID NO:55, nucleotides 11,243-182,721 of SEQ ID NO:56, nucleotides 6,264-181,390 of SEQ ID NO:57, nucleotides 7,044-181,820 of SEQ ID NO:58, nucleotides 6,674-181,409 of SEQ ID NO:59, nucleotides 6,716-181,367 of SEQ ID NO:60 or nucleotides 6,899-181,870 of SEQ ID NO:61. The unmodified (virus not encoding the chromophore producing enzyme) oncolytic virus can be a LIVP clonal strain or derivative thereof, such as a strain comprising the sequence of nucleotides set forth in one of SEQ ID NOS: 55-61, or a sequence of nucleotides that has at least 86%, 87%, 88%, 89%, 90%, 91%, 92%, 93%, 94%, 95%, 96%, 97%, 98%, 99% or more sequence identity to one of SEQ ID NOS: 55-61. The unmodified oncolytic virus can contain nucleic acid encoding a heterologous gene product. The heterologous nucleic acid can be inserted into or in place of a non-essential gene or region in the genome of the virus. Heterologous gene products include, but are not limited to, therapeutic products and reporter gene products. A plurality of such products can be included in the virus. Exemplary products, include, but are not limited to, an anticancer agent, an antimetastatic agent, an antiangiogenic agent, and an immunomodulatory molecule, such as, for example, a therapeutic agent selected from among a hormone, a growth factor, a cytokine, a chemokine, a costimulatory molecule, ribozymes, a transporter protein, a single chain antibody, an antisense RNA, a prodrug converting enzyme, an siRNA, a microRNA, a toxin, an antitumor oligopeptide, a mitosis inhibitor protein, an antimitotic oligopeptide, an anti-cancer polypeptide antibiotic, an angiogenesis inhibitor, a tumor suppressor, a cytotoxic protein, a cytostatic protein and a tissue factor. These include, for example, a therapeutic agent selected from among a granulocyte macrophage colony stimulating factor (GM-CSF), monocyte chemotactic protein-1 (MCP-1), interleukin-6 (IL-6), interleukin-24 (IL-24), interferon gamma-induced protein 10 (IP-10), lymphotoxin inducible expression competes with HSV glycoprotein D for HVEM a receptor expressed on T-lymphocytes (LIGHT), p60 superantigen, OspF, OspG, signal transducer and activator of transcription protein (STAT1alpha), STAT1beta, plasminogen k5 domain (hK5), pigment epithelium-differentiation factor (PEDF), single chain anti-VEGF antibody, single chain anti-DLL4 antibody, single chain anti-fibroblast activation protein (FAP), NM23, cadherin 1 (ECAD or cdh1), relaxin 1 (RLN1), matrix metallopeptidase 9 (MMP9), erythropoietin (EPO), microRNA126 (miR-126), microRNA 181, microRNA 335, manganese superoxide dismutase (MnSOD), E3 ubiquitin protein ligase 1 (HACE1), natriuretic peptide precursor A (nppal), carboxypeptidase G2 (CPG2), alcohol dehydrogenase (ADH), CDC6, and bone morphogenetic protein 4 (BMP4). Reporter genes and reporter gene products include any that produce a signal or induce a product the produces a signal. Signals can be detected by any suitable method, including light and imaging, such as MRI and PET imaging. Products include a reporter gene product selected from among a fluorescent protein, a bioluminescent protein, an enzyme, or a cell surface protein that is capable of detection.

[0013] Other unmodified oncolytic viruses include any known to those of skill in the art, including those selected from among viruses designated GLV-1h68, JX-594, JX-954, ColoAd1, MV-CEA, MV-NIS, ONYX-015, B18R, H101, OncoVEX GM-CSF, Reolysin, NTX-010, CCTG-102, Cavatak, Oncorine, TNFerade, GLV-1h64, GLV-1i69, GLV-1h70, GLV-1h71, GLV-1h72, GLV-1h73, GLV-1h74, GLV-1h76, GLV-1h77, GLV-1h78, GLV-1h79, GLV-1h80, GLV-1h81, GLV-1h82, GLV-1h83, GLV-1h84, GLV-1h85, GLV-1h86, GLV-1j87, GLV-1j88, GLV-1j89, GLV-1h90, GLV-1h91, GLV-1h92, GLV-1h93, GLV-1h94, GLV-1h95, GLV-1h96, GLV-1h97, GLV-1h98, GLV-1h99, GLV-1h100, GLV-1h101, GLV-1h102, GLV-1h103, GLV-1h104, GLV-1h105, GLV-1h106, GLV-1h107, GLV-1h108, GLV-1h109, GLV-1h110, GLV-1h111, GLV-1h112, GLV-1h113, GLV-1h114, GLV-1h115, GLV-1h116, GLV-1h117, GLV-1h118, GLV-1h119, GLV-1h120, GLV-1h121, GLV-1h122, GLV-1h123, GLV-1h124, GLV-1h125, GLV-1h126, GLV-1h127, GLV-1h128, GLV-1h129, GLV-1h130, GLV-1h131, GLV-1h132, GLV-1h133, GLV-1h134, GLV-1e135, GLV-1h136, GLV-1h137, GLV-1h138, GLV-1h139, GLV-1h140, GLV-1h141, GLV-1h142, GLV-1h143, GLV-1h144, GLV-1h145, GLV-1h146, GLV-1h147, GLV-1h148, GLV-1h149, GLV-1h150, GLV-1h151, GLV-1h153, GLV-1h154, GLV-1h155, GLV-1h156, GLV-1h157, GLV-1h158, GLV-1h159, GLV-1h160, GLV-1h161, GLV-1h162, GLV-1h163, GLV-1h164, GLV-1h165, GLV-1h166, GLV-1h167, GLV-1h168, GLV-1h169, GLV-1h170, GLV-1h171, GLV-1h172, GLV-1h173, GLV-1h174, GLV-1h175, GLV-1h176, GLV-1h177, GLV-1h178, GLV-1h179, GLV-1h180, GLV-1h181, GLV-1h182, GLV-1h183, GLV-1h184, GLV-1h185, GLV-1h186, GLV-1h187, GLV-1h188, GLV-1h189, GLV-1h190, GLV-1h191, GLV-1h192, GLV-1h193, GLV-1h194, GLV-1h195, GLV-1h196, GLV-1h197, GLV-1h198, GLV-1h199, GLV-1h201, GLV-1h202, GLV-1h203, GLV-1h204, GLV-1h205, GLV-1h208, GLV-1h210, GLV-1h211, GLV-1h212, GLV-1h213, GLV-1h214, GLV-1h215, GLV-1h216, GLV-1h217, GLV-1h218, GLV-1h219, GLV-1h220, GLV-1h221, GLV-1h222, GLV-1h223, GLV-1h224, GLV-1h225, GLV-1h226, GLV-1h227, GLV-1h228, GLV-1h229, GLV-1h230, GLV-1h231, GLV-1h232, GLV-1h233, GLV-1h234, GLV-1h235, GLV-1h236, GLV-1h237, GLV-1h238, GLV-1h239, GLV-1h240, GLV-1h241, GLV-1h242, GLV-1h243, GLV-1h244, GLV-1h245, GLV-1h246, GLV-1h247, GLV-1h248, GLV-1h249, GLV-1h250, GLV-1h251, GLV-1h252, GLV-1h253, GLV-1h254, GLV-1h255, GLV-1h256, GLV-1h257, GLV-1h258, GLV-1h259, GLV-1h260, GLV-1h261, GLV-1h262, GLV-1h263, GLV-1h264, GLV-1h265, GLV-1h266, GLV-1h267, GLV-1h268, GLV-1h269, GLV-1h270, GLV-1h271, GLV-1h272, GLV-1h273, GLV-1h274, GLV-1h275, GLV-1h276, GLV-1h277, GLV-1h284, GLV-1h285, GLV-1b372, GLV-1h286, GLV-1h311, GLV-1h312, GLV-1h330, GLV-1h354, GLV-2b372, GLV-0b348, GLV-0b358 and GLV-0e365. Viruses among these have a sequence of nucleotides selected from among any of SEQ ID NOS: 2, 3, 65, 66, 189-194, 201-203, 210, or 211, or a sequence of nucleotides that exhibits at least 86%, 87%, 88%, 89%, 90%, 91%, 92%, 93%, 94%, 95%, 96%, 97%, 98%, 99% or more s sequence identity to any of SEQ ID NOS: 2, 3, 65, 66, 189-194, 201-203, 210, or 211.

[0014] The nucleic acid encoding the chromophore-producing enzyme can be provided to cells involved in a disease process in any manner in which they will be expressed primarily in such cells. This includes targeted delivery, such as delivery in vehicles that specifically interact with the cells, such as by virtue of a specific ligand, or vehicles in which the nucleic acid is expressed in such cells, such as control of expression by tissue/cell specific regulatory elements. Thus, the nucleic acid molecules encoding the enzymes can be inserted into any suitable vehicle and can be operatively inserted for expression in a cell. Such vehicles include, but are not limited to, non-viral vectors and viral vectors. Non-viral vectors include, but are not limited to, plasmids, cosmids, minicircles and artificial chromosomes.

[0015] The vehicles and vectors can be formulated for delivery, such as in a liposome, micelle, or nanoparticle. The vector, liposome or nanoparticle can be conjugated to a protein that targets the vector, liposome or nanoparticle to the cell involved in the disease. Conjugation can be direct or indirect. It can be via covalent or other interactions. Targeting to the cell, includes conjugation to a protein that targets to a tumor cell. Such a protein, that targets a tumor, can be selected from among transferrin, an arginine-glycine-aspartate (RGD) peptide, an αvβ3 binding targeting peptide, folate and an antibody or fragment thereof that specifically binds to a protein expressed or overexpressed on the surface of a tumor cell.

[0016] The chromophores produced upon expression of the encoded chromophore-producing enzyme include any that can be produced in a cell via a biochemical processes in the cell in which the enzyme participates. Any chromophore (energy-absorbing moiety) is contemplated, including those that heat up and/or produce a toxic product, including free radicals when exposed to energy. Energy includes any form of electromagnetic energy. Exemplary chromophores are melanins and/or precursors of melanins. Melanins include eumelanin and/or pheomelanin. The enzymes selected can produce a variety of ratios of eumelanin to total melanin.

[0017] Ratios include at least 0.2, 0.3, 0.4, 0.5, 0.6, 0.7, 0.8, 0.9 or more.

[0018] The chromophore-producing enzyme, encoded by the nucleic acid molecule, can be a tyrosinase, enzymatically active portion thereof or an enzymatically active variant thereof. Tyrosinases can be human or non-human tyrosinase. Exemplary tyrosinase enzymes include those having the sequence of amino acids set forth in any of SEQ ID NOS: 7, 81, 82, 84, 85, 87, 89, 91, 93, 95, 97, 99, 101, 103, 105, 107, 109, 111, 113, 115, or 117, or a mature form thereof lacking the signal sequence or a sequence of amino acids that exhibits at least 60%, 65%, 75%, 80%, 85%, 86%, 87%, 88%, 89%, 90%, 91%, 92%, 93%, 94%, 95%, 96%, 97%, 98%, 99% or more sequence identity to any of SEQ ID NOS: 7, 81, 82, 84, 85, 87, 89, 91, 93, 95, 97, 99, 101; 103, 105, 107, 109, 111, 113, 115, or 117, or a mature form thereof lacking the signal sequence.

[0019] Exemplary nucleic acid molecules are those that include the sequence of nucleotides set forth in any of SEQ ID NOS: 6, 80, 83, 86, 88, 90, 92, 94, 96, 98, 100, 102, 104, 106, 108, 110, 112, 114, 116 or 118 or a sequence of nucleotides that exhibits at least 70%, 75%, 80%, 85%, 86%, 87%, 88%, 89%, 90%, 91%, 92%, 93%, 94%, 95%, 96%, 97%, 98%, 99% or more sequence identity to any of SEQ ID NOS: 6, 80, 83, 86, 88, 90, 92, 94, 96, 98, 100, 102, 104, 106, 108, 110, 112, 114, 116 or 118. Exemplary nucleic acid molecules are those that encode the sequence of amino acids set forth in any of SEQ ID NOS: 7, 81, 82 and 84, or a sequence of amino acids that exhibits at least 70%, 75%, 80%, 85%, 86%, 87%, 88%, 89%, 90%, 91%, 92%, 93%, 94%, 95%, 96%, 97%, 98%, 99% or more sequence identity to any of SEQ ID NOS: 7, 81, 82 and 84. Exemplary nucleic acid molecules are those that include the sequence of nucleotides set forth in any of SEQ ID NOS: 6, 80 or 83, or a sequence of nucleotides that exhibits at least 70% 75%, 80%, 85%, 86%, 87%, 88%, 89%, 90%, 91%, 92%, 93%, 94%, 95%, 96%, 97%, 98%, 99% or more sequence identity to any of SEQ ID NOS: 6, 80 or 83.

[0020] A tyrosinase, enzymatically active portion thereof or an enzymatically active variant thereof, can be the only chromophore-producing enzyme encoded by the nucleic acid molecule, or the nucleic acid can further encode other chromophore-producing enzyme(s), such as a tyrosinase-related protein 1 (TRP-1) and/or a dopachrome tautomerase (DCT), or an enzymatically active portion thereof or an enzymatically active variant thereof, that are part of a melanin-producing pathway.

[0021] Any human or non-human TRP-1 enzyme is contemplated. Exemplary TRP-1 enzymes are those having the sequence of amino acids set forth in any of SEQ ID NOS: 20, 120, 121, 123, 124, 126, 127, 129, 131, 133, 135, 137, 139, 141, 142 or 144, or a mature form thereof lacking the signal sequence, or a sequence of amino acids that exhibits at least 75%, 80%, 85%, 86%, 87%, 88%, 89%, 90%, 91%, 92%, 93%, 94%, 95%, 96%, 97%, 98%, 99% or more sequence identity to any of SEQ ID NOS: 20, 120, 121, 123, 124, 126, 127, 129, 131, 133, 135, 137, 139, 141, 142 or 144 or a mature form thereof lacking the signal sequence. TRP-1-encoding nucleic acid molecules include those that contain the sequence of nucleotides set forth in any of SEQ ID NOS: 19, 119, 122, 125, 128, 130, 132, 134, 136, 138, 140, 143 or 145 or a sequence of nucleotides that exhibits at least 70%, 80%, 85%, 86%, 87%, 88%, 89%, 90%, 91%, 92%, 93%, 94%, 95%, 96%, 97%, 98%, 99% or more sequence identity to any of SEQ ID NOS: 19, 119, 122, 125, 128, 130, 132, 134, 136, 138, 140, 143 or 145.

[0022] The encoded DCT, or an enzymatically active portion thereof or an enzymatically active variant thereof, includes any such enzyme, including human and non-human enzymes. DCT enzymes include those that have the sequence of amino acids set forth in any of SEQ ID NOS: 30, 146, 147, 148, 150, 152, 154, 156, 158, 160, 162, 164 or 166, or a mature form thereof lacking the signal sequence, or a sequence of amino acids that exhibits at least 75%, 80%, 85%, 86%, 87%, 88%, 89%, 90%, 91%, 92%, 93%, 94%, 95%, 96%, 97%, 98%, 99% or more sequence identity to any of SEQ ID NOS: 30, 146, 147, 148, 150, 152, 154, 156, 158, 160, 162, 164 or 166, or the mature form thereof lacking the signal sequence. Included among the nucleic acid molecules are those where the nucleic acid molecule contains the sequence of nucleotides set forth in any of SEQ ID NOS: 29, 149, 151, 153, 155, 157, 159, 161, 163, 165 or 167 or a sequence of nucleotides that exhibits at least 70%, 80%, 85%, 86%, 87%, 88%, 89%, 90%, 91%, 92%, 93%, 94%, 95%, 96%, 97%, 98%, 99% or more sequence identity to any of SEQ ID NOS: 29, 149, 151, 153, 155, 157, 159, 161, 163, 165 or 167.

[0023] The nucleic acid molecule can encode a tyrosinase (Tyr) alone or in combination with a Trp 1 and/or DCT enzyme. Hence, exemplary nucleic acids are those that encode these enzymes as set forth above, including combinations of any of the sequences of nucleotides or encoded polypeptides set forth above. For example, the nucleic acid molecule can encode a chromophore-producing enzyme that is a tyrosinase or enzymatically active portion thereof or enzymatically active variant thereof and a tyrosinase-related protein 1 or enzymatically active portion thereof or enzymatically active variant thereof, where:

[0024] the nucleic acid molecule encodes a tyrosinase enzyme having a sequence of nucleotides selected from among: i) a sequence of nucleotides that encodes a tyrosinase enzyme having the sequence of amino acids set forth in any of SEQ ID NOS: 7, 81, 82, 84, 85, 87, 89, 91, 93, 95, 97, 99, 101, 103, 105, 107, 109, 111, 113, 115, or 117, or a mature form thereof lacking the signal sequence or a sequence of amino acids that exhibits at least 75% sequence identity to any of SEQ ID NOS: 7, 81, 82, 84, 85, 87, 89, 91, 93, 95, 97, 99, 101, 103, 105, 107, 109, 111, 113, 115, or 117, or a mature form thereof lacking the signal sequence; and ii) a sequence of nucleotides containing the sequence of nucleotides set forth in any of SEQ ID NOS: 6, 80, 83, 86, 88, 90, 92, 94, 96, 98, 100, 102, 104, 106, 108, 110, 112, 114, 116 or 118 or a sequence of nucleotides that exhibits at least 70% sequence identity to any of SEQ ID NOS: 6, 80, 83, 86, 88, 90, 92, 94, 96, 98, 100, 102, 104, 106, 108, 110, 112, 114, 116 or 118; and

[0025] the nucleic acid molecule encodes a TRP-1 enzyme having a sequence of nucleotides that is i) a sequence of nucleotides encoding a TRP-1 enzyme having the sequence of amino acids set forth in any of SEQ ID NOS: 20, 120, 121, 123, 124, 126, 127, 129, 131, 133, 135, 137, 139, 141, 142 or 144, or a mature form thereof lacking the signal sequence, or a sequence of amino acids that exhibits at least 75% or more sequence identity to any of SEQ ID NOS: 20, 120, 121, 123, 124, 126, 127, 129, 131, 133, 135, 137, 139, 141, 142 or 144 or the mature form thereof lacking the signal sequence; or ii) a sequence of nucleotides that contains the sequence of nucleotides set forth in any of SEQ ID NOS: 19, 119, 122, 125, 128, 130, 132, 134, 136, 138, 140, 143 or 145 or a sequence of nucleotides that exhibits at least 70% sequence identity to any of SEQ ID NOS: 19, 119, 122, 125, 128, 130, 132, 134, 136, 138, 140, 143 or 145.

[0026] The nucleic acid molecule can be operatively linked to regulatory regions for expression of the encoded enzymes to achieve constitutive or regulated expression of the encoded enzymes. Hence, the nucleic acid molecule can include a promoter operatively linked to the open reading frame encoding the chromophore-producing enzyme(s). Promoters include eukaryotic promoters, including eukaryotic virus promoters. The promoter can be a strong promoter and/or a promoter that is expressed at a particular time. Exemplary promoters included viral promoters, such as an adenoviral major late promoter, vaccinia synthetic early-late promoter (P_{SEL}), vaccinia synthetic late promoter (P_{SL}), simian virus 40 (SV40) promoter, cytomegalovirus (CMV) promoter, respiratory syncytial virus (RSV) promoter, a retroviral LTR promoter, human elongation factor 1α-subunit (EF1-1α) promoter, a ubiquitin C promoter (Ubc), a phosphoglycerate kinase-1 (PGK) promoter, small nuclear RNA U1b promoter and glucose 6-phosphate dehydrogenase promoter. Exemplary promoters include vaccinia virus promoters, such as, but not limited to, promoters selected from among P_{7.5k}, P₁₁ₖ, P_{SE}, P_{SEL}, P_{SL}, H5R, TK, P28, C11R, G8R, F17R, I3L, I8R, A1L, A2L, A3L, H1L, H3L, H5L, H6R, H8R, D1R, D4R, D5R, D9R, D11L, D12L, D13L, M1L, N2L, P4b and K1 promoters.

[0027] The promoters include those that are expressed in specific tissues or cells. Exemplary promoters include tumor-specific promoters, such as, but not limited to, a promoter selected from among c-erbB-2 oncogene, carcinoembryonic antigen (CEA), mucin (MUC1), prostate specific antigen (PSA), alpha-fetoprotein (AFP), L-plastin (LP-P), α-lactalbumin (ALA), midkine (MK), cyclooxygenase-2 (COX-2), probasin (ARR2PB), hypoxic response elements (HRE), hTERT, flt-1, flk1/KDR, E-selectin, endoglin, ICAM-2, preproendothelin 1 (PPE-1), prolactin (PRL), osteocalcin 2, CXCR4 tumor-specific promoters, E2F-1, antigen 33, cyclin A (CycA), cell division cycle 2 (Cdc2), cell division cycle 25 (Cdc25), B-myb, p107, tyrosine kinase (TK), DNA polymerase alpha, histone 2A (H2A), c-myc and a synthetic cell cycle-dependent promoter.

[0028] Particular embodiments of the nucleic acid molecules include, but are not limited to, nucleic acid molecules encoding a melanin-producing enzyme(s), operatively inserted into an oncolytic virus, whereby the oncolytic virus contains the sequence of nucleotides set forth in any of SEQ ID NOS: 64, 67-70, 198-200, 204-206 or 212-216 or a sequence of nucleotides that exhibits at least 85%, 86%, 87%, 88%, 89%, 90%, 91%, 92%, 93%, 94%, 95%, 96%, 97%, 98%, 99% or more sequence identity to any of SEQ ID NOS: 64, 67-70, 198-200, 204-206 or 212-216.

[0029] After administration of the nucleic acid to a subject, energy is administered. The energy should be administered after a sufficient time for the chromophore to be expressed. Timing depends upon the delivery vehicle, the targeted cell, the enzyme expressed and other such parameters known to the skilled artisan. Such times can be empirically determined, if necessary, or predetermined. Hence, the methods (and compositions) are employed such that the subject is exposed to an energy source, the energy of which is absorbed by the produced chromophore after administration of the nucleic acid molecule encoding the chromophore-producing enzyme(s). The time can be predetermined, and includes time sufficient for the nucleic acid molecule to express the chromophore-producing enzyme(s) in a cell in the subject and the production of the chromophore product in the cell. Examples of such timing is at least 8 hours, 10 hours, 12 hours to 1 week, 8 days, 1 month or 24 hours to 2 weeks after delivery of the nucleic acid molecule. As noted above, various regimens will include cyclical administration of the nucleic acid, such that the energy can be applied at regular intervals after the first administration of the nucleic acid. The energy can be administered/applied at least, 8 hours, 12 hours, 24 hours, 48 hours, 72 hours, 4 days, 5 days, 6 days, 7 days, 8 days, 9 days, 10 days, 11 days, 12 days, 13 days and 14 days post-nucleic acid delivery or at such regular intervals after the first administration of the nucleic acid molecule(s).

[0030] Energy includes electromagnetic energy and chemical energy. Energy includes any that is absorbed by the resulting chromophore. These include, but are not limited to, chemical energy, electric energy, radiant energy, microwave energy, nuclear energy, magnetic energy, elastic energy, sound energy, mechanical energy and luminous energy. The energy can be applied externally or internally. External energy can be applied where the target cells are on or near the surface of the skin, and/or where the energy penetrates into the body. Thus, for example, energy can be applied externally to an area of the subject to be treated, including where there is a targeted tissue/cell, such as a tumor located no more than 30 mm below the skin.

[0031] The energy can be applied internally, for example, by employing fiber optics to administer directly to a tissue or cell or organ in the subject. The energy source includes electromagnetic (EM) energy applied to effect photothermal therapy. EM energy includes that where the wavelength of electromagnetic energy applied is 500 to 1500 nm, 600 to 1200 nm or 700 to 900 nm, such as but are not limited to, less than 1500 nm, 1400 nm, 1300 nm, 1200 nm, 1100 nm, 1000 nm, 900 nm and/or is at least or at least about 500 nm, 600 nm, 700 nm, 800 nm and 900 nm. The energy can be electromagnetic energy applied to effect photodynamic therapy. For such therapy, the wavelength of electromagnetic energy applied can be 100 to 400 nm, 100 to 280 nm, 280 nm to 320 nm, 280 to 315 nm, 315 to 400 nm or 320 to 420 nm or other suitable range, such as less than 500 nm and/or is at least 50 nm, 100 nm, 200 nm, 300 nm, or 400 nm. Energy sources include, but are not limited to a light source selected from among a laser, light-emitting diodes, fluorescent lamps, dichroic lamps, and a light box. Energy can be applied internally, such as with an endoscope or fiber optic catheter.

[0032] The energy is applied for a sufficient time to effect treatment. The time should be sufficient to release sufficient heat for hyperthermia and/or to produce a product, such as free radical or toxic product. The time depends upon the energy administered as well as the source and target. Exemplary time periods include, but are not limited to, 30 seconds to 30 minutes, 1 minute to 20 minutes, 2 minutes to 15 minutes or 1 minute to 10 minutes, including at least 60 or 90 seconds, 5 minutes, 10 minutes, 15 minutes or longer. The energy can be applied one time, repeatedly or intermittently after administration of the nucleic acid molecule.

[0033] The amount of nucleic acid molecule to administer to the subject depends upon the form of the nucleic acid molecule and other parameters known to those of skill in the art. For example, where the nucleic acid molecule is a non-viral vector or DNA, the nucleic acid molecule can be administered in exemplary amounts in the range of from or from about 0.005 mg/kg body weight to 50 mg/kg body weight, such as administered in an amount in the range of from or from about 0.005 mg/kg to 20 mg/kg or 0.05 mg/kg to 5 mg/kg. Where the nucleic acid molecule is a viral vector, exemplary dosages includes 1×10⁴ to 1×10¹⁴ pfu, such as 1×10⁵ to 1×10⁹, including for example 1×10⁴ to 1×10⁸ pfu, 1×10⁵ to 1×10⁷ pfu, 1×10⁷ to 1×10¹⁴ pfu, 1×10⁷ to 1×10¹⁰ pfu or 1×10⁹ to 1×10¹⁰ pfu, such as at least or about 1×10⁶, 1×10⁷, 1×10⁸, 1×10⁹, 2×10⁹, 3×10⁹, 4×10⁹, or 5×10⁹ pfu.

[0034] Where the nucleic acid molecule is administered in a composition, the composition is administered in a suitable volume, such as, but not limited to, from or from about 0.01 mL to 100 mL, such as, but not limited to, from or from about 0.1 mL to 100 mL, 1 mL to 100 mL, 10 mL to 100 mL, 0.01 mL to 10 mL, 0.1 mL to 10 mL, 1 mL to 10 mL, 0.02 mL to 20 mL, 0.05 mL to 5 mL, 0.5 mL to 50 mL or 0.5 mL to 5 mL or at least or 0.05 mL, 0.5 mL, 1 mL, 2 mL, 3 mL, 4 mL, 5 mL, 6 mL, 7 mL, 8 mL, 9 mL or 10 mL.

[0035] The nucleic acid molecule can be administered, topically, locally or systemically, such as administered intravenously, intraarterially, intratumorally, endoscopically, intralesionally, intramuscularly, intradermally, intraperitoneally, intravesicularly, intraarticularly, intrapleurally, percutaneously, subcutaneously, orally, parenterally, intranasally, intratracheally, by inhalation, intracranially, intraprostaticaly, intravitreally, topically, ocularly, vaginally, or rectally. Local administration includes locally inside a body cavity. The nucleic acid molecule can be delivered with a method that facilitates or enhances delivery, such, for example delivery in the presence of a physical method to facilitate entry into cells selected from among electroporation, sonoporation, hydrodynamic, pressure, ultrasound and gene gun.

[0036] Subjects include any living organism, including animals and plants. Animals, include human and non-human mammals and other animals such as a gorilla, bonobo, ape, monkey, mouse, rat, amphibian, rabbit, ferret, chicken, goat, cow, deer, sheep, horse, pig, dog, cat and other zoo animals, farm animals and pets. The subject is one who has a disease or is suspected of having a disease, such as cancer. Cancers include solid tumors and tumors of the blood and lymph system, such as cancer of the lung, breast, colon, brain, prostate, liver, pancreas, esophagus, kidney, stomach, thyroid, bladder, uterus, cervix, ovary and leukemias and lymphomas. The tumors can be localized or metastatic.

[0037] The methods and methods of use herein include, not only treatment, but also diagnosis prior to treatment and monitoring during and after treatment, including to confirm that the nucleic acid is delivered and the chromophore produced. Hence the methods and methods of use include those where the nucleic acid molecule encoding a chromophore-producing enzyme is administered to the subject and the method of diagnosing the subject involves detecting the chromophore-product in the subject. Detection of expression of the chromophore in the subject can employ any method and/or product suitable for detection of the particular chromophore, including, for example, optoacoustic imaging, multispectral optoacoustic tomographic (MSOT) imaging and magnetic resonance imaging (MRI).

[0038] As noted above, the nucleic acid can be administered one or a plurality of times, including cyclically. The nucleic acid molecule can be administered, for example, two times, three times, four times, five times, six times or seven times. The nucleic acid administration can be for detection, detection and treatment, and/or treatment and monitoring. In addition, the nucleic acid administration and energy treatment can be employed with other therapies for a particular disorder. For example, the energy treatment can be employed in combination with a second (or several) therapeutic agent or treatment for the particular disease, such as a proliferative disorder or disease, such as cancer. The different treatments can be administered together, sequentially, simultaneously, intermittently and/or other combinations thereof.

[0039] Other treatments include, but are not limited to, surgery, radiation therapy, immunosuppressive therapy, administration of an anticancer agent or administration of an oncolytic virus (such as a virus different from the virus encoding the chromophore-producing enzyme, where the nucleic acid administered is a virus). Other treatments include, for example, administration of an anticancer agent selected from among a cytokine, a chemokine, a growth factor, a photosensitizing agent, a toxin, an anti-cancer antibiotic, a chemotherapeutic compound, a radionuclide, an angiogenesis inhibitor, a signaling modulator, an anti-metabolite, an anti-cancer vaccine, an anti-cancer oligopeptide, a mitosis inhibitor protein, an antimitotic oligopeptide, an anticancer antibody, an anti-cancer antibiotic, an immunotherapeutic agent and a combination of any of the preceding. These include, for example, cisplatin, carboplatin, gemcitabine, irinotecan, an anti-EGFR antibody and an anti-VEGF antibody.

[0040] Where the energy therapy employs an oncolytic virus and/or another therapy is oncolytic virus therapy, the oncolytic viruses employed include, but are not limited to, newcastle Disease virus, parvovirus, reovirus, measles virus, vaccinia virus, vesicular stomatitis virus (VSV), oncolytic adenoviruses and herpes viruses, including such viruses modified to contain nucleic acid encoding a heterologous gene product, such as a therapeutic product. The heterologous gene product includes a therapeutic and/or reporter gene product, such as, but not limited to, an anticancer agent, an antimetastatic agent, an antiangiogenic agent, and/or an immunomodulatory molecule.

[0041] Oncolytic viruses include, but are not limited to, those designated GLV-1h68, JX-594, JX-954, ColoAd1, MV-CEA, MV-NIS, ONYX-015, B18R, H101, OncoVEX GM-CSF, Reolysin, NTX-010, CCTG-102, Cavatak, Oncorine, TNFerade, GLV-1h64, GLV-1i69, GLV-1h70, GLV-1h71, GLV-1h72, GLV-1h73, GLV-1h74, GLV-1h76, GLV-1h77, GLV-1h78, GLV-1h79, GLV-1h80, GLV-1h81, GLV-1h82, GLV-1h83, GLV-1h84, GLV-1h85, GLV-1h86, GLV-1j87, GLV-1j88, GLV-1j89, GLV-1h90, GLV-1h91, GLV-1h92, GLV-1h93, GLV-1h94, GLV-1h95, GLV-1h96, GLV-1h97, GLV-1h98, GLV-1h99, GLV-1h100, GLV-1h101, GLV-1h102, GLV-1h103, GLV-1h104, GLV-1h105, GLV-1h106, GLV-1h107, GLV-1h108, GLV-1h109, GLV-1h110, GLV-1h111, GLV-1h112, GLV-1h113, GLV-1h114, GLV-1h115, GLV-1h116, GLV-1h117, GLV-1h118, GLV-1h119, GLV-1h120, GLV-1h121, GLV-1h122, GLV-1h123, GLV-1h124, GLV-1h125, GLV-1h126, GLV-1h127, GLV-1h128, GLV-1h129, GLV-1h130, GLV-1h131, GLV-1h132, GLV-1h133, GLV-1h134, GLV-1e135, GLV-1h136, GLV-1h137, GLV-1h138, GLV-1h139, GLV-1h140, GLV-1h141, GLV-1h142, GLV-1h143, GLV-1h144, GLV-1h145, GLV-1h146, GLV-1h147, GLV-1h148, GLV-1h149, GLV-1h150, GLV-1h151, GLV-1h153, GLV-1h154, GLV-1h155, GLV-1h156, GLV-1h157, GLV-1h158, GLV-1h159, GLV-1h160, GLV-1h161, GLV-1h162, GLV-1h163, GLV-1h164, GLV-1h165, GLV-1h166, GLV-1h167, GLV-1h168, GLV-1h169, GLV-1h170, GLV-1h171, GLV-1h172, GLV-1h173, GLV-1h174, GLV-1h175, GLV-1h176, GLV-1h177, GLV-1h178, GLV-1h179, GLV-1h180, GLV-1h181, GLV-1h182, GLV-1h183, GLV-1h184, GLV-1h185, GLV-1h186, GLV-1h187, GLV-1h188, GLV-1h189, GLV-1h190, GLV-1h191, GLV-1h192, GLV-1h193, GLV-1h194, GLV-1h195, GLV-1h196, GLV-1h197, GLV-1h198, GLV-1h199, GLV-1h201, GLV-1h202, GLV-1h203, GLV-1h204, GLV-1h205, GLV-1h208, GLV-1h210, GLV-1h211, GLV-1h212, GLV-1h213, GLV-1h214, GLV-1h215, GLV-1h216, GLV-1h217, GLV-1h218, GLV-1h219, GLV-1h220, GLV-1h221, GLV-1h222, GLV-1h223, GLV-1h224, GLV-1h225, GLV-1h226, GLV-1h227, GLV-1h228, GLV-1h229, GLV-1h230, GLV-1h231, GLV-1h232, GLV-1h233, GLV-1h234, GLV-1h235, GLV-1h236, GLV-1h237, GLV-1h238, GLV-1h239, GLV-1h240, GLV-1h241, GLV-1h242, GLV-1h243, GLV-1h244, GLV-1h245, GLV-1h246, GLV-1h247, GLV-1h248, GLV-1h249, GLV-1h250, GLV-1h251, GLV-1h252, GLV-1h253, GLV-1h254, GLV-1h255, GLV-1h256, GLV-1h257, GLV-1h258, GLV-1h259, GLV-1h260, GLV-1h261, GLV-1h262, GLV-1h263, GLV-1h264, GLV-1h265, GLV-1h266, GLV-1h267, GLV-1h268, GLV-1h269, GLV-1h270, GLV-1h271, GLV-1h272, GLV-1h273, GLV-1h274, GLV-1h275, GLV-1h276, GLV-1h277, GLV-1h284, GLV-1h285, GLV-1b372, GLV-1h286, GLV-1h311, GLV-1h312, GLV-1h330, GLV-1h354, GLV-2b372, GLV-0b348, GLV-0b358 and GLV-0e365.

[0042] Also provided are compositions that contain any Lister strain virus or vaccinia virus that encodes one or more chromophore-encoding enzyme(s). These include any of the above-noted viruses modified to encode the enzyme(s), including the enzymes described above. The compositions include pharmaceutical compositions, which can include a pharmaceutically acceptable carrier. They can be formulated for local or systemic administration.

[0043] Also provided are the viruses. For example, also provided are Lister strain viruses or vaccinia viruses, and compositions containing them, that contain a sequence of nucleotides encoding a tyrosinase or an enzymatically active portion or an enzymatically active variant of the tyrosinase enzyme. The viruses include those discussed above that encode the tyrosinases. Vaccinia viruses include those of strains, such as Lister, Western Reserve (WR), Copenhagen (Cop), Bern, Paris, Tashkent, Tian Tan, Wyeth (DRYVAX), IHD-J, IHD-W, Brighton, Ankara, CVA382, Modified Vaccinia Ankara (MVA), Dairen I, LC 16m8, LC 16M0, LIVP, ACAM2000, WR 65-16, NYCBH, EM-63 and NYVAC strain. These include LIVP or WR viruses, including all of those described herein. Hence, the Lister strain viruses or vaccinia viruses provided contain a sequence of nucleotides encoding the tyrosinase that is operatively linked to a promoter, such as a eukaryotic promoter or a viral promoter, which can be native or heterologous, such as vaccinia viral promoters selected from among P_{7.5k}, P₁₁ₖ, P_{SE}, P_{SEL}, P_{SL}, H5R, TK, P28, C11R, G8R, F17R, I3L, I8R, A1L, A2L, A3L, H1L, H3L, H5L, H6R, H8R, D1R, D4R, D5R, D9R, D11L, D12L, D13L, M1L, N2L, P4b and K1 promoters.

[0044] Vaccinia viruses or Lister strain viruses provided include those that contain a sequence of nucleotides encoding a tyrosinase, or an enzymatically active portion thereof, or an enzymatically active variant of the enzyme operatively linked to a strong promoter, or one selected for high expression of the tyrosinase. In particular, the promoters include those that are strong promoters for high expression or for expression timed after viral replication to increase the amount of enzyme produced. Exemplary promoters include a virus late promoter, a retroviral LTR, and other strong eukaryotic promoters, such as, but not limited to, adenoviral major late promoter, vaccinia synthetic early-late promoter (P_{SEL}), vaccinia synthetic late promoter (P_{SL}), simian virus 40 (SV40) promoter, cytomegalovirus (CMV) promoter, respiratory syncytial virus (RSV) promoter, human elongation factor 1α-subunit (EF1-1α) promoter, a ubiquitin C promoter (Ubc), a phosphoglycerate kinase-1 (PGK) promoter, small nuclear RNA U1b promoter and glucose 6-phosphate dehydrogenase promoter.

[0045] Among vaccinia viruses and Lister strain viruses provided herein are those containing a sequence of nucleotides encoding a tyrosinase enzyme, and also contain a sequence of nucleotides encoding an accessory melanin-producing enzyme. For example, provided herein are vaccinia viruses, including WR or Lister strain, such as LIVP viruses, including any of those described herein, that contain: a first sequence of nucleotides encoding a tyrosinase, or an enzymatically active portion or an enzymatically active variant of the enzyme, operatively linked to a promoter; and a second sequence of nucleotides encoding an accessory melanin-producing enzyme operatively linked to a promoter, wherein the accessory melanin-producing enzyme is a tyrosinase-related protein 1 (TRP-1) and/or a dopachrome tautomerase (DCT), or an enzymatically active portion or an enzymatically active variant thereof, or combinations thereof. The first and second sequence can be expressed under control of the same promoter or under control of a different promoter. The first and second sequence can be expressed under the control of the same promoter separated by an internal ribosome entry site (IRES). The two sequences can be linked to different promoters of different strengths, such as embodiments where the promoter operatively linked to the second sequence of nucleotides is a strong promoter, such as a virus late promoter, a retroviral LTR, such as the adenoviral major late promoter, vaccinia synthetic early-late promoter (P_{SEL}), vaccinia synthetic late promoter (P_{SL}), simian virus 40 (SV40) promoter, cytomegalovirus (CMV) promoter, respiratory syncytial virus (RSV) promoter, human elongation factor 1α-subunit (EF1-1α) promoter, a ubiquitin C promoter (Ubc), a phosphoglycerate kinase-1 (PGK) promoter, small nuclear RNA U1b promoter or glucose 6-phosphate dehydrogenase promoter. The sequence of nucleotides encoding a tyrosinase and/or sequence of nucleotides encoding an accessory melanin-producing enzyme is inserted into or in place of a non-essential gene or region in the genome of an unmodified oncolytic virus or is inserted into or in place of nucleic acid encoding a heterologous gene product in the genome of an unmodified oncolytic virus.

[0046] The unmodified Lister strain virus can be an LIVP or derivative thereof comprising a sequence of nucleotides set forth in SEQ ID NO:1 or 188, or a sequence of nucleotides that has at least 85%, 86%, 87%, 88%, 89%, 90%, 91%, 92%, 93%, 94%, 95%, 96%, 97%, 98%, 99% or more sequence identity to SEQ ID NO:1 or 188. Examples of the unmodified Lister strain virus or vaccinia viruses include clonal strains of LIVP or a derivatives thereof that contain a sequence of nucleotides selected from: a) nucleotides 2,256-181,114 of SEQ ID NO:55, nucleotides 11,243-182,721 of SEQ ID NO:56, nucleotides 6,264-181,390 of SEQ ID NO:57, nucleotides 7,044-181,820 of SEQ ID NO:58, nucleotides 6,674-181,409 of SEQ ID NO:59, nucleotides 6,716-181,367 of SEQ ID NO:60 or nucleotides 6,899-181,870 of SEQ ID NO:61; or b) a sequence of nucleotides that has at least 85% sequence identity to a sequence of nucleotides 2,256-181,114 of SEQ ID NO:55, nucleotides 11,243-182,721 of SEQ ID NO:56, nucleotides 6,264-181,390 of SEQ ID NO:57, nucleotides 7,044-181,820 of SEQ ID NO:58, nucleotides 6,674-181,409 of SEQ ID NO:59, nucleotides 6,716-181,367 of SEQ ID NO:60 or nucleotides 6,899-181,870 of SEQ ID NO:61, and viruses that have at least 86%, 87%, 88%, 89%, 90%, 91%, 92%, 93%, 94%, 95%, 96%, 97%, 98%, 99% or more sequence identity to any of SEQ ID NOS: 55-61.

[0047] As described herein, the viruses can encode another heterologous gene product, such as a therapeutic product and/or reporter product, as described above and herein, and inserted into or in place of a non-essential gene or region in the genome of the virus as described above.

[0048] All of the vaccinia viruses, particularly Lister strain, such as LIVP viruses, described above for use in the methods and compositions, also are provided herein, as are compositions containing such viruses. Examples of such Lister strain virus or vaccinia viruses are any that contain the sequence of nucleotides set forth in any of SEQ ID NOS: 64, 67-70, 198-200, 204-206 or 212-216, or a sequence of nucleotides that exhibits at least 85% sequence identity to any of SEQ ID NOS: 64, 67-70, 198-200, 204-206 or 212-216, such as at least 86%, 87%, 88%, 89%, 90%, 91%, 92%, 93%, 94%, 95%, 96%, 97%, 98%, 99% or more sequence identity to any of SEQ ID NOS: 64, 67-70, 198-200, 204-206 or 212-216. For example, provided herein are viruses selected from among those designated GLV-1h326, GLV-1h327, GLV-1h459, GLV-1h460, GLV-1h461, GLV-2b482, GLV-0e407, GLV-1h310, GLV-1h322, GLV-1h323, GLV-1h324, GLV-1h325, GLV-1h458, GLV-2b452, GLV-2b453 and GLV-0e406.

### BRIEF DESCRIPTION OF THE FIGURES

[0049] FIG. 1 depicts the biosynthetic pathways of eumelanin and pheomelanin forms of melanin. The figure is adapted from Kobayashi et al. (1995) J Cell Science, 108:2301-2309, and depicts the order of molecules involved in the biosynthesis of eumelanin and pheomelanin, starting with the amino acid, tyrosine. In addition, the figure depicts the known enzymes (i.e., tyrosinase (Tyr), tyrosinase related protein-1 (TRP-1), and dopachrome tautomerase (Dct/TRP2)), which catalyze the reactions to generate the various melanin precursor molecules.

[0050] FIG. 2A-C depicts a lineage map of modified Vaccinia viruses derived from (A) GLV-1h68, (B) LIVP 1.1.1, and (C) Western Reserve (WR) viruses.

### DETAILED DESCRIPTION

### Outline

[0051] A. Definitions
[0052] B. Gene-Evoked Chromophore (e.g., Melanin) Production as Theranostic Mediator
[0053] C. Melanin Biosynthesis and Properties
   [0054] 1. Biosynthesis of Melanin
   [0055] 2. Properties of Melanin
      [0056] a. Optical Properties
      [0057] b. Metal Binding and reduction-oxidation (redox)
[0058] D. Nucleic Acid Molecules Encoding Chromophore-Producing Enzymes
   [0059] 1. Chromophore-Producing Enzymes
      [0060] a. Tyrosinase
      [0061] b. Tyrosinase-Related Protein-1
      [0062] c. Dopachrome Tautomerase
   [0063] 2. Nucleic Acid Molecules
      [0064] a. Virus and Viral Vectors
      [0065] b. Non-Viral Vectors
   [0066] 3. Localized Delivery or Expression of Nucleic Acid Molecules
      [0067] a. Targeted Delivery
      [0068] b. Cell-Specific (e.g., Tumor-specific) expression
      [0069] c. Oncolytic Viruses
[0070] E. Vaccinia Viruses and LIVP
   [0071] 1. Lister and LIVP Strains
   [0072] 2. Heterologous Nucleic Acid and Modified Viruses
      [0073] a. Exemplary Modifications
         [0074] i. Diagnostic or Reporter Gene Products
         [0075] ii. Therapeutic Gene Products
         [0076] iii. Modifications to alter attenuation of the viruses
      [0077] b. Control of Heterologous Gene Expression
      [0078] c. Exemplary Modified or Recombinant Viruses (Parental Strains)
      [0079] d. Exemplary Vaccinia Viruses Encoding a Chromophore-Producing Enzyme or Enzymes
      [0080] e. Methods of Generating Modified Viruses
   [0081] 3. Methods of Producing Viruses
      [0082] a. Host cells for Propagation
      [0083] b. Concentration Determination
      [0084] c. Storage Methods
      [0085] d. Preparation of Virus
   [0086] 4. Anti-Tumorigenicity and Efficacy
      [0087] a. Tumor-Associated Replication Initiator
      [0088] b. Cytotoxicity
      [0089] c. Tumor Growth
   [0090] 5. Toxicity/Safety
[0091] F. Pharmaceutical Compositions, Combinations and Kits
   [0092] 1. Pharmaceutical Compositions
   [0093] 2. Host Cells
   [0094] 3. Combinations
   [0095] 4. Kits
[0096] G. Therapeutic, Diagnostic and Monitoring Methods
   [0097] 1. Delivery of Nucleic Acid to Subjects for Treatment, Diagnosis, or Theragnosis
      [0098] a. Methods of Nucleic Acid Delivery
      [0099] b. Dosages and Dosage Regimes
   [0100] 2. Energy Absorbing Therapeutic Methods
      [0101] a. Heat Therapies: Hyperthermia and Thermotherapies
         [0102] i. Photothermal Therapy Methods
         a) Laser Light Therapy
         i) Parameters
         ii) Laser Positioning
         b) Microwave-based Heat Therapy
         c) Infrared light therapy
         [0103] ii. Ultrasound Heat Therapy
         [0104] iii. Magnetic Conduction Methods
      [0105] b. Photodynamic Therapy
   [0106] 3. Methods of Detection
      [0107] a. Photoacoustic Tomography
      [0108] b. Multispectral Optoacoustic Tomography (MSOT)
      [0109] c. Magnetic Resonance Imaging (MRI)
   [0110] 4. Monitoring
      [0111] a. Monitoring viral gene expression
      [0112] b. Monitoring tumor size
      [0113] c. Monitoring antibody titer
      [0114] d. Monitoring general health diagnostics
      [0115] e. Monitoring coordinated with treatment
[0116] H. Combination Therapy
   [0117] 1. Surgical Procedures
   [0118] 2. Radiotherapy
   [0119] 3. Therapeutic Compounds
[0120] I. Examples

### A. DEFINITIONS

[0121] Unless defined otherwise, all technical and scientific terms used herein have the same meaning as is commonly understood by one of skill in the art to which the invention(s) belong. All patents, patent applications, published applications and publications, GenBank sequences, databases, websites and other published materials referred to throughout the entire disclosure herein, unless noted otherwise, are incorporated by reference in their entirety. In the event that there are a plurality of definitions for terms herein, those in this section prevail. Where reference is made to a URL or other such identifier or address, it understood that such identifiers can change and particular information on the internet can come and go, but equivalent information can be found by searching the internet. Reference thereto evidences the availability and public dissemination of such information.

[0122] As used herein, energy-absorbing therapy refers to any therapy that effects treatment of a subject to ameliorate or reduce symptoms of a condition, disorder or disease by virtue of absorption of energy by a moiety in a cell or tissue and conversion of absorbed energy into a form that can be used for therapeutic treatment. For example, absorbed energy is converted to generate heat and/or other chemical change or changes. The converted energy can occur in a cell, tissue or organ of a subject following exposure of the cell, tissue or organ to an energy source. In some cases, the converted energy can result in toxicity to the cell, tissue or organ leading to cell death, which can effect treatment where the cell, tissue or organ are involved in a disease. Exemplary forms of energy that can effect therapy include chemical energy, electric energy, radiant energy, electromagnetic energy, nuclear energy, magnetic energy, elastic energy, sound energy, mechanical energy or luminous energy.

[0123] As used herein, an energy source refers to any source from which energy can be obtained to provide heat, light, sound or power. For example, a desired wavelength of electromagnetic energy can be obtained from a laser, light-emitting diode, fluorescent lamp, dichroic lamp, a light box or other similar device.

[0124] As used herein, electromagnetic energy refers to a form of energy that is reflected or emitted from objects in the form of electrical and magnetic waves that can travel through space. Electromagnetic energy includes, for example, gamma rays, x-rays, ultraviolet radiation, visible light, infrared radiation, microwaves and radiowaves. For purposes of methods herein, and depending on the particular application, wavelengths of electromagnetic energy can be applied at 100 nm to 1500 nm, such as 100 to 400 nm, 100 to 280 nm, 280 nm to 320 nm, 280 to 315 nm, 315 to 400 nm, 320 to 420 nm, 500 to 1500 nm, 600 to 1200 nm or 700 to 900 nm.

[0125] As used herein, sound or acoustic energy is a form mechanical energy produced from sound vibrations or acoustic waves.

[0126] As used herein, ultrasound energy is a cyclic sound pressure wave with a frequency greater than the upper limit of the human hearing range, generally greater than 20,000 Hz. Ultrasound energy can be applied using a device capable of applying sonic energy, such as a sonicator or other ultrasound device. Ultrasound waves can be applied by focused ultrasound with bursts of ultrasound energy of 1-4 mHz repeated at a repetition frequency. The applied energy can be converted to heat by a cell, tissue or organ. For example, chromophore products, such as melanin, can absorb ultrasound acoustic waves to produce heat.

[0127] As used herein, a chromophore-producing enzyme refers to any enzyme that participates in a biochemical pathway that produces a chromophore or chromophore product. The enzymes catalyzes one or more reactions that result in the production of a chromophore or chromophore product in a cell. A chromophore-producing enzyme includes enzymes that are sufficient to achieve catalysis in the absence of other enzymes in the cell. Chromophore-producing enzymes also include enzymes that alone are not sufficient to produce a chromophore product but that act as an accessory enzyme to alter production of a chromophore product in the cell, stabilize the formation of another enzyme or chromophore product, or otherwise contribute to the formation of a chromophore product in a cell.

[0128] As used herein, a melanin-producing enzyme refers to any enzyme that participates in a biochemical pathway that produces melanin or a melanin product. The enzyme catalyzes one or more reactions that result in the production of melanin or a melanin product in a cell. Hence, a melanin-producing enzyme includes a tyrosinase enzyme, which is an enzyme that is sufficient to achieve catalysis of melanin in the absence of other enzymes in the cell. Melanin-producing enzymes also include accessory chromophore-producing enzymes that alone are not sufficient to produce melanin but contribute to the production of melanin in a cell. Such accessory melanin-producing enzymes alter production of a melanin product in the cell, stabilize the formation of another enzyme (e.g., tyrosinase) or a melanin product, or otherwise contribute to the formation of a melanin product in a cell. For example, tyrosinase-related protein 1 (TRP-1) and dopachrome tautomerase (DCT) are accessory melanin-producing enzymes that, among other roles, catalyze reactions to alter the ratio of eumelanin to pheomelanin in a cell.

[0129] As used herein, a chromophore refers to a compound or chemical group that is capable of selective energy absorption (e.g., light absorption) resulting in the coloration of a molecule.

[0130] As used herein, a chromophore product (e.g., melanin product) is a chromophore catalyzed de novo in a cell by an exogenously introduced chromophore-producing enzyme. Hence, the chromophore product is one whose presence is achieved, increased or overproduced in a cell by externally applied or administered source providing a chromophore-producing enzyme, such as a nucleic acid molecule encoding a chromophore-producing enzyme. It is understood that the exogenously introduced chromophore-producing enzyme can be an enzyme that is present or exists in the cell, but whose level or activity is increased compared to the level or activity of the chromophore-producing enzyme naturally present in the cell.

[0131] As used herein, melanin refers to a polymer built from compounds produced by the oxidation of the amino acid tyrosine. Melanin includes eumelanin and/or pheomelanin.

[0132] As used herein, eumelanin refers to brown-black polymers that are insoluble, nitrogenous pigments produced by the oxidative polymerization of 5,6-dihydroxyindoles derived enzymatically from tyrosine via DOPA. Eumelanin is made up of 5,6-dihydroxyindolequinone (DHI, or hydroquinone), 5,6-dihydroxyindole 2-carboxylic acid (denoted as DHICA), and their derived forms. Eumelanin is found in hair, areolae and skin and is abundant in people with dark skin. As shown in FIG. 1, the production of eumelanin is catalyzed by tyrosinase to produce DOPA and then dopaquinone, which is then converted to leucodopachrome (L-DOPA) to produce DHI or DHICA and the oxidized forms.

[0133] As used herein, pheomelanin refers to sulfur-containing, alkali-soluble, pigments produced by oxidative polymerization of cysteinyldopas via 1,4-benzothiazine intermediates. Thus, pheomelanin is a cysteine-containing red-brown polymer of benzothiazine units. Pheomelanin differs from eumelanin in that its oligomer structure incorporates benzothiazine and benzothiazole units that are produced instead of DHI and DHICA, when the amino acid L-cysteine is present. As shown in FIG. 1, the production of pheomelanin is catalyzed by tyrosinase to produce DOPA and then dopaquinone, which is then combined with cysteine to ultimately produce pheomelanin.

[0134] As used herein, a tyrosinase refers to a copper-containing melanin-producing enzyme that exhibits tyrosine hydroxylase and dopa oxidase catalytic activities that requires copper binding for activity. Tyrosinase is present in eukaryotic and prokaryotic cells, including in plants, insects, amphibians and mammals. Tyrosinase enzymes are produced as precursor molecules containing a signal sequence (generally amino acids 1-18), which is processed to generate a mature protein. Tyrosinase is a membrane protein containing three domains, an N-terminal lumenal ectodomain that contains the copper binding site and is responsible for catalytic activity, a transmembrane domain and a C-terminal cytoplasmic domain. The amino acid and nucleotide sequence of exemplary tyrosinase enzymes are known in the art or provided herein. An example of a tyrosinase is human tyrosinase set forth in SEQ ID NO:81 as a precursor or in SEQ ID NO:82 as the mature form lacking the signal sequence, and which is encoded by a sequence of amino acids set forth in SEQ ID NO:80. Another exemplary tyrosinase is mouse tyrosinase set forth in SEQ ID NO:7 as the precursor or in SEQ ID NO:84 as the mature enzyme, and which is encoded by the sequence of nucleotides set forth in SEQ ID NO:6 or 83. Tyrosinases include variants of any known or naturally occurring tyrosinase, including allelic and species variants. For example, examples of tyrosinases known in the art and described herein are tyrosinases from gorilla, chimpanzee, orangutan, gibbon, cynomolgus monkey, Rhesus macaque, elephant, rabbit, mole rat, pig, cat, sheep, dog, goat, rat, guinea pig, human or mouse. Tyrosinases include enzymatically active portions of any tyrosinase enzyme or an enzymatically active variant of a tyrosinase enzyme. Generally, tyrosinases provided herein exhibit at least 70%, 75%, 80%, 85%, 86%, 87%, 88%, 89%, 90%, 91%, 92%, 93%, 94%, 95%, 96%, 97%, 98%, 99% or more amino acid sequence identity to SEQ ID NOS: 7, 81, 82 or 84 or other known species variants described herein.

[0135] As used herein, a tyrosinase-related protein 1 (TRP-1) refers to a metal-binding enzyme (e.g., copper-binding enzyme) that exhibits 5,6-dihydroxy-indole-2-carboxylic acid (DHICA) oxidase that requires metal (e.g., copper) binding for activity. TRP-1 enzymes are produced as precursor molecules containing a signal sequence (generally amino acids 1-24), which is processed to generate a mature protein. TRP-1 is a membrane protein containing three domains: an N-terminal lumenal ectodomain that contains the metal (e.g., copper) binding site and is responsible for catalytic activity, a transmembrane domain and a C-terminal cytoplasmic domain. The amino acid and nucleotide sequence of exemplary TRP-1 enzymes are known in the art or provided herein. An example of TRP-1 is human TRP-1 with the amino acid sequence set forth in SEQ ID NO:20 as a precursor or in SEQ ID NO:120 as the mature form lacking the signal sequence, and which is encoded by a sequence of nucleotides set forth in SEQ ID NO:19 or 119. TRP-1 includes variants of any known or naturally occurring TRP-1 enzymes, including allelic and species variants. Exemplary TRP-1 enzymes known in the art and described herein are TRP-1 enzymes from chimpanzee, gorilla, gibbon, orangutan, cynomolgus monkey, rhesus macaque, rabbit, pig, elephant, dog, goat, bovine, sheep or mouse among many other known species variants. Reference to TRP-1 includes enzymatically active portions of any TRP-1 enzyme or an enzymatically active variant of a TRP-1 enzyme. Generally, TRP-1 enzymes provided herein exhibit at least 70%, 75%, 80%, 85%, 86%, 87%, 88%, 89%, 90%, 91%, 92%, 93%, 94%, 95%, 96%, 97%, 98%, 99% or more amino acid sequence identity to SEQ ID NOS: 20 or 120 or other known species variants such as any described herein.

[0136] As used herein, dopachrome tautomerase (DCT) refers to a metal-binding enzyme (e.g., copper-binding enzyme) that exhibits dopachrome tautomerase activity that requires zinc binding for activity. DCT enzymes are produced as precursor molecules containing a signal sequence (generally amino acids 1-23), which is processed to generate a mature protein. DCT is a membrane protein containing three domains: an N-terminal lumenal ectodomain that contains the zinc binding site and is responsible for catalytic activity, a transmembrane domain and a C-terminal cytoplasmic domain. The amino acid and nucleotide sequence of exemplary DCT enzymes are known in the art or are provided herein. For example, human DCT set forth in SEQ ID NO:30 as a precursor or in SEQ ID NO:146 as the mature form lacking the signal sequence, and which is encoded by a sequence of amino acids set forth in SEQ ID NO:29, is an exemplary DCT. DCT enzymes include variants of any known or naturally occurring DCT enzymes, including allelic and species variants. For example, examples of DCT enzymes known in the art and described herein are DCT enzymes from gorilla, orangutan, cynomolgus monkey, rhesus macaque, white-tufted-ear marmoset, horse, pig, panda, rabbit and sheep among many other known species variants. Reference to DCT includes enzymatically active portions of any DCT enzyme or an enzymatically active variant of a DCT enzyme. Generally, DCT enzymes, provided herein exhibit at least 70%, 75%, 80%, 85%, 86%, 87%, 88%, 89%, 90%, 91%, 92%, 93%, 94%, 95%, 96%, 97%, 98%, 99% or more sequence identity to SEQ ID NOS: 30 or 146 or other known species variants such as any described herein.

[0137] As used herein, enzymatically active portion of a melanin-producing enzyme (e.g., tyrosinase) refers to a polypeptide that contains at least the minimal amino acid residues to catalyze one or more reactions that result in the production of melanin. For example, an enzymatically active portion of a tyrosinase exhibits hydroxylase and dopa oxidase catalytic activities, an enzymatically active portion of a TRP-1 enzyme exhibits 5,6-dihydroxy-indole-2-carboxylic acid (DHICA) oxidase activity. An enzymatically active portion of a DCT enzyme exhibits dopachrome tautomerase activity. Typically, an active portion contains contiguous amino acids from a melanin-producing polypeptide (e.g., tyrosinase) that at least includes an enzymatically active portion of the N-terminal lumenal ectodomain containing the metal binding sites. Active fragments and the minimal amino acid residues can be empirically determined by expressing the melanin-producing enzyme in a cell and assessing production of melanin or precursors. It is understood that an accessory melanin-producing enzyme (e.g., TRP-1 or DCT) requires the cell to also be co-transformed with tyrosinase for formation of melanin. Activity can be any percentage of activity (more or less) of the full-length polypeptide, including but not limited to, 1% of the activity, 2%, 3%, 4%, 5%, 10%, 20%, 30%, 40%, 50%, 60%, 70%, 80%, 90%, 95%, 96%, 97%, 98%, 99%, 100%, 200%, 300%, 400%, 500%, or more activity compared to the full polypeptide. An enzymatically active fragment or portion is a truncated fragment in which about or at least 1, 2, 3, 4, 5, 6, 7, 8, 9, 10, 11, 12, 13, 14, 15, 16, 17, 18, 19, 20, 30, 40, 50, 60, 70, 80, 90 or 100 amino acids at the N- or C-terminus of the polypeptide are missing.

[0138] As used herein, an enzymatically active variant of a melanin-producing enzyme (e.g., tyrosinase) refers to an enzyme that contains a modification, such as an amino acid insertion, deletion or replacement (substitution) of one or more amino acids, compared to a reference or wildtype enzyme, and exhibits one or more activities of the reference or wildtype enzyme to participate in a biochemical pathway that produces melanin or a melanin product such as to catalyze one or more reactions that results in the production of melanin. For example, an enzymatically active variant of a tyrosinase enzyme is a tyrosinase that contains a modification, such as an amino acid insertion, deletion or replacement (substitution) of one or more amino acids, compared to a reference or wildtype tyrosinase, and exhibits tyrosine hydroxylase and dopa oxidase catalytic activities. An enzymatically active variant of a TRP-1 enzyme is a TRP-1 that contains a modification, such as an amino acid insertion, deletion or replacement (substitution) of one or more amino acids, compared to a reference or wildtype TRP-1, and exhibits 5,6-dihydroxy-indole-2-carboxylic acid (DHICA) oxidase activity. An enzymatically active variant of a DCT enzyme is a DCT that contains a modification, such as an amino acid insertion, deletion or replacement (substitution) of one or more amino acids, compared to a reference or wildtype TRP-1, and exhibits 5 dopachrome tautomerase activity. The modification, such as amino acid replacement, can be a conservative amino acid change or a non-conservative amino acid change. The activity can be reduced or increased compared to the activity of a native or wildtype melanin-producing enzyme (e.g., tyrosinase). For example, a melanin-producing enzyme (e.g., tyrosinase) includes polypeptides that exhibit at least 20%, 30%, 40%, 50%, 60%, 70%, 80%, 90%, 100%, 110%, 120%, 130%, 140%, 150%, 160%, 170%, 180%, 190%, 200% or more activity of a native or wildtype form of the polypeptide.

[0139] As used herein, nucleic acid molecule refers to single-stranded and/or double-stranded polynucleotides, such as deoxyribonucleic acid (DNA) and ribonucleic acid (RNA), as well as analogs or derivatives of either RNA or DNA. Also included in the term “nucleic acid” are analogs of nucleic acids such as peptide nucleic acid (PNA), phosphorothioate DNA, and other such analogs and derivatives. Nucleic acids can encode gene products, such as, for example, polypeptides, regulatory RNAs, microRNAs, siRNAs and functional RNAs. Hence, nucleic acid molecule is meant to include all types and sizes of nucleic acid molecules including siRNA, aptamers, ribozymes, cDNA, plasmids and DNA, including modified nucleotides and nucleotide analogs. Reference to a nucleic acid molecule herein refers to any agent that is composed of or contains the nucleic acid molecule. Hence, reference to a nucleic acid molecule includes the agent or conduit, such as vehicle, vector, or construct, that contains a nucleic acid molecule packaged therein or associated therewith. This includes viral and non-viral vectors or naked DNA. For example, nucleic acid molecules include a virus, virus-like particles, mini-circles, a plasmid or vector, a liposome and/or a nanoparticle.

[0140] As used herein, a construct refers to a piece of circular double-stranded DNA, such as a vector or plasmid.

[0141] As used herein, “plasmid” or “vector” is used interchangeably and is meant a circular DNA vector. Plasmids contain an origin of replication that allows many copies of the plasmid to be produced in a bacterial or eukaryotic cells without integration of the plasmid into the host cell DNA.

[0142] As used herein, a non-viral vector refers to a nucleic acid molecule that contains an origin of replication and other elements for replication of the nucleic acid, but does not include all of the requisite elements that result in a viral particle, such as elements for viral replication, packaging and/or expression. Such elements include, but are not limited to, one or more of the nucleic acid molecules encoding a capsid protein or coat protein, a packaging signal, an early promoter and regulators of late viral gene expression. Hence, for example, a non-viral nucleic acid vector is not packaged as a viral vector particle.

[0143] As used herein, a “virus” or virus vector refers to any of a large group of infectious entities that cannot grow or replicate without a host cell. Viruses typically contain a protein coat surrounding an RNA or DNA core of genetic material, but no semipermeable membrane, and are capable of growth and multiplication only in living cells. Viruses include, but are not limited to, poxviruses, herpesviruses, adenoviruses, adeno-associated viruses, lentiviruses, retroviruses, rhabdoviruses, papillomaviruses, vesicular stomatitis virus, measles virus, Newcastle disease virus, picornavirus, Sindbis virus, papillomavirus, parvovirus, reovirus, coxsackievirus, influenza virus, mumps virus, poliovirus, and semliki forest virus.

[0144] As used herein, oncolytic viruses refer to viruses that replicate selectively in tumor cells in tumorous subjects. Some oncolytic viruses can kill a tumor cell following infection of the tumor cell. For example, an oncolytic virus can cause death of the tumor cell by lysing the tumor cell or inducing cell death of the tumor cell.

[0145] As used herein the term “vaccinia virus” or “VACV” or “VV” denotes a large, complex, enveloped virus belonging to the poxvirus family. It has a linear, double-stranded DNA genome approximately 190 kbp in length, which encodes approximately 200 proteins. Vaccinia virus strains include, but are not limited to, strains of, derived from, or modified forms of Western Reserve (WR), Copenhagen, Tashkent, Tian Tan, Lister, Wyeth, IHD-J, and IHD-W, Brighton, Ankara, MVA, Dairen I, LIPV, LC16M8, LC 16MO, LIVP, WR 65-16, NYCBH vaccinia virus strains.

[0146] As used herein, Lister Strain of the Institute of Viral Preparations (LIVP) or LIVP virus strain refers to a virus strain that is the attenuated Lister strain (ATCC Catalog No. VR-1549) that was produced by adaption to calf skin at the Institute of Viral Preparations, Moscow, Russia (Al'tshtein et al. (1985) Dokl. Akad. Nauk USSR 285:696-699). The LIVP strain can be obtained, for example, from the Institute of Viral Preparations, Moscow, Russia (see. e.g., Kutinova et al. (1995) Vaccine 13:487-493); the Microorganism Collection of FSRI SRC VB Vector (Kozlova et al. (2010) Environ. Sci. Technol. 44:5121-5126); or can be obtained from the Moscow Ivanovsky Institute of Virology (C0355 K0602; Agranovski et al. (2006) Atmospheric Environment 40:3924-3929). It also is well-known to those of skill in the art; as it was the vaccine strain used for vaccination in the USSR and throughout Asia and India. The strain now is used by researchers and is well-known (see e.g., Altshteyn et al. (1985) Dokl. Akad. Nauk USSR 285:696-699; Kutinova et al. (1994) Arch. Virol. 134:1-9; Kutinova et al. (1995) Vaccine 13:487-493; Shchelkunov et al. (1993) Virus Research 28:273-283; Sroller et al. (1998) Archives Virology 143:1311-1320; Zinoviev et al., (1994) Gene 147:209-214; and Chkheidze et al. (1993) FEBS 336:340-342). Among the LIVP strains is one that contains a genome having a sequence of nucleotides set forth in SEQ ID NO: 1 or 188, or a sequence that is at least or at least about 97%, 98% or 99% identical to the sequence of nucleotides set forth in SEQ ID NO: 1 or 188. An LIVP virus strain encompasses any virus strain or virus preparation that is obtained by propagation of LIVP through repeat passage in cell lines.

[0147] As used herein, an LIVP clonal strain or LIVP clonal isolate refers to a virus that is derived from the LIVP virus strain by plaque isolation, or other method in which a single clone is propagated, and that has a genome that is homogenous in sequence. Hence, an LIVP clonal strain includes a virus whose genome is present in a virus preparation propagated from LIVP. An LIVP clonal strain does not include a recombinant LIVP virus that is genetically engineered by recombinant means using recombinant DNA methods to introduce heterologous nucleic acid. In particular, an LIVP clonal strain has a genome that does not contain heterologous nucleic acid that contains an open reading frame encoding a heterologous protein. For example, an LIVP clonal strain has a genome that does not contain non-viral heterologous nucleic acid that contains an open reading frame encoding a non-viral heterologous protein. As described herein, however, it is understood that any of the LIVP clonal strains provided herein can be modified in its genome by recombinant means to generate a recombinant virus. For example, an LIVP clonal strain can be modified to generate a recombinant LIVP virus that contains insertion of nucleotides that contain an open reading frame encoding a heterologous protein.

[0148] As used herein, LIVP 1.1.1 is an LIVP clonal strain that has a genome having a sequence of nucleotides set forth in SEQ ID NO: 55, or a genome having a sequence of nucleotides that has at least 97%, 98%, or 99% sequence identity to the sequence of nucleotides set forth in SEQ ID NO: 55.

[0149] As used herein, LIVP 2.1.1 is an LIVP clonal strain that has a genome having a sequence of nucleotides set forth in SEQ ID NO: 56, or a genome having a sequence of nucleotides that has at least 97%, 98%, or 99% sequence identity to the sequence of nucleotides set forth in SEQ ID NO: 56.

[0150] As used herein, LIVP 4.1.1 is an LIVP clonal strain that has a genome having a sequence of nucleotides set forth in SEQ ID NO: 57, or a genome having a sequence of nucleotides that has at least 97%, 98% or 99% sequence identity to the sequence of nucleotides set forth in SEQ ID NO: 57.

[0151] As used herein, LIVP 5.1.1 is an LIVP clonal strain that has a genome having a sequence of nucleotides set forth in SEQ ID NO: 58, or a genome having a sequence of nucleotides that has at least 97%, 98% or 99% sequence identity to the sequence of nucleotides set forth in SEQ ID NO: 58.

[0152] As used herein, LIVP 6.1.1 is an LIVP clonal strain that has a genome having a sequence of nucleotides set forth in SEQ ID NO: 59, or a genome having a sequence of nucleotides that has at least 97%, 98% or 99% sequence identity to the sequence of nucleotides set forth in SEQ ID NO: 59.

[0153] As used herein, LIVP 7.1.1 is an LIVP clonal strain that has a genome having a sequence of nucleotides set forth in SEQ ID NO: 60, or a genome having a sequence of nucleotides that has at least 97%, 98% or 99% sequence identity to the sequence of nucleotides set forth in SEQ ID NO: 60.

[0154] As used herein, LIVP 8.1.1 is an LIVP clonal strain that has a genome having a sequence of nucleotides set forth in SEQ ID NO: 61, or a genome having a sequence of nucleotides that has at least 97%, 98% or 99% sequence identity to the sequence of nucleotides set forth in SEQ ID NO: 61.

[0155] As used herein, the term “modified virus” refers to a virus that is altered compared to a parental strain of the virus. Typically modified viruses have one or more truncations, mutations, insertions or deletions in the genome of virus. A modified virus can have one or more endogenous viral genes modified and/or one or more intergenic regions modified. Exemplary modified viruses can have one or more heterologous nucleic acid sequences inserted into the genome of the virus. Modified viruses can contain one or more heterologous nucleic acid sequences in the form of a gene expression cassette for the expression of a heterologous gene.

[0156] As used herein, a modified LIVP virus strain refers to an LIVP virus that has a genome that is not contained in LIVP, but is a virus that is produced by modification of a genome of a strain derived from LIVP. Typically, the genome of the virus is modified by substitution (replacement), insertion (addition) or deletion (truncation) of nucleotides. Modifications can be made using any method known to one of skill in the art such as genetic engineering and recombinant DNA methods. Hence, a modified virus is a virus that is altered in its genome compared to the genome of a parental virus. Exemplary modified viruses have one or more heterologous nucleic acid sequences inserted into the genome of the virus. Typically, the heterologous nucleic acid contains an open reading frame encoding a heterologous protein. For example, modified viruses herein can contain one or more heterologous nucleic acid sequences in the form of a gene expression cassette for the expression of a heterologous gene.

[0157] As used herein, synthetic, with reference to, for example, a synthetic nucleic acid molecule or a synthetic gene or a synthetic peptide, refers to a nucleic acid molecule or polypeptide molecule that is produced by recombinant methods and/or by chemical synthesis methods.

[0158] As used herein, “production by recombinant methods” or “methods using recombinant DNA methods” or variations thereof refers to the use of the well-known methods of molecular biology for expressing proteins encoded by cloned DNA.

[0159] As used herein a “gene expression cassette” or “expression cassette” is a nucleic acid construct, containing nucleic acid elements that are capable of effecting expression of a gene in hosts that are compatible with such sequences. Expression cassettes include at least promoters and optionally, transcription termination signals. Typically, the expression cassette includes a nucleic acid to be transcribed operably linked to a promoter. Expression cassettes can contain genes that encode, for example, a therapeutic gene product, or a detectable protein or a selectable marker gene.

[0160] As used herein, a heterologous nucleic acid (also referred to as exogenous nucleic acid or foreign nucleic acid) refers to a nucleic acid that is not normally produced in vivo by an organism or virus from which it is expressed or that is produced by an organism or a virus but is at a different locus, or that mediates or encodes mediators that alter expression of endogenous nucleic acid, such as DNA, by affecting transcription, translation, or other regulatable biochemical processes. Hence, heterologous nucleic acid is often not normally endogenous to a virus into which it is introduced. Heterologous nucleic acid can refer to a nucleic acid molecule from another virus in the same organism or another organism, including the same species or another species. Heterologous nucleic acid, however, can be endogenous, but is nucleic acid that is expressed from a different locus or altered in its expression or sequence (e.g., a plasmid). Thus, heterologous nucleic acid includes a nucleic acid molecule not present in the exact orientation or position as the counterpart nucleic acid molecule, such as DNA, is found in a genome. Generally, although not necessarily, such nucleic acid encodes RNA and proteins that are not normally produced by the virus or in the same way in the virus in which it is expressed. Any nucleic acid, such as DNA, that one of skill in the art recognizes or considers as heterologous, exogenous or foreign to the virus in which the nucleic acid is expressed is herein encompassed by heterologous nucleic acid. Examples of heterologous nucleic acids include, but are not limited to, nucleic acid that encodes exogenous peptides/proteins, including diagnostic and/or therapeutic agents. Proteins that are encoded by heterologous nucleic acid can be expressed within the virus, secreted, or expressed on the surface of the virus in which the heterologous nucleic acid has been introduced.

[0161] As used herein, a heterologous protein or heterologous polypeptide (also referred to as exogenous protein, exogenous polypeptide, foreign protein or foreign polypeptide) refers to a protein that is not normally produced by a virus.

[0162] As used herein, operative linkage of heterologous nucleic acids to regulatory and effector sequences of nucleotides, such as promoters, enhancers, transcriptional and translational stop sites, and other signal sequences refers to the relationship between such nucleic acid, such as DNA, and such sequences of nucleotides. For example, operative linkage of heterologous DNA to a promoter refers to the physical relationship between the DNA and the promoter such that the transcription of such DNA is initiated from the promoter by an RNA polymerase that specifically recognizes, binds to and transcribes the DNA. Thus, operatively linked or operationally associated refers to the functional relationship of a nucleic acid, such as DNA, with regulatory and effector sequences of nucleotides, such as promoters, enhancers, transcriptional and translational stop sites, and other signal sequences. For example, operative linkage of DNA to a promoter refers to the physical and functional relationship between the DNA and the promoter such that the transcription of such DNA is initiated from the promoter by an RNA polymerase that specifically recognizes, binds to and transcribes the DNA. In order to optimize expression and/or transcription, it can be necessary to remove, add or alter 5′ untranslated portions of the clones to eliminate extra, potentially inappropriate, alternative translation initiation (i.e., start) codons or other sequences that can interfere with or reduce expression, either at the level of transcription or translation. In addition, consensus ribosome binding sites can be inserted immediately 5′ of the start codon, which can enhance expression (see, e.g., Kozak J. Biol. Chem. 266: 19867-19870 (1991) and Shine and Delgarno, Nature 254(5495):34-38 (1975)). The desirability of (or need for) such modification can be empirically determined.

[0163] As used herein, the phrases “operatively positioned,” “operatively linked,” “under control,” and “under transcriptional control” mean that a promoter is in a correct functional location and orientation in relation to a nucleic acid sequence to control transcriptional initiation and expression of that sequence.

[0164] As used herein, an “internal ribosome entry site” (IRES) refers to a nucleotide sequence that allows for translation initiation in the middle of a messenger RNA (mRNA) sequence as part of protein synthesis.

[0165] As used herein, a heterologous promoter refers to a promoter that is not normally found in the wild-type organism or virus or that is at a different locus as compared to a wild-type organism or virus. A heterologous promoter is often not endogenous to a virus into which it is introduced, but has been obtained from another virus or prepared synthetically. A heterologous promoter can refer to a promoter from another virus in the same organism or another organism, including the same species or another species. A heterologous promoter, however, can be endogenous, but is a promoter that is altered in its sequence or occurs at a different locus (e.g., at a different location in the genome or on a plasmid). Thus, a heterologous promoter includes a promoter not present in the exact orientation or position as the counterpart promoter is found in a genome.

[0166] A synthetic promoter is a heterologous promoter that has a nucleotide sequence that is not found in nature. A synthetic promoter can be a nucleic acid molecule that has a synthetic sequence or a sequence derived from a native promoter or portion thereof. A synthetic promoter also can be a hybrid promoter composed of different elements derived from different native promoters.

[0167] As used herein, a strong promoter refers to any promoter that allows the gene under its control to be expressed at a high level. The strong promoter can be naturally occurring, or it can be a modified promoter or synthetic promoter, e.g., a derivative of a naturally occurring promoter. It can thus be native or non-native. Hence, such a promoter can produce large amounts of transcript and final protein product from the gene of interest. For example, strong promoters can express proteins at a level of at least 1% of the total cellular protein. Typically, a strong promoter can express proteins at a level of 2, 5, 10, 15, 20, 25, 30, 35, 40, 45 or 50% of the total cellular protein. The term “strong promoter” is a well-known term in the art and strong promoters are widely described in the literature. Strong promoters include viral promoters and eukaryotic promoters. Exemplary strong promoters include, but are not limited to, adenoviral major late promoter, vaccinia synthetic early-late promoter (P_{SEL}), vaccinia synthetic late promoter (P_{SL}), simian virus 40 (SV40) promoter, cytomegalovirus (CMV) promoter, respiratory syncytial virus (RSV) promoter, a retroviral LTR promoter, human elongation factor 1α-subunit (EF1-1α) promoter, a ubiquitin C promoter (Ubc), a phosphoglycerate kinase-1 (PGK) promoter, small nuclear RNA U1b promoter and glucose 6-phosphate dehydrogenase promoter and others as described herein or known to one of skill in the art.

[0168] As used herein, tissue-specific or cell-specific promoter refers to a promoter that is capable of driving transcription of a gene in a particular tissue (e.g., lung, liver, breast, or others) or cell (e.g., leukocyte, myocyte, tumor cell, or others) while remaining largely “silent” or expressed at relatively low levels in other tissue or cell types. A tissue-specific or cell-specific promoter can be selective for any tissue or cell-type in a subject. Such promoters are known to one of skill in the art and are described herein. Exemplary tissue-specific or cell-specific promoters are tumor-specific promoters. It is understood, however, that tissue-specific or cell-specific promoters can have a detectable amount of “background” or “base” activity in those tissues or cells where they are silent. Generally, the promoter is active to a greater degree in a predetermined target cell or tissue as compared to other cells or tissues. For example, the promoter has about or 2-fold, 3, 4, 5, 6, 7, 8, 9, 10, 20, 30, 40, 50, 60, 70, 80, 90, 100, 200, 300, 400, 500, 600, 700, 800, 900 or more fold activity (i.e. ability to express a nucleic acid sequence operatively linked thereto) in a predetermined tissue or cell compared to in other tissue or cell types. Thus, a tissue-specific or cell-specific promoter that exhibits some low level activity, such as at or about 10% or less in another cell type is still considered to be a tissue-specific or cell-specific promoter if its activity is greater in the predetermined target tissue or cell than the activity in the other cell type.

[0169] As used herein, a tumor-specific promoter is a promoter that is capable of driving transcription of a gene in a tumor cell, while remaining largely “silent” or expressed at relatively low levels in other tissue or cell types, such as for example, in normal cells. For example, a tumor-specific promoter has about 2-fold or 3, 4, 5, 6, 7, 8, 9, 10, 20, 30, 40, 50, 60,70, 80, 90, 100, 200, 300, 400, 500, 600, 700, 800, 900 or more fold activity (i.e. ability to express a nucleic acid sequence operatively linked thereto) in a tumor cell compared to in a normal cell.

[0170] As used herein, an “inducible expression system” refers to a transcription unit whose transcription is reversible turned on or off in the presence of an inducer. An example of an inducible expression system is a tetracycline expression system, whereby transcription is reversible turned on or off in the presence of tetracycline or a derivative of tetracycline (e.g., doxycycline). For example, an inducible expression system includes a nucleotide sequence encoding tetracycline repressor protein (TetR) and a nucleotide sequence of interest (e.g., encoding a tyrosinase enzyme or other chromophore-producing enzyme) operably linked to an inducible promoter composed of a minimal promoter operably linked to at least one tetracycline operon (tetO) sequence.

[0171] As used herein, the term, “therapeutic gene product” or “therapeutic polypeptide” or “therapeutic agent” refers to any heterologous protein expressed by the therapeutic virus that ameliorates the symptoms of a disease or disorder or ameliorates the disease or disorder. Therapeutic agents include, but are not limited to, moieties that inhibit cell growth or promote cell death, that can be activated to inhibit cell growth or promote cell death, or that activate another agent to inhibit cell growth or promote cell death. Optionally, the therapeutic agent can exhibit or manifest additional properties, such as, properties that permit its use as an imaging agent, as described elsewhere herein. Exemplary therapeutic agents include, for example, cytokines, growth factors, photosensitizing agents, radionuclides, toxins, anti-metabolites, signaling modulators, anti-cancer antibiotics, anti-cancer antibodies, angiogenesis inhibitors, chemotherapeutic compounds or a combination thereof.

[0172] As used herein, a “reporter gene” is a gene that encodes a reporter molecule that can be detected when expressed by a virus provided herein or encodes a molecule that modulates expression of a detectable molecule, such as nucleic acid molecule or a protein, or modulates an activity or event that is detectable. Hence reporter molecules include, nucleic acid molecules, such as expressed RNA molecules, and proteins.

[0173] As used herein, a detectable label or detectable moiety or diagnostic moiety (also imaging label, imaging agent, or imaging moiety) refers to an atom, molecule or composition, wherein the presence of the atom, molecule or composition can be directly or indirectly measured. Detectable labels can be used to image one or more of any of the viruses provided herein. Detectable labels include, for example, chemiluminescent moieties, bioluminescent moieties, fluorescent moieties, radionuclides, and metals. Methods for detecting labels are well-known in the art. Such a label can be detected, for example, by visual inspection, by fluorescence spectroscopy, by reflectance measurement, by flow cytometry, by X-rays, by a variety of magnetic resonance methods such as magnetic resonance imaging (MRI) and magnetic resonance spectroscopy (MRS). Methods of detection also include any of a variety of tomographic methods including computed tomography (CT), computed axial tomography (CAT), electron beam computed tomography (EBCT), high resolution computed tomography (HRCT), hypocycloidal tomography, positron emission tomography (PET), single-photon emission computed tomography (SPECT), spiral computed tomography, and ultrasonic tomography. Direct detection of a detectable label refers to, for example, measurement of a physical phenomenon of the detectable label itself, such as energy or particle emission or absorption of the label itself, such as by X-ray or MRI. Indirect detection refers to measurement of a physical phenomenon of an atom, molecule or composition that binds directly or indirectly to the detectable label, such as energy or particle emission or absorption, of an atom, molecule or composition that binds directly or indirectly to the detectable label. In a non-limiting example of indirect detection, a detectable label can be biotin, which can be detected by binding to avidin. Non-labeled avidin can be administered systemically to block non-specific binding, followed by systemic administration of labeled avidin. Thus, included within the scope of a detectable label or detectable moiety is a bindable label or bindable moiety, which refers to an atom, molecule or composition, wherein the presence of the atom, molecule or composition can be detected as a result of the label or moiety binding to another atom, molecule or composition. Exemplary detectable labels include, for example, metals such as colloidal gold, iron, gadolinium, and gallium-67, fluorescent moieties, and radionuclides. Exemplary fluorescent moieties and radionuclides are provided elsewhere herein.

[0174] As used herein, a tumor cell or cancer cell refers to a cell that divides and reproduces abnormally because growth and division are not regulated or controlled, i.e. cells that are susceptible to uncontrolled growth. A tumor cell can be a benign or malignant cell. Typically, the tumor cell is a malignant cell that can spread to other parts of the body, a process known as metastasis.

[0175] As used herein, LIVP GLV-1h68 (also designated GLV-ONC1) is an LIVP virus that contains ruc-GFP (a luciferase and green fluorescent protein fusion gene (see e.g., U.S. Pat. No. 5,976,796), beta-galactosidase (LacZ) and beta-glucuronidase (gusA) reporter genes inserted into the F14.5L, J2R (thymidine kinase) and A56R (hemagglutinin) loci, respectively. The genome of GLV-1h68 has a sequence of nucleotides set forth in SEQ ID NO: 2 or a sequence of nucleotides that has at least 97%, 98% or 99% sequence identity to the sequence of nucleotides set forth in SEQ ID NO: 2.

[0176] As used herein, a virus preparation or virus composition, for example an LIVP virus preparation, refers to a virus composition obtained by propagation of a virus strain, for example an LIVP virus strain, an LIVP clonal strain or a modified or recombinant virus strain, in vivo or in vitro in a culture system. For example, an LIVP virus preparation refers to a viral composition obtained by propagation of a virus strain in host cells, typically upon purification from the culture system using standard methods known in the art. A virus preparation generally is made up of a number of virus particles or virions. If desired, the number of virus particles in the sample or preparation can be determined using a plaque assay to calculate the number of plaque forming units per sample unit volume (pfu/mL), assuming that each plaque formed is representative of one infective virus particle. Each virus particle or virion in a preparation can have the same genomic sequence compared to other virus particles (i.e., the preparation is homogenous in sequence) or can have different genomic sequences (i.e., the preparation is heterogenous in sequence). It is understood to those of skill in the art that, in the absence of clonal isolation, heterogeneity or diversity in the genome of a virus can occur as the virus reproduces, such as by homologous recombination events that occur in the natural selection processes of virus strains (Plotkin & Orenstein (eds) “Recombinant Vaccinia Virus Vaccines” in Vaccines, 3^{rd} edition (1999)).

[0177] As used herein, plaque forming unit (pfu) or infectious unit (IU) refers to the number of infectious or live viruses. It thus reflects the amount of active virus in the preparation. The pfu can be determined using a plaque formation assay or an end-point dilution assay, which are standard assays known to one of skill in the art.

[0178] As used herein, a nanoparticle refers to a colloidal particle for delivery of a molecule or agent that is microscopic in size of between or about between 1 and 1000 nanometers (nm), such as between 1 and 100 nm and behave as a whole unit in terms of transport and properties. Nanoparticles include those that are uniform in size. Nanoparticles include those that contain a targeting molecule attached to the outside.

[0179] As used herein, “targeting molecule” or “targeting ligand” refers to any molecular signal directing localization to specific cells, tissues or organs. Examples of targeting ligands include, but are not limited to, proteins, polypeptides or portions thereof that bind to cell surface molecules, including, but not limited to, proteins, carbohydrates, lipids or other such moieties. For example, targeting ligands include proteins or portions thereof that bind to cell surface receptors or antibodies directed to antigens expressed selectively on a target cell. Targeting ligands include, but are not limited to growth factors, cytokines, adhesion molecules, neuropeptides, protein hormones and single-chain antibodies (scFv).

[0180] As used herein, a delivery vehicle for administration refers to a lipid-based or other polymer-based composition, such as liposome, micelle or reverse micelle, that associates with an agent, such as a virus provided herein, for delivery into a host subject.

[0181] As used herein, accumulation of a virus in a particular tissue refers to the distribution or colonization of the virus in particular tissues of a host organism after a time period following administration of the virus to the host, long enough for the virus to infect the host's organs or tissues. As one skilled in the art will recognize, the time period for infection of a virus will vary depending on the virus, the organ(s) or tissue(s) to be infected, the immunocompetence of the host, and the dosage of the virus. Generally, accumulation can be determined at time points from about less than 1 day, about 1 day to about 2, 3, 4, 5, 6 or 7 days, about 1 week to about 2, 3 or 4 weeks, about 1 month to about 2, 3, 4, 5, 6 months or longer after infection with the virus. For purposes herein, the viruses preferentially accumulate in immunoprivileged tissue, such as inflamed tissue or tumor tissue, but are cleared from other tissues and organs, such as non-tumor tissues, in the host to the extent that toxicity of the virus is mild or tolerable and at most, not fatal.

[0182] As used herein, “directed to cells” or “localized to cells” with reference to a nucleic acid molecule provided herein means that the nucleic acid molecule, when administered to a subject, preferentially replicates or accumulates for expression of a chromophore-producing enzyme in a pre-determined target cell or cells, such as a cell (e.g., a tumor cell) involved in a disease process, compared to other cells. For example, included among nucleic acid molecules provided herein are nucleic acid molecules that, when administered to a subject, are directed or localized to tumor cells. A nucleic acid molecule can be made to be directed or localized to a cell by virtue of targeting the nucleic acid molecule to the cell or by conferring selective or specific expression of the nucleic acid molecule in a cell (e.g., cell-specific or tumor-specific expression) such as by using a cell-specific promoter or tumor-specific promoter.

[0183] As used herein, to target a nucleic acid molecule means to direct it to a cell that expresses a selected receptor or cell surface molecule by linking the agent to a targeting moiety. Upon binding to the receptor the nucleic acid molecule linked directly or indirectly to the targeting moiety is internalized or otherwise taken up by the cell.

[0184] As used herein, “predetermined” with reference to a time sufficient for the nucleic acid molecule to express the chromophore-producing enzyme refers to a limited time that is known or has been previously determined. Typically, the predetermined time is a time in which subsequent to administration or delivery of a nucleic acid molecule to a subject, the nucleic acid molecule is expressed in a subject and the chromophore product produced. For example, the predetermined time can be 3 hours to 3 months, such as generally at least 24 hours, 48 hrs, 72 hours, 96 hours, 5 days, 6 days, 7 days, or 8 days after delivery of the nucleic acid.

[0185] As used herein, the term assessing or determining is intended to include quantitative and qualitative determination in the sense of obtaining an absolute value for the activity of a product, and also of obtaining an index, ratio, percentage, visual or other value indicative of the level of the activity. Assessment can be direct or indirect.

[0186] As used herein, activity refers to the in vitro or in vivo activities of a compound or virus provided herein. For example, in vivo activities refer to physiological responses that result following in vivo administration of a compound or virus provided herein (or of a composition or other mixture thereof). Activity, thus, encompasses resulting therapeutic effects and pharmaceutical activity of such compounds, compositions and mixtures. Activities can be observed in in vitro and/or in vivo systems designed to test or use such activities.

[0187] As used herein, “anti-tumor activity” or “anti-tumorigenic” refers to virus strains that prevent or inhibit the formation or growth of tumors in vitro or in vivo in a subject. Anti-tumor activity can be determined by assessing a parameter or parameters indicative of anti-tumor activity.

[0188] As used herein, a “parameter indicative of anti-tumor activity or anti-tumorigenic activity” refers to a property mediated by a virus that is associated with anti-tumor activity. Parameters indicative of anti-tumor activity can be assessed in vitro or in vivo upon administration to a subject. Exemplary parameters indicative of anti-tumor activity include, but are not limited to, infectivity of tumor cells, accumulation of virus in tumor tissues, viral nucleic acid replication in tumor cells, virus production in tumor cells, viral gene expression in tumor cells, cytotoxicity of tumor cells, tumor cell selectivity, tumor cell type selectivity, decreased tumor size, decreased tumor volume, decreased tumor weight, and initiation of specific and nonspecific anti-tumor immune responses. Assays that assess any of the above parameters or other anti-tumorigenic properties are known to one of skill in the art. Exemplary assays are described herein. Hence, a virus that exhibits any one or more of the above activities or properties exhibits anti-tumor activity.

[0189] As used herein, “toxicity” (also referred to as virulence or pathogenicity herein) with reference to a virus refers to the deleterious or toxic effects to a host upon administration of the virus. For an oncolytic virus, such as LIVP, the toxicity of a virus is associated with its accumulation in non-tumorous organs or tissues, which can impact the survival of the host or result in deleterious or toxic effects. Toxicity can be measured by assessing one or more parameters indicative of toxicity. These include accumulation in non-tumorous tissues and effects on viability or health of the subject to whom it has been administered, such as effects on body weight.

[0190] As used herein, a “parameter indicative of toxicity” refers to a property mediated by a virus that is associated with its toxicity, virulence or pathogenicity. Parameters indicative of toxicity generally are assessed in vivo upon administration to a subject. Exemplary parameters indicative of toxicity include, but are not limited to, decreased survival of the subject, decreased body weight, fever, rash, allergy, fatigue, abdominal pain, induction of an immune response in the subject and pock formation. Assays or measures that assess any of the above parameters or other toxic properties known to one of skill in the art are described herein or are known to one of skill in the art. Hence, a virus that mediates any one or more of the above activities or properties in a host exhibits some degree of toxicity.

[0191] As used herein, nucleic acids include DNA, RNA and analogs thereof, including peptide nucleic acids (PNA) and mixtures thereof. Nucleic acids can be single or double-stranded. Nucleic acids can encode gene products, such as, for example, polypeptides, regulatory RNAs, microRNAs, siRNAs and functional RNAs.

[0192] As used herein, a peptide refers to a polypeptide that is greater than or equal to 2 amino acids in length, and less than or equal to 40 amino acids in length.

[0193] As used herein, the amino acids which occur in the various sequences of amino acids provided herein are identified according to their known, three-letter or one-letter abbreviations (Table 1). The nucleotides which occur in the various nucleic acid fragments are designated with the standard single-letter designations used routinely in the art.

[0194] As used herein, an “amino acid” is an organic compound containing an amino group and a carboxylic acid group. A polypeptide contains two or more amino acids. For purposes herein, amino acids include the twenty naturally-occurring amino acids, non-natural amino acids and amino acid analogs (i.e., amino acids wherein the α-carbon has a side chain).

[0195] As used herein, “amino acid residue” refers to an amino acid formed upon chemical digestion (hydrolysis) of a polypeptide at its peptide linkages. The amino acid residues described herein are presumed to be in the “L” isomeric form. Residues in the “D” isomeric form, which are so designated, can be substituted for any L-amino acid residue as long as the desired functional property is retained by the polypeptide. NH₂ refers to the free amino group present at the amino terminus of a polypeptide. COOH refers to the free carboxy group present at the carboxyl terminus of a polypeptide. In keeping with standard polypeptide nomenclature described in J. Biol. Chem. 243:3557-3559 (1968), and adopted 37 C.F.R. §§1.821-1.822, abbreviations for amino acid residues are shown in Table 1:

TABLE 1
Table of Correspondence

| SYMBOL | | |
|---|---|---|
| 1-Letter | 3-Letter | AMINO ACID |
| Y | Tyr | Tyrosine |
| G | Gly | Glycine |
| F | Phe | Phenylalanine |
| M | Met | Methionine |
| A | Ala | Alanine |
| S | Ser | Serine |
| I | Ile | Isoleucine |
| L | Leu | Leucine |
| T | Thr | Threonine |
| V | Val | Valine |
| P | Pro | Proline |
| K | Lys | Lysine |
| H | His | Histidine |
| Q | Gln | Glutamine |
| E | Glu | Glutamic acid |
| Z | Glx | Glu and/or Gln |
| W | Trp | Tryptophan |
| R | Arg | Arginine |
| D | Asp | Aspartic acid |
| N | Asn | Asparagine |
| B | Asx | Asn and/or Asp |
| C | Cys | Cysteine |
| X | Xaa | Unknown or other |

[0196] All amino acid residue sequences represented herein by formulae have a left to right orientation in the conventional direction of amino-terminus to carboxyl-terminus. In addition, the phrase “amino acid residue” is defined to include the amino acids listed in the Table of Correspondence (Table 1) and modified and unusual amino acids, such as those referred to in 37 C.F.R. §§1.821-1.822, and incorporated herein by reference. Furthermore, it should be noted that a dash at the beginning or end of an amino acid residue sequence indicates a peptide bond to a further sequence of one or more amino acid residues, to an amino-terminal group such as NH₂ or to a carboxyl-terminal group such as COOH.

[0197] As used herein, the “naturally occurring α-amino acids” are the residues of those 20 α-amino acids found in nature which are incorporated into protein by the specific recognition of the charged tRNA molecule with its cognate mRNA codon in humans. Non-naturally occurring amino acids thus include, for example, amino acids or analogs of amino acids other than the 20 naturally-occurring amino acids and include, but are not limited to, the D-stereoisomers of amino acids. Exemplary non-natural amino acids are described herein and are known to those of skill in the art.

[0198] As used herein, suitable conservative substitutions of amino acids are known to those of skill in the art and can be made generally without altering the biological activity of the resulting molecule. Those of skill in this art recognize that, in general, single amino acid substitutions in non-essential regions of a polypeptide do not substantially alter biological activity (see, e.g., Watson et al. Molecular Biology of the Gene, 4th Edition, 1987, The Benjamin/Cummings Pub. co., p. 224). Such substitutions can be made in accordance with those set forth in TABLE 2 as follows:

TABLE 2

| | Exemplary conservative |
|---|---|
| Original residue | substitution |
| Ala (A) | Gly; Ser |
| Arg (R) | Lys |
| Asn (N) | Gln; His |
| Cys (C) | Ser |
| Gln (Q) | Asn |
| Glu (E) | Asp |
| Gly (G) | Ala; Pro |
| His (H) | Asn; Gln |
| Ile (I) | Leu; Val |
| Leu (L) | Ile; Val |
| Lys (K) | Arg; Gln; Glu |
| Met (M) | Leu; Tyr; Ile |
| Phe (F) | Met; Leu; Tyr |
| Ser (S) | Thr |
| Thr (T) | Ser |
| Trp (W) | Tyr |
| Tyr (Y) | Trp; Phe |
| Val (V) | Ile; Leu |

Other substitutions also are permissible and can be determined empirically or in accord with known conservative substitutions.

[0199] As used herein, a DNA construct is a single- or double-stranded, linear or circular DNA molecule that contains segments of DNA combined and juxtaposed in a manner not found in nature. DNA constructs exist as a result of human manipulation, and include clones and other copies of manipulated molecules.

[0200] As used herein, a DNA segment is a portion of a larger DNA molecule having specified attributes. For example, a DNA segment encoding a specified polypeptide is a portion of a longer DNA molecule, such as a plasmid or plasmid fragment, which, when read from the 5′ to 3′ direction, encodes the sequence of amino acids of the specified polypeptide.

[0201] As used herein, the term polynucleotide means a single- or double-stranded polymer of deoxyribonucleotides or ribonucleotide bases read from the 5′ to the 3′ end. Polynucleotides include RNA and DNA, and can be isolated from natural sources, synthesized in vitro, or prepared from a combination of natural and synthetic molecules. The length of a polynucleotide molecule is given herein in terms of nucleotides (abbreviated “nt”) or base pairs (abbreviated “bp”). The term nucleotides is used for single- and double-stranded molecules where the context permits. When the term is applied to double-stranded molecules it is used to denote overall length and will be understood to be equivalent to the term base pairs. It will be recognized by those skilled in the art that the two strands of a double-stranded polynucleotide can differ slightly in length and that the ends thereof can be staggered; thus all nucleotides within a double-stranded polynucleotide molecule may not be paired. Such unpaired ends will, in general, not exceed 20 nucleotides in length.

[0202] As used herein, recitation that nucleotides or amino acids “correspond to” nucleotides or amino acids in a disclosed sequence, such as set forth in the Sequence Listing, refers to nucleotides or amino acids identified upon alignment with the disclosed sequence to maximize identity using a standard alignment algorithm, such as the GAP algorithm. By aligning the sequences, one skilled in the art can identify corresponding residues, for example, using conserved and identical amino acid residues as guides. In general, to identify corresponding positions, the sequences of amino acids are aligned so that the highest order match is obtained (see, e.g., Computational Molecular Biology, Lesk, A. M., ed., Oxford University Press, New York, 1988; Biocomputing: Informatics and Genome Projects, Smith, D. W., ed., Academic Press, New York, 1993; Computer Analysis of Sequence Data, Part I, Griffin, A. M., and Griffin, H. G., eds., Humana Press, New Jersey, 1994; Sequence Analysis in Molecular Biology, von Heinje, G., Academic Press, 1987; and Sequence Analysis Primer, Gribskov, M. and Devereux, J., eds., M Stockton Press, New York, 1991; Carrillo et al. (1988) SIAM J Applied Math 48:1073).

[0203] As used herein, “sequence identity” refers to the number of identical or similar amino acids or nucleotide bases in a comparison between a test and a reference polypeptide or polynucleotide. Sequence identity can be determined by sequence alignment of nucleic acid or protein sequences to identify regions of similarity or identity. For purposes herein, sequence identity is generally determined by alignment to identify identical residues. The alignment can be local or global. Matches, mismatches and gaps can be identified between compared sequences. Gaps are null amino acids or nucleotides inserted between the residues of aligned sequences so that identical or similar characters are aligned. Generally, there can be internal and terminal gaps. Sequence identity can be determined by taking into account gaps as the number of identical residues/length of the shortest sequence×100. When using gap penalties, sequence identity can be determined with no penalty for end gaps (e.g., terminal gaps are not penalized). Alternatively, sequence identity can be determined without taking into account gaps as the number of identical positions/length of the total aligned sequence×100.

[0204] As used herein, a “global alignment” is an alignment that aligns two sequences from beginning to end, aligning each letter in each sequence only once. An alignment is produced, regardless of whether or not there is similarity or identity between the sequences. For example, 50% sequence identity based on “global alignment” means that in an alignment of the full sequence of two compared sequences each of 100 nucleotides in length, 50% of the residues are the same. It is understood that global alignment also can be used in determining sequence identity even when the length of the aligned sequences is not the same. The differences in the terminal ends of the sequences will be taken into account in determining sequence identity, unless the “no penalty for end gaps” is selected. Generally, a global alignment is used on sequences that share significant similarity-over most of their length. Exemplary algorithms for performing global alignment include the Needleman-Wunsch algorithm (Needleman et al. J. Mol. Biol. 48: 443 (1970). Exemplary programs for performing global alignment are publicly available and include the Global Sequence Alignment Tool available at the National Center for Biotechnology Information (NCBI) website (ncbi.nlm.nih.gov/), and the program available at deepc2.psi.iastate.edu/aat/align/align.html.

[0205] As used herein, a “local alignment” is an alignment that aligns two sequences, but only aligns those portions of the sequences that share similarity or identity. Hence, a local alignment determines if sub-segments of one sequence are present in another sequence. If there is no similarity, no alignment will be returned. Local alignment algorithms include BLAST or the Smith-Waterman algorithm (Adv. Appl. Math. 2: 482 (1981)). For example, 50% sequence identity based on “local alignment” means that in an alignment of the full sequence of two compared sequences of any length, a region of similarity or identity of 100 nucleotides in length has 50% of the residues that are the same in the region of similarity or identity.

[0206] For purposes herein, sequence identity can be determined by standard alignment algorithm programs used with default gap penalties established by each supplier. Default parameters for the GAP program can include: (1) a unary comparison matrix (containing a value of 1 for identities and 0 for non-identities) and the weighted comparison matrix of Gribskov et al. Nucl. Acids Res. 14: 6745 (1986), as described by Schwartz and Dayhoff, eds., Atlas of Protein Sequence and Structure, National Biomedical Research Foundation, pp. 353-358 (1979); (2) a penalty of 3.0 for each gap and an additional 0.10 penalty for each symbol in each gap; and (3) no penalty for end gaps. Whether any two nucleic acid molecules have nucleotide sequences (or any two polypeptides have amino acid sequences) that are at least 80%, 85%, 90%, 95%, 96%, 97%, 98% or 99% “identical,” or other similar variations reciting a percent identity, can be determined using known computer algorithms based on local or global alignment (see e.g., wikipedia.org/wiki/Sequence_alignment_software, providing links to dozens of known and publicly available alignment databases and programs). Generally, for purposes herein sequence identity is determined using computer algorithms based on global alignment, such as the Needleman-Wunsch Global Sequence Alignment tool available from NCBI/BLAST (blast.ncbi.nlm.nih.gov/Blast.cgi?CMD=Web&Page_TYPE=BlastHome); LAlign (William Pearson implementing the Huang and Miller algorithm (Adv. Appl. Math. (1991) 12:337-357)); and program from Xiaoqui Huang available at deepc2.psi.iastate.edu/aat/align/align.html. Generally, when comparing nucleotide sequences herein, an alignment with no penalty for end gaps (e.g., terminal gaps are not penalized) is used.

[0207] Therefore, as used herein, the term “identity” represents a comparison or alignment between a test and a reference polypeptide or polynucleotide. In one non-limiting example, “at least 90% identical to” refers to percent identities from 90 to 100% relative to the reference polypeptide or polynucleotide. Identity at a level of 90% or more is indicative of the fact that, assuming for exemplification purposes a test and reference polypeptide or polynucleotide length of 100 amino acids or nucleotides are compared, no more than 10% (i.e., 10 out of 100) of amino acids or nucleotides in the test polypeptide or polynucleotide differ from those of the reference polypeptides. Similar comparisons can be made between test and reference polynucleotides. Such differences can be represented as point mutations randomly distributed over the entire length of an amino acid sequence or they can be clustered in one or more locations of varying length up to the maximum allowable, e.g., 10/100 amino acid difference (approximately 90% identity). Differences are defined as nucleic acid or amino acid substitutions, insertions or deletions. Depending on the length of the compared sequences, at the level of homologies or identities above about 85-90%, the result can be independent of the program and gap parameters set; such high levels of identity can be assessed readily, often without relying on software.

[0208] As used herein, substantially pure means sufficiently homogeneous to appear free of readily detectable impurities as determined by standard methods of analysis, such as thin layer chromatography (TLC), gel electrophoresis and high performance liquid chromatography (HPLC), used by those of skill in the art to assess such purity, or sufficiently pure such that further purification would not detectably alter the physical and chemical properties, such as enzymatic and biological activities, of the substance. Methods for purification of the compounds to produce substantially chemically pure compounds are known to those of skill in the art. A substantially chemically pure compound can, however, be a mixture of stereoisomers or isomers. In such instances, further purification might increase the specific activity of the compound.

[0209] As used herein, the terms immunoprivileged cells and immunoprivileged tissues refer to cells and tissues, such as solid tumors, which are sequestered from the immune system. Generally, administration of a virus to a subject elicits an immune response that clears the virus from the subject. Immunoprivileged sites, however, are shielded or sequestered from the immune response, permitting the virus to survive and generally to replicate. Immunoprivileged tissues include proliferating tissues, such as tumor tissues and other tissues and cells involved in other proliferative disorders, wounds and other tissues involved in inflammatory responses.

[0210] As used herein, a wound or lesion refers to any damage to any tissue in a living organism. The tissue can be an internal tissue, such as the stomach lining or a bone, or an external tissue, such as the skin. As such, a wound or lesion can include, but is not limited to, a gastrointestinal tract ulcer, a broken bone, a neoplasia, and cut or abraded skin. A wound or lesion can be in a soft tissue, such as the spleen, or in a hard tissue, such as bone. The wound or lesion can have been caused by any agent, including traumatic injury, infection or surgical intervention.

[0211] As used herein, a skin lesion refers to a lesion on the surface of the skin. The skin lesion can be have been caused by a traumatic injury, infection, surgical intervention or an environmental factor. Exemplary skin lesions include, but are not limited to, precancerous lesion (e.g., actinic keratosis of the skin), a cancerous lesion (e.g., skin cancer), a traumatic wound (e.g., burn or scar) or a post-surgical wound (e.g., surgically resected tumor). In particular, the lesion is a skin cancer lesion such as basal cell carcinoma or squamous cell carcinoma.

[0212] As used herein, a tumor, also known as a neoplasm, is an abnormal mass of tissue that results when cells proliferate at an abnormally high rate. Tumors can show partial or total lack of structural organization and functional coordination with normal tissue. Tumors can be benign (not cancerous), or malignant (cancerous). As used herein, a tumor is intended to encompass hematopoietic tumors as well as solid tumors.

[0213] Malignant tumors can be broadly classified into three major types. Carcinomas are malignant tumors arising from epithelial structures (e.g., breast, prostate, lung, colon, pancreas). Sarcomas are malignant tumors that originate from connective tissues, or mesenchymal cells, such as muscle, cartilage, fat or bone. Leukemias and lymphomas are malignant tumors affecting hematopoietic structures (structures pertaining to the formation of blood cells), including components of the immune system. Other malignant tumors include, but are not limited to, tumors of the nervous system (e.g., neurofibromatomas), germ cell tumors, and blastic tumors.

[0214] As used herein, a resected tumor refers to a tumor in which a significant portion of the tumor has been excised. The excision can be effected by surgery (i.e., a surgically resected tumor). The resection can be partial or complete.

[0215] As used herein, a disease or disorder refers to a pathological condition in an organism resulting from, for example, infection or genetic defect, and characterized by identifiable symptoms. An exemplary disease as described herein is a neoplastic disease, such as cancer.

[0216] As used herein, a cell involved in a disease or disease process refers to cells whose presence contributes to, exacerbates, causes or otherwise is involved in the etiology of a disease or disease process. Inhibition or killing of such cells can ameliorate the symptoms of the disease or can ameliorate the disease. Examples of such cells are tumor cells. Killing or inhibiting the growth or proliferation of tumor cells effects treatment of tumors. Other examples are immune effector cells, which participate in inflammatory responses that contribute to the pathology of a variety of diseases. Inhibiting or killing immune effector cells can treat diseases that have an inflammatory component.

[0217] As used herein, “killing or inhibiting growth or proliferation of cells” means that the cells die or are eliminated. Inhibiting growth or proliferation means that the number of such cells does not increase, and can decrease.

[0218] As used herein, proliferative disorders or hyperproliferative disorders include any disorders involving abnormal proliferation of cells. Such disorders include, but are not limited to, neoplastic diseases, inflammatory responses and disorders, e.g., including wound healing responses, psoriasis, restenosis, macular degeneration, diabetic retinopathies, endometriosis, benign prostatic hypertrophy, hypertrophic scarring, cirrhosis, proliferative vitreoretinopathy, retinopathy of prematurity, and immunoproliferative diseases or disorders, e.g., inflammatory bowel disease, rheumatoid arthritis, systemic lupus erythematosus (SLE) and vascular hyperproliferation secondary to retinal hypoxia or vasculitis.

[0219] As used herein, neoplastic disease refers to any disorder involving cancer, including tumor development, growth, metastasis and progression.

[0220] As used herein, cancer is a term for diseases caused by or characterized by any type of malignant tumor, including metastatic cancers, lymphatic tumors, and blood cancers. Exemplary cancers include, but are not limited to, acute lymphoblastic leukemia, acute lymphoblastic leukemia, acute myeloid leukemia, acute promyelocytic leukemia, adenocarcinoma, adenoma, adrenal cancer, adrenocortical carcinoma, AIDS-related cancer, AIDS-related lymphoma, anal cancer, appendix cancer, astrocytoma, basal cell carcinoma, bile duct cancer, bladder cancer, bone cancer, osteosarcoma/malignant fibrous histiocytoma, brainstem glioma, brain cancer, carcinoma, cerebellar astrocytoma, cerebral astrocytoma/malignant glioma, ependymoma, medulloblastoma, supratentorial primitive neuroectodermal tumor, visual pathway or hypothalamic glioma, breast cancer, bronchial adenoma/carcinoid, Burkitt lymphoma, carcinoid tumor, carcinoma, central nervous system lymphoma, cervical cancer, chronic lymphocytic leukemia, chronic myelogenous leukemia, chronic myeloproliferative disorder, colon cancer, cutaneous T-cell lymphoma, desmoplastic small round cell tumor, endometrial cancer, ependymoma. epidermoid carcinoma, esophageal cancer, Ewing's sarcoma, extracranial germ cell tumor, extragonadal germ cell tumor, extrahepatic bile duct cancer, eye cancer/intraocular melanoma, eye cancer/retinoblastoma, gallbladder cancer, gallstone tumor, gastric/stomach cancer, gastrointestinal carcinoid tumor, gastrointestinal stromal tumor, giant cell tumor, glioblastoma multiforme, glioma, hairy-cell tumor, head and neck cancer, heart cancer, hepatocellular/liver cancer, Hodgkin lymphoma, hyperplasia, hyperplastic corneal nerve tumor, in situ carcinoma, hypopharyngeal cancer, intestinal ganglioneuroma, islet cell tumor, Kaposi's sarcoma, kidney/renal cell cancer, laryngeal cancer, leiomyoma tumor, lip and oral cavity cancer, liposarcoma, liver cancer, non-small cell lung cancer, small cell lung cancer, lymphomas, macroglobulinemia, malignant carcinoid, malignant fibrous histiocytoma of bone, malignant hypercalcemia, malignant melanomas, marfanoid habitus tumor, medullary carcinoma, melanoma, merkel cell carcinoma, mesothelioma, metastatic skin carcinoma, metastatic squamous neck cancer, mouth cancer, mucosal neuromas, multiple myeloma, mycosis fungoides, myelodysplastic syndrome, myeloma, myeloproliferative disorder, nasal cavity and paranasal sinus cancer, nasopharyngeal carcinoma, neck cancer, neural tissue cancer, neuroblastoma, oral cancer, oropharyngeal cancer, osteosarcoma, ovarian cancer, ovarian epithelial tumor, ovarian germ cell tumor, pancreatic cancer, parathyroid cancer, penile cancer, pharyngeal cancer, pheochromocytoma, pineal astrocytoma, pineal germinoma, pineoblastoma, pituitary adenoma, pleuropulmonary blastoma, polycythemia vera, primary brain tumor, prostate cancer, rectal cancer, renal cell tumor, reticulum cell sarcoma, retinoblastoma, rhabdomyosarcoma, salivary gland cancer, seminoma, Sezary syndrome, skin cancer, small intestine cancer, soft tissue sarcoma, squamous cell carcinoma, squamous neck carcinoma, stomach cancer, supratentorial primitive neuroectodermal tumor, testicular cancer, throat cancer, thymoma, thyroid cancer, topical skin lesion, trophoblastic tumor, urethral cancer, uterine/endometrial cancer, uterine sarcoma, vaginal cancer, vulvar cancer, Waldenstrom's macroglobulinemia or Wilm's tumor. Exemplary cancers commonly diagnosed in humans include, but are not limited to, cancers of the bladder, brain, breast, bone marrow, cervix, colon/rectum, kidney, liver, lung/bronchus, ovary, pancreas, prostate, skin, stomach, thyroid, or uterus. Exemplary cancers commonly diagnosed in dogs, cats, and other pets include, but are not limited to, lymphosarcoma, osteosarcoma, mammary tumors, mastocytoma, brain tumor, melanoma, adenosquamous carcinoma, carcinoid lung tumor, bronchial gland tumor, bronchiolar adenocarcinoma, fibroma, myxochondroma, pulmonary sarcoma, neurosarcoma, osteoma, papilloma, retinoblastoma, Ewing's sarcoma, Wilm's tumor, Burkitt's lymphoma, microglioma, neuroblastoma, osteoclastoma, oral neoplasia, fibrosarcoma, osteosarcoma and rhabdomyosarcoma, genital squamous cell carcinoma, transmissible venereal tumor, testicular tumor, seminoma, Sertoli cell tumor, hemangiopericytoma, histiocytoma, chloroma (e.g., granulocytic sarcoma), corneal papilloma, corneal squamous cell carcinoma, hemangiosarcoma, pleural mesothelioma, basal cell tumor, thymoma, stomach tumor, adrenal gland carcinoma, oral papillomatosis, hemangioendothelioma and cystadenoma, follicular lymphoma, intestinal lymphosarcoma, fibrosarcoma and pulmonary squamous cell carcinoma. Exemplary cancers diagnosed in rodents, such as a ferret, include, but are not limited to, insulinoma, lymphoma, sarcoma, neuroma, pancreatic islet cell tumor, gastric MALT lymphoma and gastric adenocarcinoma. Exemplary neoplasias affecting agricultural livestock include, but are not limited to, leukemia, hemangiopericytoma and bovine ocular neoplasia (in cattle); preputial fibrosarcoma, ulcerative squamous cell carcinoma, preputial carcinoma, connective tissue neoplasia and mastocytoma (in horses); hepatocellular carcinoma (in swine); lymphoma and pulmonary adenomatosis (in sheep); pulmonary sarcoma, lymphoma, Rous sarcoma, reticulo-endotheliosis, fibrosarcoma, nephroblastoma, B-cell lymphoma and lymphoid leukosis (in avian species); retinoblastoma, hepatic neoplasia, lymphosarcoma (lymphoblastic lymphoma), plasmacytoid leukemia and swimbladder sarcoma (in fish), caseous lymphadenitis (CLA): chronic, infectious, contagious disease of sheep and goats caused by the bacterium Corynebacterium pseudotuberculosis, and contagious lung tumor of sheep caused by jaagsiekte.

[0221] As used herein, a “metastasis” refers to the spread of cancer from one part of the body to another. For example, in the metastatic process, malignant cells can spread from the site of the primary tumor in which the malignant cells arose and move into lymphatic and blood vessels, which transport the cells to normal tissues elsewhere in an organism where the cells continue to proliferate. A tumor formed by cells that have spread by metastasis is called a “metastatic tumor,” a “secondary tumor” or a “metastasis.”

[0222] As used herein, an anticancer agent or compound (used interchangeably with “antitumor or antineoplastic agent”) refers to any agent or compound used in anticancer treatment. These include any agents, when used alone or in combination with other compounds or treatments, that can alleviate, reduce, ameliorate, prevent, or place or maintain in a state of remission of clinical symptoms or diagnostic markers associated with neoplastic disease, tumors and cancer, and can be used in methods, combinations and compositions provided herein. Anticancer agents include antimetastatic agents. Exemplary anticancer agents include, but are not limited to, chemotherapeutic compounds (e.g., toxins, alkylating agents, nitrosoureas, anticancer antibiotics, antimetabolites, antimitotics, topoisomerase inhibitors), cytokines, growth factors, hormones, photosensitizing agents, radionuclides, signaling modulators, anticancer antibodies, anticancer oligopeptides, anticancer oligonucleotides (e.g., antisense RNA and siRNA), angiogenesis inhibitors, radiation therapy, or a combination thereof. Exemplary chemotherapeutic compounds include, but are not limited to, Ara-C, cisplatin, carboplatin, paclitaxel, doxorubicin, gemcitabine, camptothecin, irinotecan, cyclophosphamide, 6-mercaptopurine, vincristine, 5-fluorouracil, and methotrexate. As used herein, reference to an anticancer or chemotherapeutic agent includes combinations or a plurality of anticancer or chemotherapeutic agents unless otherwise indicated.

[0223] As used herein, a “chemosensitizing agent” is an agent which modulates, attenuates, reverses, or affects a cell's or organism's resistance to a given chemotherapeutic drug or compound. The terms “modulator”, “modulating agent”, “attenuator”, “attenuating agent”, or “chemosensitizer” can be used interchangeably to mean “chemosensitizing agent.” In some examples, a chemosensitizing agent can also be a chemotherapeutic agent. Examples of chemosensitizing agents include, but are not limited to, radiation, calcium channel blockers (e.g., verapamil), calmodulin inhibitors (e.g., trifluoperazine), indole alkaloids (e.g., reserpine), quinolines (e.g., quinine), lysosomotropic agents (e.g., chloroquine), steroids (e.g., progesterone), triparanol analogs (e.g., tamoxifen), detergents (e.g., Cremophor EL), texaphyrins, and cyclic antibiotics (e.g., cyclosporine).

[0224] As used herein, a subject includes any organism, including an animal for whom diagnosis, screening, monitoring or treatment is contemplated. Animals include mammals such as primates and domesticated animals. An exemplary primate is a human. A patient refers to a subject, such as a mammal, primate, human, or livestock subject afflicted with a disease condition or for which a disease condition is to be determined or risk of a disease condition is to be determined.

[0225] As used herein, a patient refers to a human subject exhibiting symptoms of a disease or disorder.

[0226] As used herein, treatment of a subject that has a condition, disorder or disease means any manner of treatment in which the symptoms of the condition, disorder or disease are ameliorated or otherwise beneficially altered. Treatment encompasses any pharmaceutical use of the viruses described and provided herein.

[0227] As used herein, amelioration of the symptoms of a particular disease or disorder by a treatment, such as by administration of a pharmaceutical composition or other therapeutic, refers to any lessening, whether permanent or temporary, lasting or transient, of the symptoms that can be attributed to or associated with administration of the composition or therapeutic.

[0228] As used herein, treatment of a wound refers to any manner of treatment in which the signs or symptoms of having a wound are ameliorated or otherwise beneficially altered. Typically, treatment encompasses alleviation of the wound, shrinkage of the wound, reduction in the size of the wound or other similar result that is associated with wound healing.

[0229] As used herein, treatment of a subject that has a neoplastic disease, including a tumor or metastasis, means any manner of treatment in which the symptoms of having the neoplastic disease are ameliorated or otherwise beneficially altered. Typically, treatment of a tumor or metastasis in a subject encompasses any manner of treatment that results in slowing of tumor growth, lysis of tumor cells, reduction in the size of the tumor, prevention of new tumor growth, or prevention of metastasis of a primary tumor, including inhibition vascularization of the tumor, tumor cell division, tumor cell migration or degradation of the basement membrane or extracellular matrix.

[0230] As used herein, therapeutic effect means an effect resulting from treatment of a subject that alters, typically improves or ameliorates the symptoms of a disease or condition or that cures a disease or condition. A therapeutically effective amount refers to the amount of a composition, molecule or compound which results in a therapeutic effect following administration to a subject.

[0231] As used herein, amelioration or alleviation of the symptoms of a particular disorder, such as by administration of a particular pharmaceutical composition, refers to any lessening, whether permanent or temporary, lasting or transient that can be attributed to or associated with administration of the composition.

[0232] As used herein, efficacy means that upon administration of a virus or virus composition, the virus will colonize proliferating or immunoprivileged cells, such as tumor cells, and replicate. Colonization and replication in tumor cells is indicative that the treatment is or will be an effective treatment.

[0233] As used herein, effective treatment with a virus is one that can increase survival compared to the absence of treatment therewith. For example, a virus is an effective treatment if it stabilizes disease, causes tumor regression, decreases severity of disease or slows down or reduces metastasizing of the tumor.

[0234] As used herein, a composition refers to any mixture. It can be a solution, suspension, liquid, gel, powder, paste, aqueous, non-aqueous or any combination thereof.

[0235] As used herein, a formulation refers to a composition containing at least one active pharmaceutical or therapeutic agent and one or more excipients.

[0236] As used herein, a co-formulation refers to a composition containing two or more active or pharmaceutical or therapeutic agents and one or more excipients.

[0237] As used herein, a combination refers to any association between or among two or more items. The combination can be two or more separate items, such as two compositions or two collections, can be a mixture thereof, such as a single mixture of the two or more items, or any variation thereof. The elements of a combination are generally functionally associated or related.

[0238] As used herein, direct administration refers to administration of a composition without dilution.

[0239] As used herein, a kit is a packaged combination, optionally, including instructions for use of the combination and/or other reactions and components for such use.

[0240] As used herein, an “article of manufacture” is a product that is made and sold. As used throughout this application, the term is intended to encompass articles containing a vaccinia virus alone or in combination with a second therapy or a therapeutic energy source contained in the same or separate articles of packaging.

[0241] As used herein, a device refers to a thing made or adapted for a particular task. Exemplary devices herein are devices that cover or coat or are capable of contacting the epidermis or surface of the skin. Examples of such devices include, but are not limited to, a wrap, bandage, bind, dress, suture, patch, gauze or dressing.

[0242] As used herein, the singular forms “a,” “an” and “the” include plural referents unless the context clearly dictates otherwise.

[0243] As used herein, ranges and amounts can be expressed as “about” or “approximately” a particular value or range. “About” or “approximately” also includes the exact amount. Hence, “about 5 milliliters” means “about 5 milliliters” and also “5 milliliters.” Generally “about” includes an amount that would be expected to be within experimental error.

[0244] As used herein, “about the same” means within an amount that one of skill in the art would consider to be the same or to be within an acceptable range of error. For example, typically, for pharmaceutical compositions, within at least 1%, 2%, 3%, 4%, 5% or 10% is considered about the same. Such amounts can vary depending upon the tolerance for variation in the particular composition by subjects.

[0245] As used herein, “optional” or “optionally” means that the subsequently described event or circumstance does or does not occur, and that the description includes instances where said event or circumstance occurs and instances where it does not.

[0246] As used herein, the abbreviations for any protective groups, amino acids and other compounds are, unless indicated otherwise, in accord with their common usage, recognized abbreviations, or the IUPAC-IUB Commission on Biochemical Nomenclature (see, (1972) Biochem. 11:1726).

[0247] For clarity of disclosure, and not by way of limitation, the detailed description is divided into the subsections that follow.

### B. GENE-EVOKED CHROMOPHORE (e.g., MELANIN) PRODUCTION AS THERANOSTIC MEDIATOR

[0248] Provided are methods of theranostics, whereby nucleic acid molecule(s), encoding one or more proteins (e.g., chromophore-producing enzyme, such as melanin-producing enzymes) are introduced into a cell, for example a tumor cell, resulting in production or increased production of a compound (e.g., a chromophore or pigment such as melanin) or protein, that induces toxicity of the host cell following absorbance of electromagnetic radiation. Thus, the nucleic acid compositions provided herein can be used in therapeutic methods to eliminate cells that are associated with, cause or otherwise exacerbate a disease or condition, such as tumor cells. In addition, the properties of the accumulated compound (e.g., melanin) can be further exploited for diagnostic purposes, for example to facilitate diagnostic imaging of the host cell, in particular a host cell that is a tumor cell.

[0249] For purposes of the methods herein, the chromophore-producing enzyme or enzymes are any that are sufficient for the production of a chromophore in the host cell that is capable of inducing toxicity of the host cell following absorbance of electromagnetic radiation. In particular, the absorbance spectrum of the introduced chromophore product and/or precursors thereof differ from those of biological tissue, for example human tissue, and components thereof, such as blood, which contains known chromophores hemoglobin, oxyhemoglobin, water and lipid. For example, melanin exhibits enhanced absorption of light in the near-infrared optical window, which is characterized by low absorption and maximum light penetration in tissues. The transferred energy is then converted to thermal energy eventually heating the chromophore (e.g., melanin) producing cells and cells in their vicinity to temperatures that cause protein denaturation and cell death. For example, chromophore (e.g., melanin) containing cells exposed to electromagnetic radiation in the near-infrared optical range of from or from about 700-900 nm, such as about 808 nm, can exhibit a temperature of greater than 20° C., 30° C., 40° C., 50° C., 60° C., 70° C., 80° C. or higher. The temperature can increase greater than 5° C., 10° C., 15° C., 20° C., 30° C., 40° C., 50° C. or more compared to cells that are not made to overproduce the chromophore.

[0250] Thus, in applications of thermotherapy methods provided herein, cells producing the chromophore (e.g., melanin), or precursors thereof, can be treated with electromagnetic radiation at one or more wavelengths that are less absorbed by biological tissue than the chromophore product, for example wavelengths in the near infrared spectrum, that are well-absorbed by the chromophore resulting in thermal radiation, which results in selective hyperthermia or thermotherapy of the chromophore-containing tissue. For example, a near-infrared laser beam can be used to induce thermal transduction of a chromophore (e.g., melanin), produced as a result of transgenic expression of biosynthetic enzymes, thereby increasing the temperature of host cells, particularly host tumor cells, and effect host cell toxicity. Upon absorbance of electromagnetic radiation, at wavelengths that are greater absorbed by the chromophore than the components of biological tissue (e.g., hemoglobin, oxyhemoglobin), the chromophore product and/or precursors thereof absorb the electromagnetic radiation and effect selective cell toxicity of the host cell, for example by emitting thermal radiation and/or producing reactive oxygen species in sufficient quantities to induce cytotoxicity. Melanin is an example of such a chromophore product, which can be synthesized or produced in a cell carrying a tyrosinase enzyme in the presence or absence of other melanin-producing enzymes (e.g., tyrosinase related protein 1).

[0251] While chromophores such as melanin are present in cells and tissues of the body, such as pigment cells and tissues, it is found herein that their synthesis and production can be directed by delivery of exogenous genes to particular host cells. This can result in the production or overproduction of a desired chromophore product in any desired host cell or tissue that is desired to be eliminated for the treatment of a disease or condition. In particular aspects of the methods herein, nucleic acid molecules encoding a chromophore-producing enzyme or enzymes are delivered to a subject for the directed delivery to tumor cells. Subsequent exposure to electromagnetic radiation at one or more wavelengths that are less absorbed by the biological tissue than the chromophore product results in the killing and cell death of the tumor cells, thereby reducing tumor volume and size. Accordingly, the methods provided herein can be practiced in non-melanoma tumor cells to which exogenous enzymes are delivered for the de novo synthesis of melanin in the cell.

[0252] In addition to photothermal and photodynamic therapeutic applications, the chromophore product (e.g., melanin) introduced into a host cell using the methods provided herein, can be used for diagnostic purposes, for example, diagnostic imaging. For example, metal chelating chromophores, such as melanin, can enhance the contrast in optical and acoustic imaging, as well as magnetic resonance imagining, and thereby improve detection of tissues containing the chromophore. Such imaging techniques permit the visualization and presence of the chromophore deep within the host body, thereby permitting not only the diagnosis of surface tumors but also tumors deep within the body, such as metastases. In addition, since the chromophore is produced enzymatically it is expressed relatively quickly upon delivery of a nucleic acid molecule encoding a chromophore-producing enzyme. Thus, nucleic acids encoding chromophore-producing enzymes, such as melanin-producing enzymes, can be used in diagnostic methods to facilitate fast detection within 18 hours post nucleic acid delivery, such as post viral infection, with increasing intensity over time. This is an advantage over other detection methods using fluorescent proteins that are not produced in detectable amounts as quickly. The use of fluorescent proteins as a detectable moiety also are hampered by the fact that many tissues are autofluorescent, which can interfere with the signal. This is not a problem for melanin, and in fact, the production of melanin can reduce tissue autofluorescence. In addition, other advantages over fluorescent proteins include, for example, the stability of melanin, the fact that no special equipment is needed to visualize the dark pigments, and that the introduction of melanin synthesis should be adaptable to most species because of the ubiquitous presence of melanin in all kingdoms of life.

[0253] Diagnostic imaging can be used alone or in combination with photothermal and/or photodynamic applications. For example, diagnostic imaging, enhanced by production of the chromophore product (e.g., melanin) can be used prior to photothermal therapy to aid in identification of the tissue(s) to be treated by photothermal therapy and also to assist with more accurate direction of the laser light. Diagnostic imaging also can be used to monitor the progress and effectiveness of the photothermal/photodynamic treatments.

[0254] The nucleic acid can be a viral vector or non-viral vector. In the methods herein, the nucleic acid is delivered to host cells by any method that effects delivery to cells, including but not limited to, electroporation, direct injection, systemic injection or infusion or other methods as described herein or known in the art. Typically, the nucleic acid that is delivered is one that is capable of directed or localized expression in immunoprivileged cells or tissues, such as tumor cells or inflamed cells or tissues (e.g., atherosclerotic plaques). In particular, viral vectors (e.g., oncolytic viruses) are used to infect cells, in particular cancer cells, including tumor cells. For example, the viral vectors used in the methods described herein preferentially infect tumor cells and contain exogenous nucleic acid molecule(s) that encode one or more chromophore-producing enzymes that are capable of synthesis of proteins or compounds that induce toxicity as a result of exposure to electromagnetic radiation. In particular, oncolytic viral vectors are used to deliver nucleic acid molecules encoding enzymes (e.g., tyrosinase and/or tyrosinase-related protein-1) that are directly or indirectly involved in the biosynthesis of a chromophore product (e.g., melanin) and/or the precursors of a chromophore to a tumor cell. Exemplary oncolytic viral vectors are described herein (see also FIG. 2).

[0255] The compositions and methods provided herein are exemplified with nucleic acid compositions encoding melanin-producing enzymes, such as tyrosinase or tyrosinase-related protein 1. The following sections describe in further detail the biosynthetic pathways for melanin production, exemplary nucleic acid molecules and compositions encoding chromophore-producing enzymes for use in performing the energy-absorbing therapeutic methods herein. Also described below are methods and applications of the energy-absorbing therapeutic method alone or in combination with other therapy or diagnostic methods. The compositions used in the method can be adapted by one of skill in the art based on the description herein for use in any particular application or therapeutic indication in which a cell or cells is desired to be eliminated (e.g., tumor cell), and depending on the particular subject or host and other similar considerations.

### C. MELANIN BIOSYNTHESIS AND PROPERTIES

[0256] Melanin pigments are polymers of oxidized derivatives of the amino acid tyrosine. There are many different types of melanin, with differing properties. Aside from the melanin found in the brain, mammalian melanin is classified into the brown/black pigment eumelanin and the red/yellow pigment pheomelanin. Eumelanin is the most abundant melanin in humans, found in the eyes and black hair, and is also found in the ink sac of some cephalopods (e.g., cuttlefish). Red/yellow pheomelanin is found in the lips, genitals, and red hair.

[0257] 1. Biosynthesis of Melanin

[0258] FIG. 1 depicts the biosynthetic pathway for melanin production. Biosynthesis of eumelanin and pheomelanin begins with the hydroxylation of tyrosine to 3,4-dihydroxphenylalanine (DOPA) and oxidation of DOPA to Dopaquinone by the enzyme tyrosinase (Tyr). At this point, whether eumelanin or pheomelanin is produced depends on the presence of the amino acid cysteine. In the presence of cysteine, Dopaquinone is converted to Cysteinyldopa, the metabolites of which lead to the production of pheomelanin. In the absence of cysteine, Dopaquinone is converted to Dopachrome, which is isomerized to 5,6-dihydroxyindole-2-carboxylic acid (DHICA) in a reaction catalyzed by tyrosinase-related protein-2/dopachrome tautomerase (TRP-2/Dct) or spontaneously decomposed to form 5,6-dihydroxyindole (DHI). Oxidation of DHICA, to yield indole-2-carboxylic acid quinone is catalyzed by tyrosinase-related protein-1 (Trp-1). DHI is oxidized to form Indolequinone in a reaction catalyzed by tyrosinase (Tyr). The enzyme tyrosinase is involved in the rate-limiting step in both pathways leading to eumelanin production and pheomelanin production.

[0259] Eumelanin pigments are heterogeneous macromolecules constructed from a combination of reduced and oxidized DHICA and DHI units. As shown in the examples herein, the ratio and extent of eumelanin to pheomelanin produced can be dependent on the amount of tyrosinase that is present. In addition, the secondary enzymes tyrosinase-related protein-2/dopachrome tautomerase (TRP-2/Dct) and tyrosinase-related protein-1 (Trp-1) are only involved in the pathway leading to production of eumelanin. The presence of these secondary enzymes in addition to tyrosinase can promote the production of eumelanin over pheomelanin. The ratios of eumelanin to pheomelanin also can be affected by peroxidase oxidizing enzymes and Zn(II) ions. Eumelanin strongly absorbs ultraviolet radiation, while pheomelanin weakly absorbs ultraviolet radiation.

[0260] 2. Properties of Melanin

[0261] Melanin polymers exhibit several properties, including light absorbing, redox and chelating properties. Theses physical and chemical properties can be leveraged by a variety of methods, as disclosed herein, for therapeutic purposes.

[0262] a. Optical Properties

[0263] Unlike other biological pigments present in tissue (e.g., hemoglobin, bilirubin and β-carotene), which exhibit distinct absorption spectra with distinct absorbance peaks, melanin exhibits a broadband absorption spectrum. Melanin's broadband absorbance spectrum is likely a summation of the individual peaked spectra of the multiple melanin species that make up the heterogeneous melanin pigment population, although the wide spectral absorbance has also been attributed to the high degree of conjugation within melanin molecules. The absorbance of melanin increases monotonically as the wavelength decreases and the energy of the electromagnetic radiation increases, enabling melanin's ability to absorb high energy ultraviolet radiation and offer photoprotection to melanin-containing cells.

[0264] Biological pigments other than melanin typically exhibit peak absorbance between about 400-500 nm. Wavelengths greater than about 500 nm are more absorbed by melanin than the other major biological pigments, including oxyhemoglobin, deoxyhemoglobin, bilirubin and β-carotene. In addition to biological pigments, water and lipids also absorb electromagnetic radiation. The absorption spectrum of water shows that water exhibits strong absorption at the short wavelengths (up to approximately 200 nm), minimal absorbance between 200 and 420 nm and then increasing absorption from 420 to 10,000 nm. Lipids also contribute to electromagnetic absorption of tissue, absorbing increasing amounts of radiation at increasing wavelengths greater than approximately 600 nm. At electromagnetic wavelengths of approximately 500 to 1500 nm, melanin is the most absorbent component of human tissue.

[0265] Transmission of electromagnetic radiation through human tissue is a function of the refractive indices of the tissue and distribution of chromophores (e.g., hemoglobin, melanin, water, lipid) within the tissue which will bring about different reflection, transmission, scattering and absorption characteristics depending on the wavelength. The optical window, also called the therapeutic window, defines the range of wavelengths where electromagnetic radiation has its maximum depth of penetrance in tissue. Because there is little correlation between scattering and wavelength, the optical window is primarily limited to absorption by blood at shorter wavelengths and water at longer wavelengths. Due to the reduced absorption by tissue chromophores at red and near infrared (NIR) wavelengths of 600-1200 nm, wavelengths within this region of the spectrum exhibit the deepest tissue penetration. As discussed above, melanin exhibits greater absorption at these wavelengths than other components of the tissue. Therefore, in some embodiments provided herein, wavelengths within the range of 600-1200 nm are used to achieve specific absorption of electromagnetic energy in melanin-containing cells as well as maximum tissue penetrance.

[0266] b. Metal Binding and Reduction-Oxidation (Redox)

[0267] In addition to the optical properties discussed above, melanins, especially eumelanin exhibit strong redox properties which contribute to melanin's role as a photoprotector. In addition to absorbing ultraviolet irradiation directly, melanin protects cells from oxidative stress by scavenging intracellular reactive oxygen species (ROS) (Tada et al., (2010) J Clin Biochem Nutr. 46(3): 224-228). Melanin pigments exist in equilibria between quinole, semi-quinone and quinone oxidation states. Semiquinone free radicals generated as a result of electron delocalization between orthoquinone and catecholic moieties of melanin enable melanins to take part in one-electron and two-electron redox reactions and thereby neutralize ROS.

[0268] Metal chelation is also one of the main biological functions of melanin (see Hong and Simon (2007) J Phys Chem B. 111(28):7938-7947). The DHICA moiety of eumelanin coordinates with many metals, in particular, Ca, Mg, Na and K. The DHI moiety of eumelanin binds Zn under neutral pH or slightly acidic conditions. Both DHICA and DHI moieties form complexes with Fe ions.

[0269] Melanin has a high capacity for binding metal ions, which enables it to function as an intracellular reservoir for metal ions (e.g., Ca(II) and Zn(II)) and regulate metal storage, release and exchange. While melanin has a moderate affinity for metals such as Ca(II) and Zn(II), melanin has a very strong affinity for heavier and more reactive metals, such as Fe(III), Cu(II), Pb(II), La(III) and Gd(III). Melanin's strong binding and sequestration of such reactive metals serves to prevent their reduction by cellular components and mitigate their role in inducing oxidative stress.

[0270] Despite its role in preventing oxidative stress by sequestering reactive metals, melanin itself, as well as DHICA and DHI precursor moieties, can produce free radicals when irradiated with UV light, making melanin a photosensitizer in addition to a photoprotector. Binding metal ions enhances this effect by making melanin more easily oxidized and susceptible to reaction with oxygen to form superoxide and other cytotoxic reactive oxygen species (Sarna et al., (1976) Science 192:101-106; Farmer et al., (2004) Pigment Cell Research, 17(4):434). UV irradiation contributes to this process. As described in the methods provided herein, this photosensitizing property of melanin can be leveraged to induce cell toxicity to target cells (e.g., tumor cells) which accumulate melanin and are subjected to phototherapy.

[0271] The metal chelating ability of melanin also can enhance detection of target cells, containing accumulated melanin, using methods provided herein. Semiquinone free radicals within melanin pigments are detectable by paramagnetic resonance (EPR). The paramagnetic resonance signal is enhanced by binding a paramagnetic or superparamagnetic metal such as gadolinium, iron, nickel, copper, erbium, europium, chromium or manganese. These metals can be incorporated into melanin, and utilized to enhance ultrasound, optoacoustic, and magnetic resonance images (see e.g., U.S. Pat. No. 5,310,539).

### D. NUCLEIC ACID MOLECULES ENCODING CHROMOPHORE-PRODUCING ENZYMES

[0272] Provided herein are nucleic acid molecules that encode an enzyme or enzymes that produces a chromophore product, for example, melanin or other chromophore. The encoded enzyme or enzymes can be any enzyme, or enzymatically active portion thereof, that is a part of the biosynthetic pathway for generation of a chromophore and is required for the production of the chromophore in a host cell of a subject. In particular, provided herein are nucleic acid molecules that encode a melanin-producing enzyme or an enzymatically active portion thereof, such as a nucleic acid molecule encoding a tyrosinase and/or tyrosinase-related protein 1 or an enzymatically active portion of a tyrosinase or tyrosinase-related protein 1. The nucleic acid molecules, when delivered to cells, can achieve overproduction of the chromophore in the cell. The overproduction of the chromophore, such as overproduction of melanin, can be used in diagnostic and therapeutic applications as described herein.

[0273] The nucleic acid molecules encoding an enzyme or enzymes that produce a chromophore product can be any non-viral or viral nucleic acid molecule that contains a sequence of nucleotides encoding an enzyme or enzymes that produce a chromophore product. Generally, the nucleic acid molecule is a DNA, such as a double stranded circular or linear DNA. The DNA can be a naked DNA. The nucleic acid molecule can be provided as a construct containing a heterologous nucleic acid molecule. There are a number of constructs that are known to one of skill in the art for in vitro or in vivo delivery of nucleic acid to cells. Such constructs include viral based delivery systems and non-viral based deliver systems. For example, the nucleic acid molecule can be a construct containing a nucleic acid molecule that is delivered in a nanoparticle (e.g., a targeted or radiolabeled nanoparticle), a plasmid or a vector (e.g., a viral vector or an expression vector). Such constructs are well-known in the art and readily adaptable for use with the compositions and methods described herein. The nucleic acid molecule can be delivered in a vehicle or as a complex. For example, the nucleic acid molecule can be encapsulated in liposomes. The nucleic acid molecule can be complexed to other agents, such as target ligands or other moieties and delivered as a nanoparticle. The nucleic acid molecule can be delivered by any method known in the art, including, but not limited to, injection, infusion, transfection, microinjection, gene gun and electroporation. For example, the nucleic acid molecules can be delivered systemically or directly to cells of a host.

[0274] The nucleic acid molecule can be driven by a promoter to enhance, control or regulate expression. The promoter is operably linked to the coding region of the gene encoding the chromophore-producing enzyme. Any strong promoter known to those skilled in the art can be used for driving the expression of DNA. The promoter can be a constitutive promoter, such as a CMV promoter, a tissue-specific promoter, or an inducible or regulatable promoter. The promoter can be a viral promoter or a eukaryotic promoter. For example, suitable strong promoters include, but are not limited to, adenoviral promoters, such as the adenoviral major late promoter; vaccinia synthetic early-late promoter (P_{SEL}; SEQ ID NO: 169); vaccinia synthetic late promoter (P_{SL}); the cytomegalovirus (CMV) promoter; the respiratory syncytial virus (RSV) promoter; the simian virus 40 (SV40) promoter; respiratory syncytial virus (RSV) promoter; human elongation factor 1α-subunit (EF1-1α) promoter; a ubiquitin C promoter (Ubc); a phosphoglycerate kinase-1 (PGK) promoter; small nuclear RNA U1b promoter; glucose 6-phosphate dehydrogenase promoter; heat shock promoters; the albumin promoter; the ApoAI promoter; human globin promoters; viral thymidine kinase promoters, such as the Herpes Simplex thymidine kinase promoter; retroviral LTRs; the β-actin promoter; human growth hormone promoters; phage promoters, such as the T7, SP6 and T3 RNA polymerase promoters; and the cauliflower mosaic virus 35S (CaMV 35S) promoter. Retroviral LTRs include, for example, Rous sarcoma virus long terminal repeat (RSV-LTR) and Moloney murine leukemia virus (MoMLV) LTR. Suitable strong promoters also can include inducible promoters, such as the metallothionein (e.g., MMT) promoter. The promoter can also be a tissue- or cell-specific promoter, including any described elsewhere herein or known in the art (see e.g., Papadakis et al. (2004) Current Gene Therapy, 4:89-113).

[0275] In some examples, the nucleic acid molecule is formulated with an agent or delivery vehicle that binds to or complexes with the nucleic acid and mediates its entry into cells. Exemplary agents include, but are not limited to, cationic liposomes and lipids, lipoproteins, synthetic polymers or polypeptides, mineral compounds or vitamins. Exemplary polymers include polycations or polyanions. For example, a nucleic acid molecule can be formulated with polyamine, calcium phosphate precipitate, histone protein, protamine, polyethyleneimine, polylysine, polyarginine, polyornithine, DEAE dextran, polybrene, polyampholyte complex, spermine, spermidine, putrescine, human serum albumin, DNA binding proteins, non-histone chromosomal proteins, coat proteins from DNA viruses and polymers of N-substituted glycines.

[0276] For example, the nucleic acid molecule can be encapsulated in lipids or packaged in liposomes prior to delivery to the subject. Lipid encapsulation is generally accomplished using liposomes that are able to stably bind or entrap and retain nucleic acid. The ratio of condensed nucleic acid delivered agent to lipid preparation can vary but will generally be around 1:1 (mg DNA:micromoles lipid) or more of lipid. Liposomal preparations include cationic (positively charged), anionic (negatively charged) and neutral preparations. Such preparations are well-known to one of skill in the art and readily available. For example, exemplary cationic lipids include, but are not limited to, N[1-2,3-dioleyloxy)propyl]-N,N,N-trimethylammonium (DOTMA; available under the product line Lipofectin®); DDAB/DOPE and DOTAP/DOPE. Anionic and neutral liposomes also are readily available and can be prepared from phosphatidyl choline, cholesterol, phosphatidyl ethanolamine, dioleoylphosphatidyl choline (DOPC), dioleoylphosphatidyl glycerol (DOPG), dioleoylphosphatidyl ethanolamine (DOPE), such as the commercially available preparation Avanti Polar Lipids. The liposomes include multilamellar vesicles (MLVs), small unilamellar vesicles (SUVs), or large unilamellar vesicles (LUCs).

[0277] The nucleic acid molecules also can be formulated as nanoparticles, generally of 3-200 nm in size. The generation of nanoparticles for gene therapy is well-known in the art (see e.g., Cho et al. (2008) Clin. Cancer. Res., 14:1310; Jin et al. (2007) Biotechnol. Prog., 23:32-41). The nanoparticle can be made as a polymer, such as by using polymer carriers (e.g., polylactic acid, polysaccharides, poly(cyanoacrylates, poly(lactide-co-glycolide)) or branched polymers to generate dendrimers, such as by growth polymerization steps from poly(L-glutamic acid (PGA), polyamidoamine (PAMAM), poly(ethylene glycol) (PEG) and polyethyleneimine (PEI). Biodegradable polymers can be used which include, for example, polylactic acid, polyglycolic acid, polylactic-glycolic acid (PLGA) or poly(methyl methacrylate (PMMA). Other types of nanoparticles can be generated as a liposome using various lipid mixtures; as a magnetic nanoparticle using iron oxide, as a silica nanoparticle using SiO₂ or as a gold nanoparticle using chlorauric acid or sodium citrate. Nanoparticle systems are well-known to one of skill in the art.

[0278] In particular, the nucleic acid compositions provided herein can be used in targeted synthesis or production of the chromophore (e.g., melanin) in a cell or tissue. In aspects of the compositions and methods provided herein, the nucleic acid molecule is capable of targeting or accumulating in immunoprivileged cells or tissues, such as wounds, inflammatory cells or tumor cells. For example, the nucleic acid molecule compositions provided herein are delivered to tumor cells of a subject to encode a chromophore-producing enzyme, such as a melanin-producing enzyme, to produce or synthesize the chromophore (e.g., melanin) in the tumor cells. The nucleic acid molecules can be used in diagnostic, treatment or theranostic methods provided herein for generating or producing a chromophore in a cell (e.g., melanin) for diagnosis or treatment of any immunoprivileged cell or tissue including, but not limited to, a wound, inflamed tissue, atherosclerotic plaque, or tumor. In particular, the nucleic acid molecules are used in energy-absorbing therapeutic methods (e.g., hyperthermia, photodynamic therapy or other applications) to eliminate cells that cause disease, such as cells associated with atherosclerotic plaques or tumors. In particular examples, the nucleic acid molecules are targeted for delivery to non-melanoma cells or tissues.

[0279] 1. Chromophore-Producing Enzyme

[0280] Provided herein are nucleic acid molecules that contain a sequence of nucleotides that encodes a chromophore-producing enzyme or enzymes. The nucleic acid molecule compositions provided herein can be delivered to host cells of a subject to encode a chromophore-producing enzyme, such as a melanin-producing enzyme, to produce or synthesize a chromophore in the host cell. The nucleic acid molecule can encode any chromophore-producing enzyme or enzymes that is sufficient for the production or overproduction of a chromophore in a host in vivo. In particular, the produced chromophore is one that is capable of absorbing energy so that it can be exploited for various therapy applications. Generally, the chromophore is one that exhibits light absorbing, redox and chelating properties. For example, the chromophore is one that is capable of absorbing electromagnetic wavelengths of from or from about 500 nm to 1500 nm, and typically 600 to 1200 nm. In addition, or in other examples, the chromophore is one that is a photosensensitzer capable of producing free radicals when irradiated with ultraviolet light, such as electromagnetic radiation having a wavelength in the range of from or from about 10 nm to 400 nm. For example, the chromophore has a binding affinity for one or more metal ions selected from among Ca(II), Zn(II), Fe(III), Cu(II), Pb(II), La(III) and/or Gd(III). One of skill in the art is familiar with chromophores and enzymes sufficient for the production of the chromophore in a cell of a host. Exemplary chromophore-producing enzymes herein are enzymes that are sufficient for the production of the chromophore melanin (eumelanin and/or pheomelanin), and in particular eumelanin.

[0281] In some examples, the encoded chromophore-producing enzyme(s) (e.g., melanin-producing enzyme) is exogenous or heterologous to the host cell. In other examples, the encoded chromophore-producing enzyme(s) (e.g., melanin-producing enzyme) is present in the host cells, but delivery of the nucleic acid molecule achieves increased expression of the enzyme(s) and overproduction of the resulting chromophore. For example, while some cells or tumor cells contain very high levels of the melanin-producing enzyme tyrosinase, not all cells or tumor cells contain a detectable level of tyrosinase (see e.g., Solano et al. (2012) AIP Advances, 2:011102-1). One of skill in the art can empirically choose a nucleic acid molecule encoding a chromophore-producing enzyme so as to achieve overproduction of the chromophore in a desired cell or tissue of interest for use in the methods and applications herein. For example, a nucleic acid molecule encoding the chromophore-producing enzyme tyrosinase can be used for delivery to non-pigment cells that do not normally express tyrosinase or produce melanin, including non-melanoma cancer cells or tissues.

[0282] In particular, delivery of the encoded enzyme(s) can achieve production or synthesis of the chromophore in the host cell that exceeds the amounts normally present in the cell. For example, the chromophore is produced in an amount that is or is at least 1.2-fold, 1.3-fold, 1.4-fold, 1.5-fold, 2-fold, 3-fold, 4-fold, 5-fold, 6-fold, 7-fold, 8-fold, 9-fold, 10-fold, 20-fold, 30-fold, 40-fold, 50-fold, 60-fold, 70-fold, 80-fold, 90-fold, 100-fold, 120-fold, 140-fold, 160-fold, 180-fold, 200-fold or more than the amount of the chromophore produced in the cell in the absence of the delivered nucleic acid molecule. It is within the level of one skilled in the art to determine the level or amount of a chromophore in a host cell in the absence of a delivered or introduced nucleic acid encoding a chromophore producing enzyme or enzymes and compare such levels to the level or amount produced in the presence of a nucleic acid molecule encoding a chromophore-producing enzyme or enzymes. For example, optical density measurements of cell pellets or tissues, such as from biopsy samples, can be determined based on the optical absorption of the particular chromophore. In such an example, melanin displays maximal optical absorption at ultraviolet wavelengths, but has a broad spectrum of optical absorption across a broad range of absorbance spectra, for example, 350 nm to 1000 nm. The absorbance can be normalized to the number of cells or tissue or sample size or weight. The absorbance also can be compared to control or reference samples in which a nucleic acid molecule encoding a chromophore producing enzyme or enzymes was not delivered or introduced.

[0283] In particular, provided herein are nucleic acid molecules that encode a melanin-producing enzyme or enzymes. Melanin is a pigment that can be subdivided into the brownish/black eumelanin and the reddish brown pheomelanin. Many genes are known to be involved in melanin biosynthesis (see e.g., Simon et al. (2009) Pigment Cell Melanoma Res, 22:563-79). Examples of such genes include, but are not limited to, tyrosinase (TYR), tyrosinase related protein 1 (tyrp1 or TRP-1) and Dopachrome tautomerase/tyrosinase related protein 2 (DCT, Tyrp2 or TRP2). In one example, nucleic acid molecules provided herein encode a tyrosinase enzyme or enzymatically active portion thereof. In another example, nucleic acid molecules provided herein encode a tyrosinase enzyme or enzymatically active portion thereof and a TRP-1 enzyme or enzymatically active portion thereof. In a further example, nucleic acid molecules provided herein encode a tyrosinase enzyme or enzymatically active portion thereof and a TRP2 enzyme or enzymatically active portion thereof. In an additional example, nucleic acid molecules provided herein encode a tyrosinase enzyme or enzymatically active portion thereof, a TRP-1 enzyme or enzymatically active portion thereof and a TRP2 enzyme or enzymatically active portion thereof. A description of exemplary nucleic acid molecules encoding such enzymes are described further below.

[0284] The nucleic acid molecules provided herein, when delivered to cells, can result in production of eumelanin or pheomelanin in the cell. In particular examples, the nucleic acid molecules provided herein, when delivered to cells, result in production of greater eumelanin than pheomelanin. Eumelanin is known to have more efficient binding capacity for certain drugs and metal ions, and has more potential in storing iron compared to pheomelanin. Therefore, production of greater eumelanin is likely to give a better MR signal. For example, the ratio of eumelanin to pheomelanin in the cell containing the introduced and encoded melanin-producing enzyme or enzymes is at least or greater than 1.2:1, 1.5:1, 2.0:1, 3.0:1, 4.0:1, 5.0:1, 6.0:1, 7.0:1, 8.0:1, 9.0:1, 10.0:1 or greater. The ratio or fold amount of eumelanin to total melanin produced in a cell into which a nucleic acid molecule encoding a melanin-producing enzyme is delivered can be at least 0.2, 0.3, 0.4, 0.5, 0.6, 0.7, 0.8, 0.9 or more. It is within the level of one skilled in the art to choose a particular nucleic acid molecule (e.g., virus, nanoparticle or other nucleic acid molecule) encoding a melanin-producing enzyme or enzymes that is capable of primarily achieving eumelanin production in cells into which it is delivered. Assays to quantitatively analyze eumelanin and pheomelanin or total melanin in cell or tissue samples are known to one of skill in the art (see e.g., Wakamatsu et al. (2002) Pigment Cell Res., 15:174-183; Ozeki et al. (1996) Pigment Cell Research, 9:265-270; Ito et al. (2003) Pigment Cell Research, 16:523-531). In such examples, the nucleic acid can encode TRP-1, which is known to increase the ratio of eumelanin to pheomelanin when expressed in cells. Generally, the TRP-1 is co-expressed with tyrosinase (Tyr).

[0285] a. Tyrosinase

[0286] Provided herein are nucleic acid molecules that encode a tyrosinase, a variant tyrosinase, or an enzymatically active portion of a tyrosinase, whereby the encoded enzyme exhibits tyrosinase activity. Tyrosinase (monophenol, L-dopa: oxygen oxidoreductase, EC 1.14.18.1; also known as TYR and TYRL) is a copper-containing enzyme that is present in plant and animal tissues that is a key enzyme in the melanin biosynthetic pathway. The enzyme has both tyrosine hydroxylase and dopa oxidase catalytic activities, and requires copper for function. Tyrosinase is the only enzyme absolutely required for melanin synthesis, and it is involved in the production of both eumelanin and pheomelanin. Pheomelanogenesis occurs in cells having a lower expression and activity of tyrosinase, whereas eumelanogenesis generally occurs in cells producing high levels of tyrosinase.

[0287] Tyrosinase catalyzes the first two steps in the pathway for melanin (eumelanin and pheomelanin) synthesis: hydroxylation of the amino acid tyrosine into dihydroxyphenylalanine (DOPA) and then oxidation into dopaquinone. Tyrosinase also catalyzes the subsequent oxidations of further downstream products 5,6-dihydroxyindole (DHI) and 5,6-dihydroxyindole-2-carboxylic acid (DHICA) into the eumelanin precursors indole-5,6-quinone and indole-5,6, quinone carboxylic acid, respectively. Pheomelanin is produced in the presence of thiol compounds (e.g., glutathione and cysteine) resulting in the conversion of the tyrosinase-produced product dopaquinone to cysteinyldopa, followed by cyclization and polymerization of the cysteinyldopa to result in pheomelanin. Mutations in the tyrosinase gene have been associated with oculocutaneous albinism type I (OCA1), an autosomal recessive disorder wherein the phenotype is a complete lack of melanin biosynthesis in the eyes, hair, and skin (Oetting, Pigment Cell Res., 2000, 13, 320-325).

[0288] The activity of tyrosinase can be modulated by other melanocyte-specific proteins, such as tyrosinase related protein 1 (Tyrp 1) and 2 (Tyrp 2, DCT), p-protein and membrane-associated transporter protein (MATP) (see e.g., Wang et al. (2006) Pigment Cell Res., 19:3-18). These proteins act to stabilize tyrosinase in cells, assist in the maturation and trafficking of tyrosinase in the cell and/or control processing and intracellular transport of tyrosinase. In particular, Tyrp 1 and Tyrp 2, while also being involved in melanin synthesis, have been shown to stabilize tyrosinase. As shown herein, however, delivery of nucleic acid encoding only the tyrosinase enzyme is sufficient for melanin production.

[0289] Tyrosinase is present in eukaryotic and prokaryotic cells, including in plants, insects, amphibians and mammals. It was initially identified in mushroom extracts. Tyrosinase is expressed in a tissue-specific manner in pigment cells, including epidermal melanocytes as well as the pigment epithelia of the retina, iris and ciliary body of the eye. The tissue-specific expression of tyrosinase is driven by its native promoter, which is approximately 2.1 kb in human and mice.

[0290] Tyrosinase is synthesized in melanosomal ribosomes found on the rough endoplasmic reticulum. Cleavage of the signal sequence is one of the first events to take place in the ER during tyrosinase maturation. After synthesis, tyrosinase is glycosylated within the ER and Golgi and then delivered to melanosomes via coated vesicles. The mature tyrosinase protein can be divided into three domains: an N-terminal lumenal ectodomain of about 455 amino acids that resides inside of melanosomes, a transmembrane domain, and a C-terminal cytoplasmic domain that extends into the cytoplasm of melanocytes (Oetting, Pigment Cell Res., 2000, 13, 320-325). The major portion of the enzyme is found inside the melanosome with only 10% (approximately 30 amino acids residues) acting as the cytoplasmic domain. Functionally, the ectodomain contains a copper-binding site and is responsible for catalytic activity which is consistent with melanin formation occurring exclusively within melanosomes (Park and Gilchrest, Cell Mol. Biol. (Noisy-le-grand), 1999, 45, 919-930). The ectodomain contains six conserved glycosylation sites that mediate N- and O-glycosidic linkages and 15 conserved, lumenal cysteine residues arranged in three Cys-rich clusters that can form disulfide bonds under the oxidizing conditions of the endoplasmic reticulum. The residues that make up the copper-binding site, cysteine-rich clusters, glycosylation sites, and other residues that are involved in metal binding and interactions to maintain globular folding, are highly conserved between and among species (Olivares et al. (2009) Pigment Cell Melanoma Res., 22:750-760).

[0291] In humans, the tyrosinase locus maps to human chromosome 11q14-21 (Barton et al., Genomics, 1988, 3, 17-24). The gene contains five exons spanning more than 65 kb (Giebel et al., Genomics, 1991, 9, 435-445). The size of the introns range from 10 kb for intron 4 to over 30 kb for intron 2. Over 50% of the coding region is found in exon 1 (Oetting, Pigment Cell Res., 2000, 13, 320-325). Human tyrosinase is encoded by a sequence of nucleotides set forth in SEQ ID NO:80 (accession number AAB37227). The encoded precursor human tyrosinase is a type I integral membrane glycoprotein that contains 529 amino acids (SEQ ID NO:81; Accession No. NP_{—}000363). Mature tyrosinase lacks the 18 amino acid signal sequence and has the sequence of amino acids set forth in SEQ ID NO:82. With reference to SEQ ID NO:81, the enzymatically active N-terminal lumenal ectodomain corresponds to amino acids 19-476, the transmembrane domain corresponds to amino acids 477-497 and the C-terminal cytoplasmic domain corresponds to amino acids 498-529 of SEQ ID NO:81. Human tyrosinase contains seven glycosylation sites that correspond to amino acid residues 68, 93, 143, 212, 272, 319 and 353 as set forth in mature tyrosinase set forth in SEQ ID NO:82 (corresponding to residues 86, 111, 161, 230, 290, 337 and 371 of SEQ ID NO:81). Among the cysteine residues are residues that correspond to residues C36, C55, C89, C289 of SEQ ID NO:81. The glycosylation and cysteine residues are required for tyrosinase activity and tyrosinase maturation, and mutations disrupting maturation are associated with deficiencies in tyrosinase that can lead to human Oculocutaneous Albinism type I (OCAI) (e.g., C18Y, C37Y, C71R, C271G/R/Y and T355K with reference to SEQ ID NO:82, corresponding to residues C36Y, C55Y, C89R, C289G/R/Y and T373K with reference to SEQ ID NO:81). An alternative splicing variant of human tyrosinase exists, but it lacks tyrosinase activity.

[0292] Copper binding is required for the activity of tyrosinase. Tyrosinase is a type 3 copper-binding protein that contains a binuclear copper active site, which brings together the molecular oxygen and the substrates tyrosine and DOPA. Each copper-binding site is coordinated by three (3) histidine residues. Specifically, in human tyrosinase, the CuA copper-binding site corresponds to residues His 162, 184 and 193 of SEQ ID NO:82 (corresponding to residues 180, 202 and 211 of SEQ ID NO:81) and the CuB copper-binding site corresponds to residues His345, 349 and 371 of SEQ ID NO:82 (corresponding to residues 363, 367 and 390 of SEQ ID NO:81). These residues are required for activity. For example, the mutant H349Y is known variant associated with Oculocutaneous Albinism type I (OCAI).

[0293] Defects in human tyrosinase are the cause of OCAI, which is also known as tyrosinase negative oculocutaneous albinism. OCAI is caused due to the production of an inactive enzyme and the lack of tyrosinase activity. Thus, the biosynthesis of melanin cannot be achieved. Defects in human tyrosinase are also the cause of albinism oculocutaneous type 1B (OCA1B) (albinism yellow mutant type) in which the biosynthesis of melanin is reduced due to a partial lack of tyrosinase activity. Exemplary mutations associated with OCAI and/or OCA1B include, but are not limited to, H19Q, P21 S, C36Y, D42G, S44G, S44R, G47D, G47V, R52I, C55I, Q68H, R77Q, R77RRins, R77W, S79L, W80R, P81L, C89R, G97R, G109R, P152S, T155S, F176I, V177F, M179L, H180N, S192Y, D199N, A201S, P205T, A206T, L216M, R217G, R217Q, R217S, R217W, de1217, de1227, W236L, W236S, R239W, D240V, K243T, G253R, H256Y, W272C, L288S, C289G, C289R, E294G, R299H, R299S, L312V, P313R, V318E, T325A, E328Q, S329P, M332T, S339G, F340L, E345G, G346E, A355E, A355P, S361R, H367Y, M370T, N371T, N371Y, T373K, Q378K, S380P, N382K, D383N, H390D, V393F, S395N, S395R, E398A, E398V, W400L, R402Q, R402G, R402L, R403S, H404N, H404P, R405L, P406L, Q408H, E409D, A416S, P417H, G419R, R422Q, S424F, M426K, V427G, P431L, R434I, N435D, F439V, D444G, G446S or D448N corresponding to SEQ ID NO:81. Other mutations are known to those of skill in the art (see e.g., the Albinism database, albinismdb.med.umn.edu/oca1mut.html).

[0294] Provided herein, for the methods and methods of use herein, are nucleic acid molecules encoding a human tyrosinase enzyme or a variant thereof or an enzymatically active portion thereof that exhibits tyrosinase enzyme activity. In particular, provided herein, for the methods and methods of use herein, is a nucleic acid molecule encoding the precursor tyrosinase enzyme set forth in SEQ ID NO:81 or the mature tyrosinase enzyme set forth in SEQ ID NO:82, or a variant or enzymatically active portion thereof that encodes a tyrosinase enzyme having tyrosinase activity and that exhibits at least 70% sequence identity to SEQ ID NO:81 or 82. For example, the encoded variant or enzymatically active portion thereof exhibits at least 75%, 80%, 81%, 82%, 83%, 84%, 85%, 86%, 87%, 88%, 89%, 90%, 91%, 92%, 93%, 94%, 95%, 96%, 97%, 98%, 99% or more sequence identity to SEQ ID NO:81 or 82. Included among such nucleic acid molecules is a nucleic acid molecule that contains the sequence of nucleotides set forth in SEQ ID NO:80 or a variant thereof or portion thereof that exhibits at least 70% sequence identity to SEQ ID NO:80 and encodes an enzyme or portion thereof that exhibits tyrosinase activity. For example, the variant or portion thereof exhibits at least 75%, 80%, 81%, 82%, 83%, 84%, 85%, 86%, 87%, 88%, 89%, 90%, 91%, 92%, 93%, 94%, 95%, 96%, 97%, 98%, 99% or more sequence identity to SEQ ID NO:80.

[0295] One of skill in the art understands that a variant or truncated fragment of a nucleic acid molecule that encodes a tyrosinase enzyme that exhibits tyrosinase activity is one that does not exhibit a mutation or change that results in the loss of tyrosinase activity. Hence, the encoded tyrosinase enzyme typically contains the residues that are associated with copper binding, glycosylation and disulfide bond formation. In addition, the encoded tyrosinase enzyme does not contain a mutation that encodes an inactive tyrosinase, such as any of the mutations described above or known in the art that is associated with OCAI and/or OCA1B. An encoded tyrosinase enzyme, such as any provided herein, can include variants that are known in the art that result in enzymes that exhibit tyrosinase activity, such as allelic variants or polymorphisms that exist between and among various human subjects or other variants known to one of skill in the art, including but not limited to, F134C, K142N, M179I, R308T or L495P corresponding to residues set forth in SEQ ID NO:81. In particular, nucleic acid molecules provided herein can encode a tyrosinase enzyme that contains one or more conservative amino acid replacements compared to the tyrosinase set forth in SEQ ID NO:81 or 82.

[0296] Also provided herein are nucleic acid molecules encoding a non-human tyrosinase enzyme or a variant thereof or an enzymatically active portion thereof that exhibits tyrosinase enzyme activity. The sequence identity between and among species variants of tyrosinase is highly conserved. For example, the human and mouse tyrosinase protein possess 85% sequence identity.

[0297] In mice, the gene encoding tyrosinase maps to the mouse c-locus, which is the locus associated with the albino phenotype. Several isoforms of tyrosinase are expressed in mice as a result of alternative splicing, but only the major transcript confers tyrosinase enzyme activity (Ruppert et al. (1988) The EMBO Journal, 7:2715-2722; Muller et al. (1988) The EMBO Journal, 7:2723-2730). The major transcript (mTYR1) is encoded by a sequence of nucleotides set forth in SEQ ID NO: 6 or 83 (see e.g., accession number AAA40516.1) and encodes a mouse tyrosinase that contains 533 amino acids as set forth in SEQ ID NO:7 (see e.g., Accession No. NP_{—}035791). Mature mouse tyrosinase lacks the 18 amino acid signal sequence and has the sequence of amino acids set forth in SEQ ID NO:84. With reference to SEQ ID NO:7, the enzymatically active N-terminal lumenal ectodomain corresponds to amino acids 19-476, the transmembrane domain corresponds to amino acids 477-497 and the C-terminal cytoplasmic domain corresponds to amino acids 498-533 of SEQ ID NO:7. Mouse tyrosinase contains seven glycosylation sites that correspond to amino acid residues 86, 111, 161, 230, 337 and 371 of SEQ ID NO:7. The CuA binding site corresponds to residues 180, 202 and 211 and the CuB binding site corresponds to residues 363, 367 and 390 of SEQ ID NO:7. Exemplary mutations associated with loss or partial activity of tyrosinase, as evidenced in mice with an albino phenotype, are C103S, H420R or A482T with reference to SEQ ID NO:7.

[0298] Tyrosinases also include, but are not limited to, tyrosinase from gorilla (SEQ ID NO:85, DNA set forth in SEQ ID NO:86), chimpanzee (SEQ ID NO:87, DNA set forth in SEQ ID NO:88), orangutan (SEQ ID NO:89, DNA set forth in SEQ ID NO:90), gibbon (SEQ ID NO:91, DNA set forth in SEQ ID NO:92), cynomolgus monkey (SEQ ID NO:93, DNA set forth in SEQ ID NO:94), Rhesus macaque (SEQ ID NO:95, DNA set forth in SEQ ID NO:96), elephant (SEQ ID NO:97, DNA set forth in SEQ ID NO:98), rabbit (SEQ ID NO:99, DNA set forth in SEQ ID NO:100), naked mole rat (SEQ ID NO:101, DNA set forth in SEQ ID NO:102), pig (SEQ ID NO:103, DNA set forth in SEQ ID NO:104), cat (SEQ ID NO:105, DNA set forth in SEQ ID NO:106), sheep (SEQ ID NO:107, DNA set forth in SEQ ID NO:108), dog (SEQ ID NO:109, DNA set forth in SEQ ID NO:110), goat (SEQ ID NO:111, DNA set forth in SEQ ID NO:112), bovine (SEQ ID NO:113, DNA set forth in SEQ ID NO:114), rat (SEQ ID NO:115, DNA set forth in SEQ ID NO: 116) and guinea pig (SEQ ID NO:117, DNA set forth in SEQ ID NO:118). Each of the above encoded tyrosinase species variants, or mature form thereof lacking the signal sequence (amino acids 1-18 therein), exhibit at least 85% sequence identity to human tyrosinase set forth in SEQ ID NO: 81 or the mature form thereof set forth in SEQ ID NO:82, respectively.

[0299] Residues associated with glycosylation, cysteine residues involved in disulfide bond formation, copper-binding site residues and other residues known to be associated or required for tyrosinase activity, such as any described herein for human and mouse tyrosinase, are highly conserved between and among species. For example, with reference to dog tyrosinase set forth in SEQ ID NO:109, the enzymatically active N-terminal lumenal ectodomain corresponds to amino acids 19-473, the transmembrane domain corresponds to amino acids 474-494 and the C-terminal cytoplasmic domain corresponds to amino acids 495-530 of SEQ ID NO:109. Dog tyrosinase contains six glycosylation sites that correspond to amino acid residues 86, 111, 161, 230, 337 and 371 of SEQ ID NO:109. The CuA binding site corresponds to residues 180, 202 and 211 and the CuB binding site corresponds to residues 363, 367 and 390 of SEQ ID NO:109. Based on exemplification herein, one of skill in the art knows or can identify residues required for tyrosinase activity, and thereby generate variants of any of the above tyrosinase enzymes or portions thereof that are enzymatically active.

[0300] Hence, also provided herein, for the methods and methods of use herein, are nucleic acid molecules encoding a tyrosinase enzyme set forth in any of SEQ ID NOS: 7, 81, 82, 84, 85, 87, 89, 91, 93, 95, 97, 99, 101, 103, 105, 107, 109, 111, 113, 115, or 117, or a mature form thereof lacking the signal sequence (amino acids 1-18) or a variant thereof or an enzymatically active portion thereof that has tyrosinase enzyme activity that exhibits at least 75%, 80%, 81%, 82%, 83%, 84%, 85%, 86%, 87%, 88%, 89%, 90%, 91%, 92%, 93%, 94%, 95%, 96%, 97%, 98%, 99% or more sequence identity to any of SEQ ID NOS: 7, 81, 82, 84, 85, 87, 89, 91, 93, 95, 97, 99, 101, 103, 105, 107, 109, 111, 113, 115, or 117 or the mature form thereof lacking the signal sequence. For example, provided herein is a nucleic acid molecule encoding a mature mouse tyrosinase (mTyr) set forth in SEQ ID NO:84, or a variant thereof or an enzymatically active portion thereof that has tyrosinase activity and that exhibits at least 75%, 80%, 81%, 82%, 83%, 84%, 85%, 86%, 87%, 88%, 89%, 90%, 91%, 92%, 93%, 94%, 95%, 96%, 97%, 98%, 99% or more sequence identity to SEQ ID NO:84. Included among such nucleic acid molecules provided herein are nucleic acid molecules that contain the sequence of nucleotides set forth in any of SEQ ID NOS: 6, 83, 86, 88, 90, 92, 94, 96, 98, 100, 102, 104, 106, 108, 110, 112, 114, 116 or 118 or a variant thereof or portion thereof that exhibits at least 70% sequence identity to any of SEQ ID NOS: 6, 83, 86, 88, 90, 92, 94, 96, 98, 100, 102, 104, 106, 108, 110, 112, 114, 116 or 118 and encodes an enzyme or portion thereof that exhibits tyrosinase activity. For example, the variant or portion thereof exhibits at least 75%, 80%, 81%, 82%, 83%, 84%, 85%, 86%, 87%, 88%, 89%, 90%, 91%, 92%, 93%, 94%, 95%, 96%, 97%, 98%, 99% or more sequence identity to any of SEQ ID NOS: 6, 83, 86, 88, 90, 92, 94, 96, 98, 100, 102, 104, 106, 108, 110, 112, 114, 116 or 118. One of skill in the art understands that a variant or truncated fragment of a nucleic acid molecule that encodes a tyrosinase enzyme that exhibits tyrosinase activity is one that does not exhibit a mutation or change that results in the loss of tyrosinase activity. Hence, the encoded tyrosinase enzyme typically contains the residues that are associated with copper binding, glycosylation and disulfide bond formation and do not contain amino acid mutations that render the enzyme inactive.

[0301] b. Tyrosinase-Related Protein-1

[0302] Provided herein are nucleic acid molecules that encode a tyrosinase-related Protein-1 (TRP-1 or Tyrp 1; also known as 5,6-dihydroxyindole-2-carboxylic acid oxidase or gp75), a variant TRP-1 or an enzymatically active portion thereof that exhibits enzyme activity. Typically, nucleic acid molecules provide herein that encode a TRP-1 enzyme or enzymatically active portion thereof also encode a tyrosinase enzyme or enzymatically active portion thereof.

[0303] TRP-1 is an enzyme that exhibits structural and functional similarity to tyrosinase. For example, it exhibits about 40% amino acid sequence identity to tyrosinase. TRP-1 originated by duplication of the ancestral tyrosinase gene. Like tyrosinase, TRP-1 is a transmembrane glycoprotein that is present in melanosomes where it spans the melanosomal membrane. TRP-1 contains a cytoplasmic and a transmembrane domain, a glycosylated lumenal domain and two metal-binding regions. The enzyme contains conserved glycosylation sites, cysteine-rich regions and two metal-binding regions involved in the structure of the catalytic site. TRP-1 is processed in the ER to remove the signal sequence, is post-translationally modified in the ER and Golgi and is delivered to melanosomes where it is present as a transmembrane protein. TRP-1 has been shown to bind to copper (Olivares et al. (2009) Pigment Cell Melanoma Res., 22:750-760). The enzyme exhibits various enzymatic activities including, for example, activity as a Dopachrome tautomerase, tyrosine hydroxylase, DOPA oxidase, catalase and/or 5,6-dihydroxy-indole-2-carboxylic acid (DHICA) oxidase. In addition to playing a role in melanin biosynthesis (discussed below), TRP-1 also is involved in melanosomal biogenesis and the structural integrity of melanosomes.

[0304] With respect to melanin biosynthesis, TRP-1 is involved in the distal reactions of melanogenesis that control the quality of the melanin polymer (Negroiu et al. (1999) Biochem. J., 344:659-665). As noted above, tyrosinase is required for the generation of dopaquinone, which is the rate-limiting step of melanin synthesis. TRP-1, however, is involved in the regulation of eumelanogenesis by catalyzing the oxidative polymerization of DHICA (Wakamatsu et al. (2002) Pigment Cell Res., 15:174-183). It has been shown that the presence of TRP-1 in cells increases the ratio of eumelanin to pheomelanin (Kobayashi et al. (1995) J. Cell Science, 108:2301-2309). This is exemplified in the Examples herein, which shows that co-transformation of the TRP-1-expressing plasmid resulted in production of a darker (eu-)melanin.

[0305] In humans, the tyrp1 (encoding TRP-1) locus is located on chromosome 9 and in mice is located on chromosome 4. Human TRP-1 is encoded by a sequence of nucleotides set forth in SEQ ID NO: 19 or 119 (see e.g., CAA35785.1). The encoded precursor human TRP-1 contains 537 amino acids and is set forth in SEQ ID NO:20. Mature TRP-1 lacks the 24 amino acid signal sequence and has the sequence of amino acids set forth in SEQ ID NO:120. With reference to SEQ ID NO:20, the enzymatically active N-terminal lumenal ectodomain corresponds to amino acids 25-477, the transmembrane domain corresponds to amino acids 478-501 and the C-terminal cytoplasmic domain corresponds to amino acids 502-537. Human TRP-1 contains six glycosylation sites that correspond to amino acid residues 96, 104, 181, 304, 350 and 385 as set forth in mature tyrosinase set forth in SEQ ID NO:20. The metal-binding site is coordinated by three (3) histidine residues and is required for activity. Specifically, in human TRP-1, the Metal A (MeA) binding site corresponds to residues 192, 215 and 224 of SEQ ID NO:20 and the MeB binding site corresponds to residues 377, 381 and 404. An alternative splicing isoform of TRP-1 exists, but it is an enzymatically inactive protein.

[0306] Defects in TRP1 are the cause of albinism oculocutaneous type 3 (OCA3) and other pigmentation defects. Specifically, because this enzyme plays a role in normal pigmentation, its loss leads to the changes in skin, hair, and eye coloration that are characteristic of oculocutaneous albinism. Exemplary mutations that result in an inactive enzyme and are associated with albinism phenotypes include, but are not limited to L36X, R93C, nonsense mutation S166X (introduction of a premature stop codon at position 166), H215Y, T253M, R356Q, 368del, R373X, M451V. Other mutations are known to those of skill in the art. (see e.g., the Albinism database, albinismdb.med.umn.edu/oca3mut.html).

[0307] Provided herein, for the methods of use and methods herein, are nucleic acid molecules encoding a human TRP-1 enzyme or a variant thereof or an enzymatically active portion thereof that exhibits TRP-1 enzyme activity. In particular, provided herein, for the methods of use and methods herein, is a nucleic acid molecule encoding the precursor tyrosinase enzyme set forth in SEQ ID NO:20 or the mature TRP-1 enzyme set forth in SEQ ID NO:120, or a variant or enzymatically active portion thereof that encodes a TRP-1 enzyme having TRP-1 enzyme activity and that exhibits at least 70% sequence identity to SEQ ID NO:20 or 120. For example, the encoded variant or enzymatically active portion thereof exhibits at least 75%, 80%, 81%, 82%, 83%, 84%, 85%, 86%, 87%, 88%, 89%, 90%, 91%, 92%, 93%, 94%, 95%, 96%, 97%, 98%, 99% or more sequence identity to SEQ ID NO:20 or 120. Included among such nucleic acid molecules provided herein is a nucleic acid molecule that contains the sequence of nucleotides set forth in SEQ ID NO:19 or 119 or a variant thereof or portion thereof that exhibits at least 70% sequence identity to SEQ ID NO:19 or 119 and encodes an enzyme or portion thereof that exhibits tyrosinase activity. For example, the variant or portion thereof exhibits at least 75%, 80%, 81%, 82%, 83%, 84%, 85%, 86%, 87%, 88%, 89%, 90%, 91%, 92%, 93%, 94%, 95%, 96%, 97%, 98%, 99% or more sequence identity to SEQ ID NO:19 or 119.

[0308] One of skill in the art understands that a variant or truncated fragment of a nucleic acid molecule that encodes a TRP-1 enzyme that exhibits TRP-1 enzyme activity is one that does not exhibit a mutation or change that results in the loss of activity. Hence, the encoded TRP-1 enzyme typically contains the residues that are associated with copper binding, glycosylation and/or make up cysteine clusters. In addition, the encoded TRP-1 enzyme does not contain a mutation that encodes an inactive enzyme, such as any of the mutations described above or known in the art that is associated with OCA3 or other albinism-associated disease or condition. An encoded TRP-1 enzyme, such as any provided herein, can include variants that are known in the art that result in enzymes that exhibit TRP-1 activity, such as allelic variants or polymorphisms that exist between and among various human subjects or other variants known to one of skill in the art, including but not limited to, D308M, R326H, E413K, G458A, R505C, Y519X, Q530R corresponding to residues set forth in SEQ ID NO:20. In particular, nucleic acid molecules provided herein can encode a TRP-1 enzyme that contains one or more conservative amino acid replacements compared to the TRP-1 set forth in SEQ ID NO:20 or 120.

[0309] Also provided herein are nucleic acid molecules encoding a non-human TRP-1 enzyme or a variant thereof or an enzymatically active portion thereof that exhibits TRP-1 enzyme activity. The sequence identity between and among species variants of TRP-1 is highly conserved, as are the residues required for activity. Mouse TRP-1 is encoded by a sequence of nucleotides set forth in SEQ ID NO: 145 and encodes a mouse TRP-1 that contains 537 amino acids as set forth in SEQ ID NO:144. Mature mouse tyrosinase lacks the 24 amino acid signal sequence and has the sequence of amino acids 25-537 set forth in SEQ ID NO:144. With reference to SEQ ID NO:144, the enzymatically active N-terminal lumenal ectodomain corresponds to amino acids 25-477, the transmembrane domain corresponds to amino acids 478-501 and the C-terminal cytoplasmic domain corresponds to amino acids 502-537 of SEQ ID NO:144. Mouse TRP-1 contains glycosylation sites that correspond to amino acid residues 96, 104, 181, 304, 350 and 385 of SEQ ID NO:144. The MeA binding site corresponds to residues 192, 215 and 224 and the MeB binding site corresponds to residues 377, 381 and 404 of SEQ ID NO:144.

[0310] Also included among the TRP-1 enzymes are enzymes that include, but are not limited to TRP-1 from chimpanzee (SEQ ID NO:121; DNA set forth in SEQ ID NO:122), gorilla (SEQ ID NO:123), gibbon (SEQ ID NO:124; DNA set forth in SEQ ID NO:125), orangutan (SEQ ID NO:126), cynomolgus monkey (SEQ ID NO:127, DNA set forth in SEQ ID NO:128), Rhesus macaque (SEQ ID NO:129, DNA set forth in SEQ ID NO:130), rabbit (SEQ ID NO:131, DNA set forth in SEQ ID NO:132), pig (SEQ ID NO:133, DNA set forth in SEQ ID NO:134), elephant (SEQ ID NO:135, DNA set forth in SEQ ID NO:136), dog (SEQ ID NO:137, DNA set forth in SEQ ID NO:138), goat (SEQ ID NO:139, DNA set forth in SEQ ID NO:140), bovine (SEQ ID NO:141) and sheep (SEQ ID NO:142, DNA set forth in SEQ ID NO:143). Each of the above encoded TRP-1 species variants, or mature form thereof lacking the signal sequence (amino acids 1-24 therein), exhibit at least 80% sequence identity to human TRP-1 set forth in SEQ ID NO: 20 or the mature form thereof set forth in SEQ ID NO:120, respectively.

[0311] Hence, also provided herein, for the methods and methods of use herein, are nucleic acid molecules encoding a TRP-1 enzyme set forth in any of SEQ ID NOS: 121, 123, 124, 126, 127, 129, 131, 133, 135, 137, 139, 141, 142 or 144, or a mature form thereof lacking the signal sequence (amino acids 1-24) or a variant thereof or an enzymatically active portion thereof that has TRP-1 enzyme activity that exhibits at least 75%, 80%, 81%, 82%, 83%, 84%, 85%, 86%, 87%, 88%, 89%, 90%, 91%, 92%, 93%, 94%, 95%, 96%, 97%, 98%, 99% or more sequence identity to any of SEQ ID NOS: 121, 123, 124, 126, 127, 129, 131, 133, 135, 137, 139, 141, 142 or 144 or the mature form thereof lacking the signal sequence. Included among such nucleic acid molecules provided herein are nucleic acid molecules that contains the sequence of nucleotides set forth in any of SEQ ID NOS: 122, 125, 128, 130, 132, 134, 136, 138, 140, 143 or 145 or a variant thereof or portion thereof that exhibits at least 70% sequence identity to any of SEQ ID NOS: 122, 125, 128, 130, 132, 134, 136, 138, 140, 143 or 145 and encodes an enzyme or portion thereof that exhibits TRP-1 enzyme activity. For example, the variant or portion thereof exhibits at least 75%, 80%, 81%, 82%, 83%, 84%, 85%, 86%, 87%, 88%, 89%, 90%, 91%, 92%, 93%, 94%, 95%, 96%, 97%, 98%, 99% or more sequence identity to any of SEQ ID NOS: 122, 125, 128, 130, 132, 134, 136, 138, 140, 143 or 145. One of skill in the art understands that a variant or truncated fragment of a nucleic acid molecule that encodes a TRP-1 enzyme that exhibits TRP-1 enzyme activity is one that does not exhibit a mutation or change that results in the loss of activity. Hence, the encoded TRP-1 enzyme typically contains the residues that are associated with copper binding, glycosylation and/or cysteine clusters and do not contain amino acid mutations that render the enzyme inactive.

[0312] In particular examples, the nucleic acid provided herein, for the methods and methods of use herein, contain a sequence of nucleotides that encode a TRP-1 enzyme or enzymatically active portion thereof and a sequence of nucleotides that encodes a tyrosinase enzyme or enzymatically active portion thereof. For example, provided herein are nucleic acid molecules containing: a sequence of nucleotides encoding a TRP-1 enzyme set forth in any of SEQ ID NOS: 20, 120, 121, 123, 124, 126, 127, 129, 131, 133, 135, 137, 139, 141, 142 or 144, or a mature form thereof lacking the signal sequence (amino acids 1-24) or a variant thereof or an enzymatically active portion thereof that has TRP-1 enzyme activity that exhibits at least 75% or more sequence identity to any of SEQ ID NOS: 20, 120, 121, 123, 124, 126, 127, 129, 131, 133, 135, 137, 139, 141, 142 or 144 or the mature form thereof lacking the signal sequence; and a sequence of nucleotides encoding a tyrosinase enzyme set forth in any of SEQ ID NOS: 7, 81, 82, 84, 85, 87, 89, 91, 93, 95, 97, 99, 101, 103, 105, 107, 109, 111, 113, 115, or 117, or a mature form thereof lacking the signal sequence (amino acids 1-18) or a variant thereof or an enzymatically active portion thereof that has tyrosinase enzyme activity that exhibits at least 75% sequence identity to any of SEQ ID NOS: 7, 81, 82, 84, 85, 87, 89, 91, 93, 95, 97, 99, 101, 103, 105, 107, 109, 111, 113, 115, or 117. The variant or enzymatically active portion can exhibit at least 80%, 81%, 82%, 83%, 84%, 85%, 86%, 87%, 88%, 89%, 90%, 91%, 92%, 93%, 94%, 95%, 96%, 97%, 98%, 99% or more sequence identity to any of the above-recited sequence of amino acids. Included among such nucleic acid molecules provided herein-are nucleic acid molecules that contain: the sequence of nucleotides set forth in any of SEQ ID NOS: 19, 119, 122, 125, 128, 130, 132, 134, 136, 138, 140, 143 or 145 or a variant thereof or portion thereof that exhibits at least 70% sequence identity to any of SEQ ID NOS: 19, 119, 122, 125, 128, 130, 132, 134, 136, 138, 140, 143 or 145 and encodes an enzyme or portion thereof that exhibits TRP-1 enzyme activity; and the sequence of nucleotides set forth in any of SEQ ID NOS: 6, 80, 83, 86, 88, 90, 92, 94, 96, 98, 100, 102, 104, 106, 108, 110, 112, 114, 116 or 118 or a variant thereof or portion thereof that exhibits at least 70% sequence identity to any of SEQ ID NOS: 6, 80, 83, 86, 88, 90, 92, 94, 96, 98, 100, 102, 104, 106, 108, 110, 112, 114, 116 or 118 and encodes an enzyme or portion thereof that exhibits tyrosinase activity. For example, the variant or portion thereof exhibits at least 75%, 80%, 81%, 82%, 83%, 84%, 85%, 86%, 87%, 88%, 89%, 90%, 91%, 92%, 93%, 94%, 95%, 96%, 97%, 98%, 99% or more sequence identity to any of the above-recited SEQ ID NOS.

[0313] c. Dopachrome Tautomerase

[0314] Provided herein, for the methods and methods of use herein, are nucleic acid molecules that encode a dopachrome tautomerase (DCT, also called Tryp2 or TRP-2, L-dopachrome tautomerase), a variant DCT or an enzymatically active portion thereof that exhibits enzyme activity. Typically, nucleic acid molecules provided herein, in the methods and methods of use herein, that encode a DCT enzyme or enzymatically active portion thereof also encode a tyrosinase enzyme or enzymatically active portion thereof.

[0315] DCT is an enzyme that exhibits structural and functional similarity to tyrosinase. For example, it exhibits about 40% amino acid sequence identity to tyrosinase. Like tyrosinase and TRP-1, DCT is a transmembrane glycoprotein that is present in melanosomes where it spans the melanosomal membrane. DCT contains a cytoplasmic and a transmembrane domain, a glycosylated lumenal domain and two metal-binding regions. The enzyme contains conserved glycosylation sites, cysteine-rich regions and two metal-binding regions involved in the structure of the catalytic site. The catalytic function of DCT is dependent on binding to a zinc metal cofactor. DCT exhibits dopachrome tautomerase activity DHI-2-carboxylic acid (DHICA) from Dopachrome rather than the spontaneously decarboxylated product DHI. With respect to melanin biosynthesis, DCT is another enzyme that is involved in the regulation of eumelanogenesis. Specifically, DCT has been shown to catalyze the tautomerization of dopachrome to DHICA. Like, TRP-1, DCT can affect the quantity of eumelanin produced in cells (Wakamatsu et al. (2002) Pigment Cell Res., 15:174-183).

[0316] In humans, the DCT gene is located on chromosome 13 and in mice is located on chromosome 14. Human DCT is encoded by a sequence of nucleotides set forth in SEQ ID NO:29. The encoded precursor human DCT contains 519 amino acids and is set forth in SEQ ID NO:30. Mature DCT lacks the 23 amino acid signal sequence and has the sequence of amino acids set forth in SEQ ID NO:146. With reference to SEQ ID NO:30, the enzymatically active N-terminal lumenal ectodomain corresponds to amino acids 24-472, the transmembrane domain corresponds to amino acids 473-493 and the C-terminal cytoplasmic domain corresponds to amino acids 494-519 of SEQ ID NO:30. Human DCT contains six glycosylation sites that correspond to amino acid residues 170, 178, 237, 300, 342 and 377 as set forth in mature tyrosinase set forth in SEQ ID NO:30. The metal-binding site is coordinated by three (3) histidine residues and is required for activity. Specifically, in human DCT, the Metal A (MeA) binding site corresponds to residues 189, 211, 220 of SEQ ID NO:30 and the MeB binding site corresponds to residues 369, 373 and 396. Several alternative splicing isoforms of DCT have been identified, but the other isoforms are soluble or enzymatically inactive proteins lacking the transmembrane domain.

[0317] Provided herein, for the methods and methods of use herein, are nucleic acid molecules encoding a human DCT enzyme or a variant thereof or an enzymatically active portion thereof that exhibits DCT enzyme activity. In particular, provided herein, for the methods and methods of use herein, is a nucleic acid molecule encoding the precursor tyrosinase enzyme set forth in SEQ ID NO:30 or the mature DCT enzyme set forth in SEQ ID NO:146, or a variant or enzymatically active portion thereof that encodes a DCT enzyme having DCT enzyme activity that exhibits at least 70% sequence identity to SEQ ID NO:30 or 146. For example, the encoded variant or enzymatically active portion thereof exhibits at least 75%, 80%, 81%, 82%, 83%, 84%, 85%, 86%, 87%, 88%, 89%, 90%, 91%, 92%, 93%, 94%, 95%, 96%, 97%, 98%, 99% or more sequence identity to SEQ ID NO:30 or 146. Included among such nucleic acid molecules provided herein is a nucleic acid molecule that contains the sequence of nucleotides set forth in SEQ ID NO:29 or a variant thereof or portion thereof that exhibits at least 70% sequence identity to SEQ ID NO:29 and encodes an enzyme or portion thereof that exhibits tyrosinase activity. For example, the variant or portion thereof exhibits at least 75%, 80%, 81%, 82%, 83%, 84%, 85%, 86%, 87%, 88%, 89%, 90%, 91%, 92%, 93%, 94%, 95%, 96%, 97%, 98%, 99% or more sequence identity to SEQ ID NO:29.

[0318] One of skill in the art understands that a variant or truncated fragment of a nucleic acid molecule that encodes a DCT enzyme that exhibits DCT enzyme activity is one that does not exhibit a mutation or change that results in the loss of activity. Hence, the encoded DCT enzyme typically contains the residues that are associated with zinc binding, glycosylation and/or make up cysteine clusters. In addition, the encoded DCT enzyme does not contain a mutation that encodes an inactive enzyme. An encoded DCT enzyme, such as any provided herein, can include variants that are known in the art that result in enzymes that exhibit DCT activity, such as allelic variants or polymorphisms that exist between and among various human subjects or other variants known to one of skill in the art. In particular, nucleic acid molecules provided herein can encode a DCT enzyme that contains one or more conservative amino acid replacements compared to the DCT set forth in SEQ ID NO:30 or 146.

[0319] Also provided herein, for the methods and methods of use herein, are nucleic acid molecules encoding a non-human DCT enzyme or a variant thereof or an enzymatically active portion thereof that exhibits DCT enzyme activity. The sequence identity between and among species variants of DCT is highly conserved, as are the residues required for activity. Mouse DCT is encoded by a sequence of nucleotides set forth in SEQ ID NO: 167 and encodes a mouse DCT that contains 517 amino acids as set forth in SEQ ID NO:166. Mature mouse DCT lacks the 23 amino acid signal sequence and has the sequence of amino acids 24-517 set forth in SEQ ID NO:166. With reference to SEQ ID NO:166, the enzymatically active N-terminal lumenal ectodomain corresponds to amino acids 24-472, the transmembrane domain corresponds to amino acids 473-491 and the C-terminal cytoplasmic domain corresponds to amino acids 492-517 of SEQ ID NO:166. Mouse DCT contains glycosylation sites that correspond to amino acid residues 92, 170, 178, 237, 300, 342 and 377 of SEQ ID NO:166. The zinc MeA binding site corresponds to residues 189, 211 and 220 and the zinc MeB binding site corresponds to residues 369, 373 and 396 of SEQ ID NO:166.

[0320] Also included among the DCT enzymes are enzymes that include, but are not limited to DCT from gorilla (SEQ ID NO:147), orangutan (SEQ ID NO:148, DNA set forth in SEQ ID NO:149), cynomolgus monkey (SEQ ID NO:150, DNA set forth in SEQ ID NO:151), Rhesus macaque (SEQ ID NO:152, DNA set forth in SEQ ID NO:153), white-tufted-ear marmoset (SEQ ID NO:154, DNA set forth in SEQ ID NO:155), horse (SEQ ID NO:156, DNA set forth in SEQ ID NO:157), pig (SEQ ID NO:158, DNA set forth in SEQ ID NO:159), panda (SEQ ID NO:160, DNA set forth in SEQ ID NO:161), rabbit (SEQ ID NO:162, DNA set forth in SEQ ID NO:163) and sheep (SEQ ID NO:164, DNA set forth in SEQ ID NO:165). Each of the above encoded DCT species variants, or mature form thereof lacking the signal sequence (amino acids 1-23 therein), exhibit at least 80% sequence identity to human DCT set forth in SEQ ID NO: 30 or the mature form thereof set forth in SEQ ID NO:146, respectively.

[0321] Hence, also provided herein, for the methods and methods of use herein, are nucleic acid molecules encoding a DCT enzyme set forth in any of SEQ ID NOS: 147, 148, 150, 152, 154, 156, 158, 160, 162, 164 or 166, or a mature form thereof lacking the signal sequence (amino acids 1-23) or a variant thereof or an enzymatically active portion thereof that has DCT enzyme activity that exhibits at least 75%, 80%, 81%, 82%, 83%, 84%, 85%, 86%, 87%, 88%, 89%, 90%, 91%, 92%, 93%, 94%, 95%, 96%, 97%, 98%, 99% or more sequence identity to any of SEQ ID NOS: 147, 148, 150, 152, 154, 156, 158, 160, 162, 164 or 166 or the mature form thereof lacking the signal sequence. Included among such nucleic acid molecules provided herein, for the methods and methods of use herein, are nucleic acid molecules that contains the sequence of nucleotides set forth in any of SEQ ID NOS: 149, 151, 153, 155, 157, 159, 161, 163, 165 or 167 or a variant thereof or portion thereof that exhibits at least 70% sequence identity to any of SEQ ID NOS: 149, 151, 153, 155, 157, 159, 161, 163, 165 or 167 and encodes an enzyme or portion thereof that exhibits DCT enzyme activity. For example, the variant or portion thereof exhibits at least 75%, 80%, 81%, 82%, 83%, 84%, 85%, 86%, 87%, 88%, 89%, 90%, 91%, 92%, 93%, 94%, 95%, 96%, 97%, 98%, 99% or more sequence identity to any of SEQ ID NOS: 149, 151, 153, 155, 157, 159, 161, 163, 165 or 167. One of skill in the art understands that a variant or truncated fragment of a nucleic acid molecule that encodes a DCT enzyme that exhibits DCT enzyme activity is one that does not exhibit a mutation or change that results in the loss of activity. Hence, the encoded DCT enzyme typically contains the residues that are associated with zinc binding, glycosylation and/or cysteine clusters and do not contain amino acid mutations that render the enzyme inactive.

[0322] In particular examples, the nucleic acid provided herein, for the methods and methods of use herein, contain a sequence of nucleotides that encode a DCT enzyme or enzymatically active portion thereof and a sequence of nucleotides that encodes a tyrosinase enzyme or enzymatically active portion thereof. For example, provided herein are nucleic acid molecules containing: a sequence of nucleotides encoding a DCT enzyme set forth in any of SEQ ID NOS: 30, 146, 147, 148, 150, 152, 154, 156, 158, 160, 162, 164 or 166, or a mature form thereof lacking the signal sequence (amino acids 1-23) or a variant thereof or an enzymatically active portion thereof that has DCT enzyme activity that exhibits at least 75% or more sequence identity to any of SEQ ID NOS: 30, 146, 147, 148, 150, 152, 154, 156, 158, 160, 162, 164 or 166 or the mature form thereof lacking the signal sequence; and a sequence of nucleotides encoding a tyrosinase enzyme set forth in any of SEQ ID NOS: 7, 81, 82, 84, 85, 87, 89, 91, 93, 95, 97, 99, 101, 103, 105, 107, 109, 111, 113, 115, or 117, or a mature form thereof lacking the signal sequence (amino acids 1-18) or a variant thereof or an enzymatically active portion thereof that has tyrosinase enzyme activity that exhibits at least 75% sequence identity to any of SEQ ID NOS: 7, 81, 82, 84, 85, 87, 89, 91, 93, 95, 97, 99, 101, 103, 105, 107, 109, 111, 113, 115, or 117. The variant or enzymatically active portion can exhibit at least 80%, 81%, 82%, 83%, 84%, 85%, 86%, 87%, 88%, 89%, 90%, 91%, 92%, 93%, 94%, 95%, 96%, 97%, 98%, 99% or more sequence identity to any of the above-recited sequence of amino acids. Included among such nucleic acid molecules provided herein are nucleic acid molecules that contain: the sequence of nucleotides set forth in any of SEQ ID NOS: 29, 149, 151, 153, 155, 157, 159, 161, 163, 165 or 167 or a variant thereof or portion thereof that exhibits at least 70% sequence identity to any of SEQ ID NOS: 29, 149, 151, 153, 155, 157, 159, 161, 163, 165 or 167 and encodes an enzyme or portion thereof that exhibits DCT enzyme activity; and the sequence of nucleotides set forth in any of SEQ ID NOS: 6, 80, 83, 86, 88, 90, 92, 94, 96, 98, 100, 102, 104, 106, 108, 110, 112, 114, 116 or 118 or a variant thereof or portion thereof that exhibits at least 70% sequence identity to any of SEQ ID NOS: 6, 80, 83, 86, 88, 90, 92, 94, 96, 98, 100, 102, 104, 106, 108, 110, 112, 114, 116 or 118 and encodes an enzyme or portion thereof that exhibits tyrosinase activity. For example, the variant or portion thereof exhibits at least 75%, 80%, 81%, 82%, 83%, 84%, 85%, 86%, 87%, 88%, 89%, 90%, 91%, 92%, 93%, 94%, 95%, 96%, 97%, 98%, 99% or more sequence identity to any of the above-recited SEQ ID NOS.

[0323] In particular examples, the nucleic acid provided herein, for the methods and methods of use herein, contain a sequence of nucleotides that encodes a TRP-1 enzyme or enzymatically active portion thereof, a DCT enzyme or enzymatically active portion thereof, and a sequence of nucleotides that encodes a tyrosinase enzyme or enzymatically active portion thereof. For example, provided herein are nucleic acid molecules containing: a sequence of nucleotides encoding a TRP-1 enzyme set forth in any of SEQ ID NOS: 20, 120, 121, 123, 124, 126, 127, 129, 131, 133, 135, 137, 139, 141, 142 or 144, or a mature form thereof lacking the signal sequence (amino acids 1-24) or a variant thereof or an enzymatically active portion thereof that has TRP-1 enzyme activity that exhibits at least 75% or more sequence identity to any of SEQ ID NOS: 20, 120, 121, 123, 124, 126, 127, 129, 131, 133, 135, 137, 139, 141, 142 or 144 or the mature form thereof lacking the signal sequence; a DCT enzyme set forth in any of SEQ ID NOS: 30, 146, 147, 148, 150, 152, 154, 156, 158, 160, 162, 164 or 166, or a mature form thereof lacking the signal sequence (amino acids 1-23) or a variant thereof or an enzymatically active portion thereof that has DCT enzyme activity that exhibits at least 75% or more sequence identity to any of SEQ ID NOS: 30, 146, 147, 148, 150, 152, 154, 156, 158, 160, 162, 164 or 166 or the mature form thereof lacking the signal sequence; and a sequence of nucleotides encoding a tyrosinase enzyme set forth in any of SEQ ID NOS: 7, 81, 82, 84, 85, 87, 89, 91, 93, 95, 97, 99, 101, 103, 105, 107, 109, 111, 113, 115, or 117, or a mature form thereof lacking the signal sequence (amino acids 1-18) or a variant thereof or an enzymatically active portion thereof that has tyrosinase enzyme activity that exhibits at least 75% sequence identity to any of SEQ ID NOS: 7, 81, 82, 84, 85, 87, 89, 91, 93, 95, 97, 99, 101, 103, 105, 107, 109, 111, 113, 115, or 117. The variant or enzymatically active portion can exhibit at least 80%, 81%, 82%, 83%, 84%, 85%, 86%, 87%, 88%, 89%, 90%, 91%, 92%, 93%, 94%, 95%, 96%, 97%, 98%, 99% or more sequence identity to any of the above-recited sequence of amino acids. Included among such nucleic acid molecules provided herein are nucleic acid molecules that contain: the sequence of nucleotides set forth in any of SEQ ID NOS: 19, 119, 122, 125, 128, 130, 132, 134, 136, 138, 140, 143 or 145 or a variant thereof or portion thereof that exhibits at least 70% sequence identity to any of SEQ ID NOS: 19, 119, 122, 125, 128, 130, 132, 134, 136, 138, 140, 143 or 145 and encodes an enzyme or portion thereof that exhibits TRP-1 enzyme activity; the sequence of nucleotides set forth in any of SEQ ID NOS: 29, 149, 151, 153, 155, 157, 159, 161, 163, 165 or 167 or a variant thereof or portion thereof that exhibits at least 70% sequence identity to any of SEQ ID NOS: 29, 149, 151, 153, 155, 157, 159, 161, 163, 165 or 167 and encodes an enzyme or portion thereof that exhibits DCT enzyme activity; and the sequence of nucleotides set forth in any of SEQ ID NOS: 6, 80, 83, 86, 88, 90, 92, 94, 96, 98, 100, 102, 104, 106, 108, 110, 112, 114, 116 or 118 or a variant thereof or portion thereof that exhibits at least 70% sequence identity to any of SEQ ID NOS: 6, 80, 83, 86, 88, 90, 92, 94, 96, 98, 100, 102, 104, 106, 108, 110, 112, 114, 116 or 118 and encodes an enzyme or portion thereof that exhibits tyrosinase activity. For example, the variant or portion thereof exhibits at least 75%, 80%, 81%, 82%, 83%, 84%, 85%, 86%, 87%, 88%, 89%, 90%, 91%, 92%, 93%, 94%, 95%, 96%, 97%, 98%, 99% or more sequence identity to any of the above-recited SEQ ID NOS.

[0324] 2. Nucleic Acid Molecule

[0325] a. Virus and Viral Vectors

[0326] The nucleic acid molecule containing nucleotides encoding a chromophore-producing enzyme or enzymes can be a virus or a viral vector. The virus or viral vector can contain nucleotides encoding any chromophore-producing enzyme or enzymes described in subsection 1 above, such as a melanin-producing enzyme or enzymes. For example, the virus or viral vector can contain nucleotides encoding any tyrosinase enzyme, enzymatically active portion thereof or variant thereof, such as any described in Section 1.a above. In some examples, the virus also can additionally contain nucleotides encoding a tyrosinase-related protein 1 (TRP-1) and/or a dopachrome tautomerase (DCT), or enzymatically active portions thereof or variants thereof, such as any described in Section 1.b and/or Section 1.c above.

[0327] Viruses are useful in delivering nucleic acid molecules in vivo because they are efficient at transferring viral DNA into host cells. They can infect and be taken up by specific target cells depending on the viral attachment proteins (e.g., capsid or glycoproteins), and they can be manipulated to remove non-essential genes and add heterologous nucleic acid molecules. Many viral vectors are known to those skilled in the art. Examples of viruses that can be used in the compositions and methods herein include, but are not limited to, adenoviruses, adeno-associated viruses, alphaviruses, baculoviruses, hepadnaviruses, baculoviruses, poxviruses, herpesviruses, retroviruses, lentiviruses, orthomyxoviruses, papovaviruses, paramyxoviruses, and parvoviruses. The choice of virus is within the level of one of skill in the art and is dependent on a number of factors, such as the desire for replication or integration of viral DNA, the tropism of the virus, and/or the immunogenicity of the virus. Such viruses and derivatives thereof, are well-known and available to one of skill in the art. For example, many are available from the American Type Culture Collection (ATCC, Rockville, Md.). In particular examples, the virus is an oncolytic virus that is capable of accumulating in tumor cells or other immunoprivileged cells or tissues. Exemplary oncolytic viruses for use in the compositions and methods herein are vaccinia viruses described in Section E.

[0328] The viral vectors used in the methods herein also can contain expression cassettes that include regulatory elements, such as promoters and enhancers, operably linked to a transgene of choice. As discussed above, any suitable promoter can be used. Suitable promoters and enhancers are widely available in the art for use in the viral vector of choice. Typically the promoter is a constitutive promoter. Exemplary promoters include, but are not limited to, a CMV promoter, a truncated CMV promoter, a human serum albumin promoter or an α-1-antitrypsin promoter. In some examples, the promoter is a truncated CMV promoter in which binding sites for known transcriptional repressors have been deleted. In other examples, the promoter is an inducible promoter. For example, the promoter can be the inducible ecdysone promoter. Other examples of promoters include steroid promoters, such as estrogen and androgen promoters, and metallothionein promoters. The enhancer can be a tissue specific or non-specific enhancer. Other regulatory sequences (e.g., promoters, enhancers or other regulatory sequence) to regulate expression of an open reading frame encoding the chromophore producing enzyme or enzymes can be any described below in Section E.2.b.

[0329] b. Non-Viral Vectors

[0330] The nucleic acid molecule containing nucleotides encoding a chromophore-producing enzyme or enzymes can be a non-viral vector. The non-viral vector can contain nucleotides encoding any chromophore-producing enzyme or enzymes described in subsection 1 above, such as a melanin-producing enzyme or enzymes. For example, the non-viral vector can contain nucleotides encoding any tyrosinase enzyme, enzymatically active portion thereof or variant thereof, such as any described in Section 1.a above. In some examples, the non-viral vector also can additionally contain nucleotides encoding a tyrosinase-related protein 1 (TRP-1) and/or a dopachrome tautomerase (DCT), or enzymatically active portions thereof or variants thereof, such as any described in Section 1.b and/or Section 1.c above.

[0331] Non-viral vectors include any DNA molecule as long as it does not include all of the requisite elements for viral replication, packaging and/or expression. These include non-viral expression vectors. Non-viral expression vectors contain a nucleic acid encoding chromophore-producing enzyme or enzymes, wherein the nucleic acids are operably linked to an expression control sequence (e.g., promoter). Suitable vector backbones include, for example, those routinely used in the art such as plasmids, minicircles, cosmids and artificial chromosomes (e.g., human artificial chromosomes, mammalian artificial chromosomes (MACs), bacterial artificial chromosomes (BACs), yeast artificial chromosomes (YACs), or plant artificial chromosomes (PACs)). Numerous vectors and expression systems are commercially available from such corporations as Novagen (Madison, Wis.), Clontech (Palo Alto, Calif.), Stratagene (La Jolla, Calif.), and Invitrogen/Life Technologies (Carlsbad, Calif.).

[0332] Vectors typically contain one or more regulatory regions, which are functionally inked to the encoding region. Regulatory regions include, without limitation, promoter sequences, enhancer sequences, SMARs (scaffold matrix attachment regions), insulators, response elements, protein recognition sites, inducible elements, protein binding sequences, 5′ and 3′ untranslated regions (UTRs), transcriptional start sites, termination sequences, polyadenylation sequences, and introns.

[0333] Promoters controlling transcription from vectors in mammalian host cells can be obtained from various sources, for example, the genomes of viruses such as polyoma, Simian Virus 40 (SV40), adenovirus, retroviruses, hepatitis B virus, and most generally cytomegalovirus (CMV), or from heterologous mammalian promoters, e.g., β-actin promoter or EF1α promoter, or from hybrid or chimeric promoters (e.g., CMV promoter fused to the β-actin promoter). Promoters from the host cell or related species are also useful herein. Exemplary promoters that can be used include any known in the art, such as any as described elsewhere herein.

[0334] Enhancer generally refers to a sequence of DNA that functions at no fixed distance from the transcription start site and can be either 5′ or 3′ to the transcription unit. Furthermore, enhancers can be within an intron as well as within the coding sequence itself. They are usually between 10 and 300 base pairs (bp) in length, and they function in cis. Enhancers usually function to increase transcription from nearby promoters. Enhancers can also contain response elements that mediate the regulation of transcription. While many enhancer sequences are known from mammalian genes (globin, elastase, albumin, fetoprotein, and insulin), typically, one will use an enhancer from a eukaryotic cell virus for general expression. Examples are the SV40 enhancer on the late side of the replication origin, the cytomegalovirus early promoter enhancer, the polyoma enhancer on the late side of the replication origin, and adenovirus enhancers.

[0335] The promoter and/or the enhancer can be inducible (e.g., chemically or physically regulated). A chemically regulated promoter and/or enhancer can, for example, be regulated by the presence of alcohol, tetracycline, a steroid, or a metal. A physically regulated promoter and/or enhancer can, for example, be regulated by environmental factors, such as temperature and light. Optionally, the promoter and/or enhancer region can act as a constitutive promoter and/or enhancer to maximize the expression of the region of the transcription unit to be transcribed. In certain vectors, the promoter and/or enhancer region can be active in a cell type specific manner. Optionally, in certain vectors, the promoter and/or enhancer region can be active in all eukaryotic cells, independent of cell type. Examples of promoters of this type are the CMV promoter, the SV40 promoter, the β-actin promoter, the EF1α promoter, and the retroviral long terminal repeat (LTR).

[0336] The vectors also can include, for example, origins of replication and/or markers. A marker gene can confer a selectable phenotype on a cell (e.g., antibiotiC resistance) or be otherwise detectable. Examples of detectable markers include the E. coli lacZ gene, green fluorescent protein (GFP), and luciferase. In addition, an expression vector can include a tag sequence designed to facilitate manipulation or detection (e.g., localization) of the expressed polypeptide. Tag sequences, such as GFP, glutathione S-transferase (GST), polyhistidine, c-myc, hemagglutinin, or FLAG™ tag (Kodak; New Haven, Conn.) sequences typically are expressed as a fusion polypeptide, including the encoded polypeptide and the marker. Such tags can be inserted anywhere within the encoded polypeptide including at either the carboxyl or amino terminus.

[0337] In particular, a nucleic acid molecule vector, such as a non-viral vector or expression vector, containing a nucleic acid encoding a chromophore-producing enzyme or enzymes, can be delivered as naked DNA. The efficiency of delivery of the naked DNA in the methods herein can be increased by using various methods well-known to one of skill in the art (see e.g., Li and Huang (2006) Gene Therapy, 13:1313-1319). Such methods include, for example, such as electroporation, sonoporation or “gene gun” approaches.

[0338] Also, the efficiency of delivery can be increased by encapsulation in liposomes or complexing with polymers as described herein. In a particular example, the nucleic acid can be delivered as a nanoparticle as described herein above. The nanoparticles can be functionalized by conjugating or coating a targeting molecule onto the surface, for example, a targeting molecule that is a ligand for or otherwise binds to receptors expressed in the cells to be targeted.

[0339] 3. Localized Delivery or Expression of Nucleic Acid Molecules (e.g., Localized Expression in Tumors)

[0340] For use in the methods herein any of the nucleic acid molecules provided herein are delivered to cells or tissues in which elimination is desired, for example, because the cells or tissues are associated with, exacerbate or otherwise cause disease. Such cells or tissues include, but are not limited to, artherosclerotic plaques or tumors. Localized delivery and expression of nucleic acid molecules provided herein encoding one or more chromophore-producing enzyme can be achieved, for example, by targeted delivery, cell-specific expression and/or by delivery in an oncolytic virus. One or more of the above methods, which are further described below, can be combined to achieve localized expression of a chromophore-producing enzyme or enzymes.

[0341] a. Targeted Delivery

[0342] Any of the nucleic acid molecules provided herein can be complexed, conjugated, provided in a vehicle or otherwise modified to achieve targeted gene delivery, whereby the nucleic acid molecule is primarily transported to a target tissue and taken up by target cells wherein transcription of the transgene(s) occur(s). Such nucleic acid molecules exhibit localized expression by virtue of differential uptake into target cells or tissues compared to non-target tissue.

[0343] For example, any of the nucleic acid molecules provided herein is encapsulated or conjugated to a particular carrier that contain a targeting molecule for specific targeting to cells of interest. Such targeting molecules include cell-targeting moieties that enhances the association of the agent or complex with a cell including, but not limited to, protein, peptide, lipid, steroid, sugar, carbohydrate, (non-expressing) polynucleic acid or synthetic compound. For example, the targeting moiety can be a ligand or antibody. In particular examples, a dual-ligand approach can be used to increase the selectivity for a cell. The choice of targeting molecule depends on the particular application, including the tissue or organ to be targeted, and can be empirically determined by one of skill in the art. Targeted nanoparticles are known in the art (see, e.g., Franzen (2011) Expert Opin. Drug. Deliv. 8(3):281-98; Faraji and Wipf (2009) Bioorg. Med. Chem. 17(8):2950-62; Salija et al., (2009) Curr. Drug. Discov. Technol. 6(1):43-51). In particular, methods for tissue-specific gene delivery of nanoparticles are known in the art (see e.g., Harris et al. (2010) Biomaterials, 31:998-1006). For example, targeted delivery, can be achieved by incorporating cell-binding ligands that recognize target-specific cellular receptors and/or enhance cellular binding to receptors. Such ligands include, but are not limited to, insulin, growth factor (e.g., EGF of FGF), transferrin, peptides that include the RGD sequence. Other targeting moieties include, but are not limited to, chemical groups that react with thiol, sulfhydryl or disulfide groups on cells, folate and other vitamins.

[0344] In particular examples, the targeting molecule is one that achieves or enhances targeting to tumor cells. There are multiple examples of receptors that can be used for targeted delivery to tumor cells (see WO 2001/036003), including the folate receptor (see e.g., Gottschalk, Gene Ther. 1994; 1(3):185-191), prolactin receptor (see e.g., U.S. Publication No. US20090317855) and transferrin receptor 2 (Calzolari et al., Blood Cells Mol Dis. 2009; 42(1):5-13; Calzolari et al. Blood Cells Mol Dis., 2009; 43(3):243-9). For example, the transferrin receptor is found overexpressed in at least 40% of human tumors and cell lines.

[0345] In addition, targeted delivery can be achieved by shielding or removing vector domains that demonstrate undesired binding potential to blood or non-target cells (e.g., natural receptor binding proteins in viral vectors, positive surface charge in non-viral vectors). For example, viral vectors can be engineered to eliminate gene transfer to non-target cells through native viral receptors, and redirected instead to specific receptors present on the desired target cell (Sharman et al., Adv Drug Deliv Rev. 2004; 56(1):53-76; Wickham, Nat Med. 2003; 9:135-139). Retargeting of viral vectors can be performed genetically, for example, by sequence integration of retargeting ligands into the genome of the vector.

[0346] b. Cell-Specific (e.g., Tumor-Specific) Expression

[0347] Any of the nucleic acid molecules provided herein can contain a cell- or tissue-specific promoter that is operably linked to the coding region of the gene encoding the chromophore-producing enzyme or enzymes. In such an example, the nucleic acid molecule can be delivered into several cell types, but transcription of the carried nucleic acid is under the control of specific promoter/enhancer elements that allow gene transcription only in select target cells (targeted transcription). Tissue and disease-specific promoters, including tumor-specific promoters, are known in the art (see e.g., Papadakis et al. (Current Gene Therapy (2004) 4:89-113). Generally if the nucleic acid molecules encodes more than one chromophore-producing enzyme, the enzymes can be under control of the same promoter separated by an internal ribosome binding site (IRES) such that both genes are expressed. In other examples, if the nucleic acid molecule encodes more than one chromophore-producing enzyme, the enzymes can be under the control of separate promoters. The separate promoters can be the same or different.

[0348] Exemplary cell-specific promoters include, for example, endothelial nitric oxide synthase (eNOS) promoter expressed in endothelial cells (Guillot, P.V. et al. (199) J. Clin. Invest. 103:799-805); vascular endothelial growth factor (VEGF) receptor (Flk-1) promoter expressed in endothelial cells (Kappel et al. (1999) Blood, 93:4282-4292); insulin promoter expressed in beta cells of the pancreas (Ray et al., J. Surg. Res. (1999) 84:199-203); promoter of gonadotropin-releasing hormone receptor gene expressed in cells of the hypothalamus (Albarracin et al. (1999) Endocrinology, 140:2415-2421); matrix metalloproteinase 9 promoter expressed in osteoclasts and keratinocytes (Munant et al., (1999) J. Biol. Chem., 274:5588-5596); promoter of parathyroid hormone receptor expressed in bone cells (Amizuma et al. (1999) J. Clin. Invest., 103:373-381); and dopamine beta-hydroxylase promoter expressed in noradrenergic neurons (Yang et al., (1998) J. Neurochem. 71:1813-1826).

[0349] Cell-specific promoters also include tumor-specific promoters. Tumor-specific promoters are known to those of skill in the art (see e.g., Hardcastle J et al. (2007) Current Cancer Drug Targets, 7: 181-189. These include, but are not limited to, c-erbB-2 oncogene (targeting to breast, pancreatic, gastric and ovarian cancers; see e.g., Hollywood D and Hust H (1993) EMBO J, 12:2369-2375); carcinoembryonic antigen (CEA) (targeting to lung and gastrointestinal malignancies, including colon, pancreatic and gastric cancer; see e.g., Thompson, J.A. et al. (1991) J. Clin. Lab. Anal., 5:344-366; Osaki T et al. (1994) Cancer Res., 54:5258-5261); DF3/MUC1 (targeting to breast cancer; see e.g., Abe M and Kufe D (1993) Proc. Natl. Acad. Sci. USA, 90:282-286; Manome Y et al. (1995) Gene Ther. 2:685, A051; Chen L et al. (1995) J. Clin. Invest., 96:2775-2782); prostate specific antigen (PSA) (targeting to prostate cancer; see e.g., Lundwall, A (1989) Biochem. Biophys. Res. Commun., 161:1151-1156); and alpha-fetoprotein (AFP) (targeting to hepatocellular carcinoma; see e.g., Arbuthnot P et al. (1995) Hepatology, 22:1788-1796; Ido et al. (1995) Cancer Res., 55:3105-3109); L-plastin (LP-P) (targeting to epithelial-derived tumors; see e.g., Chung et al. (1999) Cancer Gene Ther., 6:99-106); α-lactalbumin (ALA) (targeting to breast cancer; see e.g., Anderson et al. (2000) Cancer Gene Ther., 7:845-852); midkine (MK) (targeting to pancreatic cancer; see e.g., Yoshida et al. (2002) Anticancer Res., 22:117-120); cyclooxygenase-2 (COX-2) (targeting gastrointestinal cancer; see e.g., Yamamoto et al., (2001) Mol. Ther., 3:385-394; Wesseling et al. (2001) Cancer Gene Ther., 8:990-996); probasin (ARR2PB) (targeting prostate cancer; see e.g., Lowe et al. (2001) Gene Ther., 8:1363-1371; Rubinchik et al. (2002) Gene Ther., 8:247-253); hypoxic response elements (HRE) (not tissue specific; see e.g., Dachs et al. (2000) Eur. J. Cancer, 36:1649-1660; Ruan H et al. (2001) Curr Opin Invest Drugs, 2:839-843); hTERT (not tissue specific; see e.g., Gu et al. (2000) Cancer Res., 60:5359-5364; Koga et al. (2000) Hum. Gene Ther., 11:1397-1406; Lin et al. (2002) Cancer Res., 62:3620-3625; Majumdar et al. (2001) Gene Ther., 8:568-578; Fujiwara T et al. (2007) Current Cancer Drug Targets, 7: 191-201); promoters that target the angiogenic tumor vasculature, for example, flt-1, flk1/KDR, E-selectin, endoglin, ICAM-2, preproendothelin 1 (PPE-1) (see e.g., Jaggar et al. (1997) Hum. Gene Ther., 8:2239-2247; Walton et al. (1998) Anticancer Res., 18:1357-1360; Savontaus et al. (2002) Gene Ther., 9:972-979; Bauerschmitz et al. (2002) Cancer Res., 62:1271-1274; Velasco et al. (2001) Gene Ther., 8:897-904; Varda-Bloom et al. (2001)); prolactin (PRL) (targeting pituitary tumors; see e.g., Southgate et al. (2000) Endocrinology, 141:3493-3505); osteocalcin 2 (targeting osteosarcoma; see e.g., Barnett et al. (2002) Mol. Ther., 6:377-385); survivin (Hoffman, W.H. et al. (2002) J Biol. Chem., 277:3247-3257); CXCR4 tumor-specific promoters (Ulasov I V et al. (2007) Cancer Biology and Therapy, 65:675-689; Zhu, Z B et al. (2006) J Thorac. Oncol., 1:701-711); and human papilloma virus 16 (Delgado-Enciso et al. (2007) J of Gene Medicine).

[0350] Included among exemplary cell-specific and tumor-specific promoters include, but are not limited to the CMV promoter (SEQ ID NO:170); Telomerase promoter (SEQ ID NO:171); E2F-1 promoter, including modified or synthetic promoters (e.g., SEQ ID NO:172), Antigen 33 (A33) promoter (SEQ ID NO: 175) Cyclo-oxygenase-2 (COX-2) promoter (SEQ ID NO:176); Human carcinoembryonic antigen (CEA) promoter (SEQ ID NO: 177); Cyclin A (CycA) promoter (SEQ ID NO: 178); Cell division cycle 2 (Cdc2) promoter (SEQ ID NO: 179); Cell division cycle 25 (Cdc25) promoter (SEQ ID NO: 180); B-myb promoter (SEQ ID NO: 181); p107 promoter (SEQ ID NO:182); Tyrosine Kinase (TK) promoter (SEQ ID NO:183); DNA polymerase alpha promoter (SEQ ID NO:184); Histone 2A (H2A) promoter (SEQ ID NO:185); C-myc promoter (SEQ ID NO: 186) or a Synthetic cell cycle-dependent promoter (SEQ ID NO:187).

[0351] c. Oncolytic Viruses

[0352] In particular, the nucleic acid molecules encoding a chromophore-producing enzyme or enzymes (e.g., a melanin-producing enzyme or enzymes) is an oncolytic virus. Oncolytic viruses are characterized by their largely tumor cell specific replication, resulting in tumor cell lysis and efficient tumor regression. Oncolytic viruses effect treatment by colonizing or accumulating in tumor cells, including metastatic tumor cells such as circulating tumor cells, and replicating therein. They provide an effective weapon in the tumor treatment arsenal. Oncolytic viruses include Newcastle Disease virus, parvovirus, vaccinia virus, reovirus, measles virus, vesicular stomatitis virus (VSV), oncolytic adenoviruses and herpes viruses. In many cases, tumor selectivity is an inherent property of the virus, such as vaccinia viruses and other oncolytic viruses. Generally oncolytic viruses effect treatment by replicating in tumors or tumor cells resulting in lysis.

[0353] Oncolytic viruses for use in the methods provided here are well-known to one of skill in the art and include, for example, vesicular stomatitis virus, see, e.g., U.S. Pat. Nos. 7,731,974, 7,153,510, 6,653,103 and U.S. Pat. Pub. Nos. 2010/0178684, 2010/0172877, 2010/0113567, 2007/0098743, 20050260601, 20050220818 and EP Pat. Nos. 1385466, 1606411 and 1520175; herpes simplex virus, see, e.g., U.S. Pat. Nos. 7,897,146, 7731,952, 7,550,296, 7,537,924, 6,723,316, 6,428,968 and U.S. Pat. Pub. Nos. 2011/0177032, 2011/0158948, 2010/0092515, 2009/0274728, 2009/0285860, 2009/0215147, 2009/0010889, 2007/0110720, 2006/0039894 and 20040009604; retroviruses, see, e.g., U.S. Pat. Nos. 6,689,871, 6,635,472, 6,639,139, 5,851,529, 5,716,826, 5,716,613 and U.S. Pat. Pub. No. 20110212530; and adeno-associated viruses, see, e.g., U.S. Pat. Nos. 8,007,780, 7,968,340, 7,943,374, 7,906,111, 7,927,585, 7,811,814, 7,662,627, 7,241,447, 7,238,526, 7,172,893, 7,033,826, 7,001,765, 6,897,045, and 6,632,670.

[0354] Oncolytic viruses also include viruses that have been genetically altered to attenuate their virulence, to improve their safety profile, enhance their tumor specificity, and they have also been equipped with additional genes, for example cytotoxins, cytokines, prodrug converting enzymes to improve the overall efficacy of the viruses (see, e.g., Kim et al., (2009) Nat Rev Cancer 9:64-71; Garcia-Aragoncillo et al., (2010) Curr Opin Mol Ther 12:403-411; see U.S. Pat. Nos. 7,588,767, 7,588,771, 7,662,398 and 7,754,221 and U.S. Pat. Publ. Nos. 2007/0202572, 2007/0212727, 2010/0062016, 2009/0098529, 2009/0053244, 2009/0155287, 2009/0117034, 2010/0233078, 2009/0162288, 2010/0196325, 2009/0136917 and 2011/0064650.

[0355] For example, other activities can be introduced and/or anti-tumor activity can be enhanced by including nucleic acid encoding a heterologous gene product that is a therapeutic and/or diagnostic agent or agents. In some examples, the oncolytic viruses provide oncolytic therapy of a tumor cell without the expression of a therapeutic gene. In other examples, the oncolytic viruses can express one or more genes whose products are useful for tumor therapy. For example, a virus can express proteins that cause cell death or whose products cause an anti-tumor immune response. Such genes can be considered therapeutic genes. A variety of therapeutic gene products, such as toxic or apoptotic proteins, or siRNA, are known in the art, and can be used with the oncolytic viruses provided herein. The therapeutic genes can act by directly killing the host cell, for example, as a channel-forming or other lytic protein, or by triggering apoptosis, or by inhibiting essential cellular processes, or by triggering an immune response against the cell, or by interacting with a compound that has a similar effect, for example, by converting a less active compound to a cytotoxic compound. Exemplary therapeutic gene products are gene products selected from among an anticancer agent, an anti-metastatic agent, an antiangiogenic agent, an immunomodulatory molecule, an antigen, a cell matrix degradative gene, genes for tissue regeneration and reprogramming human somatic cells to pluripotency, and other genes described herein or known to one of skill in the art. In these examples, the tumor-specific replication process is capable of directly killing the infected tumor cells (oncolytic viruses) and/or strongly amplifying the copy number of the therapeutic gene carried by the viral vector.

[0356] Exemplary therapeutic genes that can be inserted into any oncolytic virus are described herein in Section E and exemplified with respect to vaccinia virus (e.g., LIVP and Western Reserve). It is understood that an oncolytic virus can be modified to include nucleic acid sequences encoding any of the therapeutic genes described in Section E or any known to one of skill in the art. The sequence of nucleotides encoding a gene is typically inserted into or in place of a non-essential gene or region in the genome of the virus.

[0357] Thus, oncolytic viruses herein, in addition to containing nucleic acid encoding a chromophore-producing enzyme(s), also include viruses that contain nucleic acid encoding another heterologous gene product that is a therapeutic and/or diagnostic agent or agents. Examples of such oncolytic viruses are viruses derived from the Lister strain, such as LIVP, including any containing nucleic acid encoding a heterologous gene product (e.g., GLV-1h68 and derivatives thereof). Such viruses, are further described in detail in Section E. Among other therapeutic vaccinia viruses are the virus designated VV-GM, which is a vaccinia virus that expresses GM-CSF described, for example, in U.S. Pat. No. 6,093,700, and the Wyeth strain vaccinia virus designated JX-594, which is a TK-deleted vaccinia virus that expresses GM-CSF (see, International PCT application No WO 2004/014314, U.S. Pat. No. 5,364,773; Mastrangelo et al. (1998) Cancer Gene Therapy 6:409-422; Kim et al. (2006) Molecular Therapeutics 14:361-370). Other oncolytic viruses include, but are not limited to, JX-954 (Parato et al. (2012) Mol. Ther., 20:749-58); ColoAd1 (Kuhn et al. (2008) PLoS One, 3:e2409; MV-CEA and MV-NIS (Msaouel et al. (2009) Curr. Opin. Mol. Ther., 11:43-53); Synco-B18R (Fu et al. (2012) Mol. Ther., 20:1871-81); OncoVEX GM-CSF (Kaufman et al. (2010) Future Oncol. 6:941-9), Reo-001 (Reolysin®, Galanis it al. (2012) Mol. Ther., 20:1998-2003); NTX-010 (Morton et al. (2010) Pediatr Blood Cancer, 55:295-303); and Coxsackieviruses A13, A15, A18, A20 and A21 (e.g., CAVATAK™, which is coxsackievirus A21.)

[0358] In addition, adenoviruses, such as the ONYX viruses and others, have been modified, such as by deletion of EA1 genes, so that they selectively replicate in cancerous cells, and, thus, are oncolytic. Adenoviruses also have been engineered to have modified tropism for tumor therapy and also as gene therapy vectors. Examples of such is ONYX-015, H101 and Ad5ΔCR (Hallden and Portella (2012) Expert Opin Ther Targets, 16:945-58) and TNFerade (McLoughlin et al. (2005) Ann. Surg. Oncol., 12:825-30). A conditionally replicative adenovirus, Oncorine®, has been approved in China.

[0359] Any virus, including any described above, can be modified to remove or disrupt native genes that cause disease and insert nucleic acid molecules encoding one or more chromophore-producing enzymes (e.g., one or more melanin-producing enzyme) using standard cloning methods known in the art and described elsewhere herein. For example, the sequence of nucleotides encoding a chromophore-producing enzyme is inserted into or in place of a non-essential gene or region in the genome of an unmodified oncolytic virus or is inserted into in or in place of nucleic acid encoding a heterologous gene product in the genome of an unmodified oncolytic virus. Any of the oncolytic viruses described above or in Section E further below, or otherwise known in the art, can be used as an unmodified virus herein for insertion of nucleic acid encoding a chromophore-producing enzyme.

[0360] E. Vaccinia Viruses

[0361] Vaccinia viruses are oncolytic viruses that possess a variety of features that make them particularly suitable for use in wound and cancer gene therapy. For example, vaccinia is a cytoplasmic virus, thus, it does not insert its genome into the host genome during its life cycle. Unlike many other viruses that require the host's transcription machinery, vaccinia virus can support its own gene expression in the host cell cytoplasm using enzymes encoded in the viral genome. Vaccinia viruses also have a broad host and cell type range. In particular, vaccinia viruses can accumulate in immunoprivileged cells or immunoprivileged tissues, including tumors and/or metastases, and also including wounded tissues and cells. Yet, unlike other oncolytic viruses, vaccinia virus can typically be cleared from the subject to whom the viruses are administered by activity of the subject's immune system, and hence are less toxic than other viruses such as adenoviruses. Thus, while the viruses can typically be cleared from the subject to whom the viruses are administered by activity of the subject's immune system, viruses can nevertheless accumulate, survive and proliferate in immunoprivileged cells and tissues such as tumors, because such immunoprivileged areas are isolated from the host's immune system.

[0362] Vaccinia viruses also can be easily modified by insertion of heterologous genes. This can result in the attenuation of the virus and/or permit delivery of therapeutic proteins. For example, vaccinia virus genome has a large carrying capacity for foreign genes, where up to 25 kb of exogenous DNA fragments (approximately 12% of the vaccinia genome size) can be inserted. The genomes of several of the vaccinia strains have been completely sequenced, and many essential and nonessential genes identified. Due to high sequence homology among different strains, genomic information from one vaccinia strain can be used for designing and generating modified viruses in other strains. Finally, the techniques for production of modified vaccinia strains by genetic engineering are well established (Moss, Curr. Opin. Genet. Dev. 3 (1993), 86-90; Broder and Earl, Mol. Biotechnol. 13 (1999), 223-245; Timiryasova et al., Biotechniques 31 (2001), 534-540).

[0363] Various vaccina viruses have been demonstrated to exhibit antitumor activities. In one study, for example, nude mice bearing nonmetastatic colon adenocarcinoma cells were systemically injected with a WR strain of vaccinia virus modified by having a vaccinia growth factor deletion and an enhanced green fluorescence protein inserted into the thymidine kinase locus. The virus was observed to have antitumor effect, including one complete response, despite a lack of exogenous therapeutic genes in the modified virus (McCart et al. (2001) Cancer Res 1:8751-8757). In another study, vaccinia melanoma oncolysate (VMO) was injected into sites near melanoma positive lymph nodes in a Phase III clinical trial of melanoma patients. As a control, New York City Board of Health strain vaccinia virus (VV) was administered to melanoma patients. The melanoma patients treated with VMO had a survival rate better than that for untreated patients, but similar to patients treated with the VV control (Kim et al. (2001) Surgical Oncol 10:53-59).

[0364] LIVP strains of vaccinia virus also have been used for the diagnosis and therapy of tumors, and for the treatment of wounded and inflamed tissues and cells (see e.g., Zhang et al. (2007) Surgery, 142:976-983; Lin et al. (2008) J. Clin. Endocrinol. Metab., 93:4403-7; Kelly et al. (2008) Hum gene There., 19:774-782; Yu et al. (2009) Mol Cancer Ther., 8:141-151; Yu et al. (2009) Mol Cancer, 8:45; U.S. Pat. No. 7,588,767; U.S. Pat. No. 8,052,968; and U.S. Publication No. US20040234455). For example, when intravenously administered, LIVP strains have been demonstrated to accumulate in internal tumors at various loci in vivo, and have been demonstrated to effectively treat human tumors of various tissue origin, including, but not limited to, breast tumors, thyroid tumors, pancreatic tumors, metastatic tumors of pleural mesothelioma, squamous cell carcinoma, lung carcinoma and ovarian tumors. LIVP strains of vaccinia, including attenuated forms thereof, exhibit less toxicity than WR strains of vaccinia virus, and results in increased and longer survival of treated tumor-bearing animal models (see e.g., U.S. Published Patent Appl. No. US20110293527).

[0365] Vaccinia is a cytoplasmic virus, thus, it does not insert its genome into the host genome during its life cycle. Vaccinia virus has a linear, double-stranded DNA genome of approximately 180,000 base pairs in length that is made up of a single continuous polynucleotide chain (Baroudy et al. (1982) Cell, 28:315-324). The structure is due to the presence of 10,000 base pair inverted terminal repeats (ITRs). The ITRs are involved in genome replication. Genome replication is believed to involve self-priming, leading to the formation of high molecular weight concatemers (isolated from infected cells) which are subsequently cleaved and repaired to make virus genomes (see, e.g., Traktman, P., Chapter 27, Poxvirus DNA Replication, pp. 775-798, in DNA Replication in Eukaryotic Cells, Cold Spring Harbor Laboratory Press (1996)). The genome contains approximately 250 genes. In general, the non-segmented, non-infectious genome is arranged such that centrally located genes are essential for virus replication (and are thus conserved), while genes near the two termini effect more peripheral functions such as host range and virulence. Vaccinia viruses practice differential gene expression by utilizing open reading frames (ORFs) arranged in sets that, as a general principle, do not overlap.

[0366] Vaccinia virus possesses a variety of features for use in cancer gene therapy and vaccination including broad host and cell type range, and low toxicity. For example, while most oncolytic viruses are natural pathogens, vaccinia virus has a unique history in its widespread application as a smallpox vaccine that has resulted in an established track record of safety in humans. Toxicities related to vaccinia administration occur in less than 0.1% of cases, and can be effectively addressed with immunoglobulin administration. In addition, vaccinia virus possesses a large carrying capacity for foreign genes (up to 25 kb of exogenous DNA fragments (approximately 12% of the vaccinia genome size) can be inserted into the vaccinia genome) and high sequence homology among different strains for designing and generating modified viruses in other strains. Techniques for production of modified vaccinia strains by genetic engineering are well established (Moss (1993) Curr. Opin. Genet. Dev. 3: 86-90; Broder and Earl (1999) Mol. Biotechnol. 13: 223-245; Timiryasova et al. (2001) Biotechniques 31: 534-540). Vaccinia virus strains have been shown to specifically colonize solid tumors, while not infecting other organs (see, e.g., Zhang et al. (2007) Cancer Res 67:10038-10046; Yu et al., (2004) Nat Biotech 22:313-320; Heo et al., (2011) Mol Ther 19:1170-1179; Liu et al. (2008) Mol Ther 16:1637-1642; Park et al., (2008) Lancet Oncol, 9:533-542).

[0367] A variety of vaccinia virus strains are available for modification by insertion of nucleic acid encoding melanin producing enzymes, including, but not limited to, Western Reserve (WR) (SEQ ID NO: 62), Copenhagen (SEQ ID NO: 63), Tashkent, Tian Tan, Lister, Wyeth, IHD-J, and IHD-W, Brighton, Ankara, MVA, Dairen I, LIPV, LC16M8, LC 16MO, LIVP, WR 65-16, and NYCBH. Exemplary known viruses are set forth in Table 3. Exemplary vaccinia viruses for insertion of heterologous nucleic acid encoding a chromophore-producing enzyme(s) for use in the methods provided herein include, but are not limited to, Lister strain or LIVP strain of vaccinia viruses, WR strains, or modified forms thereof. LIVP generally exhibits less virulence than the WR strain. Also, for example, a recombinant derivative of LIVP, designated GLV-1h68 (set forth in SEQ ID NO: 2; GenBank Acc. No. EU410304) and GLV-1h64 (set forth in SEQ ID NO: 189) exhibit tumor targeting properties and an improved safety profile compared to its parental LIVP strain (set forth in SEQ ID NO: 188) and the WR strain (Zhang et al. (2009) Mol. Genet. Genomics, 282:417-435).

TABLE 3

| | | Reference (e.g., GenBank |
|---|---|---|
| Name | Abbreviations | Accession No.) |
| Vaccinia virus strain | WR | AY243312 |
| Western Reserve | | |
| Vaccinia virus strain | COP | M35027 |
| Copenhagen | | |
| Vaccinia Lister major strain | LIST | AY678276 |
| Vaccinia Lister isolate | LC | AY678277 |
| LC16MO | | |
| Vaccinia Lister clone | VACV107 | DQ121394 |
| VACV107 | | |
| Vaccinia virus strain | ACAM | AY313847 |
| ACAM2000 | | |
| Vaccinia virus strain DUKE | DUKE | DQ439815; Li et al. (2006) |
| | | Virology J, 3: 88 |
| Vaccinia virus strain | MVA | U94848 |
| Ankara | | |
| Vaccinia virus Clone3 | CLONE3 | AY138848 |

[0368] 1. Lister and LIVP Strains

[0369] Exemplary vaccinia viruses are Lister or LIVP vaccinia viruses. Lister (also referred to as Elstree) vaccinia virus is available from any of a variety of sources. For example, the Elstree vaccinia virus is available at the ATCC under Accession Number VR-1549. The Lister vaccinia strain has high transduction efficiency in tumor cells with high levels of gene expression.

[0370] The vaccinia virus provided in the compositions and methods herein containing a sequence of nucleotides encoding a chromophore-producing enzyme or enzymes (e.g., melanin-producing enzyme or enzymes) can be based on modifications to the Lister strain of vaccinia virus. LIVP is a vaccinia strain derived from Lister (ATCC Catalog No. VR-1549). As described elsewhere herein, the LIVP strain can be obtained from the Lister Institute of Viral Preparations, Moscow, Russia; the Microorganism Collection of FSRI SRC VB Vector; or can be obtained from the Moscow Ivanovsky Institute of Virology (C0355 K0602). The LIVP strain was used for vaccination throughout the world, particularly in India and Russia, and is widely available. LIVP and its production are described, for example, in U.S. Pat. Nos. 7,588,767, 7,588,771, 7,662,398 and 7,754,221 and U.S. Publication Nos. 2007/0202572, 2007/0212727, 2010/0062016, 2009/0098529, 2009/0053244, 2009/0155287, 2009/0117034, 2010/0233078, 2009/0162288, 2010/0196325, 2009/0136917, 2011/0064650; Zhang et al. (2009) Mol. Genet. Genomics, 282:417-435). A sequence of a parental genome of LIVP is set forth in SEQ ID NO: 188.

[0371] LIVP strains in the compositions provided herein also include clonal strains that are derived from LIVP and that can be present in a virus preparation propagated from LIVP. The LIVP clonal strains have a genome that differs from the parental sequence set forth in SEQ ID NO: 188. The clonal strains provided herein exhibit greater anti-tumorigenicity and/or reduced toxicity compared to the recombinant or modified virus strain designated GLV-1h68 (having a genome set forth in SEQ ID NO: 2).

[0372] The LIVP and clonal strains have a sequence of nucleotides that have at least 70%, such as at least 75%, 80%, 85% or 90% sequence identity to SEQ ID NO: 1 or 188. For example, the clonal strains have a sequence of nucleotides that has at least 91%, 92%, 93%, 94%, 95%, 95%, 97%, 98%, 99%, 99.1%, 99.2%, 99.3%, 99.4%, 99.5%, 99.6%, 99.7%, 99.8%, 99.9% or 100% sequence identity to SEQ ID NO: 1 or 188. Such LIVP clonal viruses include viruses that differ in one or more open reading frames (ORF) compared to the parental LIVP strain that has a sequence of amino acids set forth in SEQ ID NO: 1 or 188. The LIVP clonal virus strains provided herein can contain a nucleotide deletion or mutation in any one or more nucleotides in any ORF compared to SEQ ID NO: 1 or 188, or can contain an addition or insertion of viral DNA compared to SEQ ID NO: 1 or 188.

[0373] LIVP strains in the compositions provided herein include those that have a nucleotide sequence corresponding to nucleotides 2,256-181,114 of SEQ ID NO: 55, nucleotides 11,243-182,721 of SEQ ID NO: 56, nucleotides 6,264-181,390 of SEQ ID NO: 57, nucleotides 7,044-181,820 of SEQ ID NO: 58, nucleotides 6,674-181,409 of SEQ ID NO: 59, nucleotides 6,716-181,367 of SEQ ID NO: 60 or nucleotides 6,899-181,870 of SEQ ID NO: 61, or to a complement thereof. In some examples, the LIVP strain for use in the compositions and methods is a clonal strain of LIVP or a modified form thereof containing a sequence of nucleotides that has at least 97%, 98%, 99% or more sequence identity to a sequence of nucleotides 2,256-181,114 of SEQ ID NO: 55, nucleotides 11,243-182,721 of SEQ ID NO: 56, nucleotides 6,264-181,390 of SEQ ID NO: 57, nucleotides 7,044-181,820 of SEQ ID NO: 58, nucleotides 6,674-181,409 of SEQ ID NO: 59, nucleotides 6,716-181,367 of SEQ ID NO: 60 or nucleotides 6,899-181,870 of SEQ ID NO: 61. LIVP clonal strains provided herein generally also include terminal nucleotides corresponding to a left and/or right inverted terminal repeat (ITR). Exemplary LIVP strains include, but are not limited to, virus strains designated LIVP 1.1.1 having a genome containing a sequence of nucleotides set forth in SEQ ID NO: 55 or a sequence of nucleotides that exhibits at least 97% sequence identity to SEQ ID NO: 55; a virus strain designated LIVP 2.1.1 having a genome containing a sequence of nucleotides set forth in SEQ ID NO: 56 or a sequence of nucleotides that exhibits at least 97%, 98%, 99% or more sequence identity to SEQ ID NO: 56; a virus strain designated LIVP 4.1.1 having a genome containing a sequence of nucleotides set forth in SEQ ID NO: 57 or a sequence of nucleotides that exhibits at least 97%, 98%, 99% or more sequence identity to SEQ ID NO: 57; a virus strain designated LIVP 5.1.1 having a genome containing a sequence of nucleotides set forth in SEQ ID NO: 58 or a sequence of nucleotides that exhibits at least 97%, 98%, 99% or more sequence identity to SEQ ID NO: 58; a virus strain designated LIVP 6.1.1 having a sequence of nucleotides set forth in SEQ ID NO: 59 or a sequence of nucleotide that exhibits at least 97%, 98%, 99% or more sequence identity to SEQ ID NO: 59; a virus strain designated LIVP 7.1.1 having a genome containing a sequence of nucleotides set forth in SEQ ID NO: 60 or a sequence of nucleotides that exhibits at least 97%, 98%, 99% or more sequence identity to SEQ ID NO: 60; or a virus strain designated LIVP 8.1.1 having a genome containing a sequence of nucleotides set forth in SEQ ID NO: 61 or a sequence of nucleotides that exhibits at least 97%, 98%, 99% or more sequence identity to SEQ ID NO: 61.

[0374] 3. Heterologous Nucleic Acid and Modified Viruses

[0375] The large genome size of poxviruses, such as the vaccinia viruses in the compositions provided herein, allows large inserts of heterologous DNA and/or multiple inserts of heterologous DNA to be incorporated into the genome (Smith and Moss (1983) Gene 25(1):21-28). Unmodified vaccinia viruses for insertion of coding sequences for a chromophore-producing enzyme or enzymes (e.g., a melanin-producing enzyme or enzymes), such as any described above, also can contain genes encoding other heterologous gene products. Hence, the unmodified viruses can be viruses that have been previously modified by insertion of heterologous DNA molecules. Thus, the vaccinia viruses in the compositions and methods provided herein can be modified by insertion of 1, 2, 3, 4, 5, 6, 7, 8, 9, 10 or more heterologous DNA molecules. Generally, the one or more heterologous DNA molecules are inserted into a non-essential region of the virus genome. For example, the one or more heterologous DNA molecules are inserted into a locus of the virus genome that is non-essential for replication in proliferating cells, such as tumor cells. Exemplary insertion sites are provided herein below and are known in the art.

[0376] In some examples, the virus can be modified to express an exogenous or heterologous gene. Exemplary exogenous gene products include proteins and RNA molecules. The modified viruses can express a therapeutic gene product, a detectable gene product, a gene product for manufacturing or harvesting, an antigenic gene product for antibody harvesting, or a viral gene product. The characteristics of such gene products are described herein and elsewhere.

[0377] In some examples, the viruses can be modified to express two or more gene products, such as 2, 3, 4, 5, 6, 7, 8, 9, 10 or more gene products, where any combination of the two or more gene products can be one or more detectable gene products, therapeutic gene products, gene products for manufacturing or harvesting or antigenic gene products for antibody harvesting or a viral gene product. In one example, a virus can be modified to express an anticancer gene product. In another example, a virus can be modified to express two or more gene products for detection or two or more therapeutic gene products. In some examples, one or more proteins involved in biosynthesis of a luciferase substrate can be expressed along with luciferase. When two or more exogenous genes are introduced, the genes can be regulated under the same or different regulatory sequences, and the genes can be inserted in the same or different regions of the viral genome, in a single or a plurality of genetic manipulation steps. In some examples, one gene, such as a gene encoding a detectable gene product, can be under the control of a constitutive promoter, while a second gene, such as a gene encoding a therapeutic gene product, can be under the control of an inducible promoter. Methods for inserting two or more genes into a virus are known in the art and can be readily performed for a wide variety of viruses using a wide variety of exogenous genes, regulatory sequences, and/or other nucleic acid sequences.

[0378] The heterologous DNA can be an exemplary gene, including any from the list of human genes and genetic disorders authored and edited by Dr. Victor A. McKusick and his colleagues at Johns Hopkins University and elsewhere, and developed for the World Wide Web by NCBI, the National Center for Biotechnology Information; online, Mendelian Inheritance in Man, OMIM™ Center for Medical Genetics, Johns Hopkins University (Baltimore, Md.), and National Center for Biotechnology Information, National Library of Medicine (Bethesda, Md.), 1999; and those available in public databases, such as PubMed and GenBank (see, e.g., (ncbi.nlm.nih.gov/entrez/query.fcgi?db=OMIM).

[0379] In particular, viruses provided herein can be modified to express an anti-tumor antibody, an anti-metastatic gene or metastasis suppressor genes; cell matrix degradative genes; hormones; growth factors; immune modulatory molecules, including cytokines, such as interleukins or interferons, chemokines, including CXC chemokines, costimulatory molecules; ribozymes; transporter proteins; antibodies or fragments thereof; antisense RNA; siRNA; microRNAs; protein ligands; a mitosis inhibitor protein; an antimitotic oligopeptide; an anti-cancer polypeptide; anti-cancer antibiotics; angiogenesis inhibitors; anti-angiogenic factors; tissue factors; a prodrug converting enzyme; genes for tissue regeneration and reprogramming human somatic cells to pluripotency; enzymes that modify a substrate to produce a detectable product or signal or are detectable by antibodies; viral attenuation factors; a superantigen; proteins that can bind a contrasting agent, chromophore, or a compound of ligand that can be detected; tumor suppressors; cytotoxic protein; cytostatic protein; genes for optical imaging or detection including luciferase, a fluorescent protein such as a green fluorescent protein (GFP) or GFP-like protein, a red fluorescent protein (RFP), a far-red fluorescent protein, a near-infrared fluorescent protein, a yellow fluorescent protein (YFP), an orange fluorescent protein (OFP), a cerulean fluorescent protein (CFP), or a blue fluorescent protein (BFP), and phycobiliproteins from certain cyanobacteria and eukaryotic algae, including phycoerythrins (red) and the phycocyanins (blue); genes for PET imaging; genes for MRI imaging; or genes to alter attenuation of the viruses.

[0380] a. Exemplary Modifications

[0381] Exemplary heterologous genes for modification of viruses herein are known in the art (see e.g., U.S. Pub. Nos. US2003-0059400, US2003-0228261, US2009-0117034, US2009-0098529, US2009-0053244, US2009-0081639 and US2009-0136917; U.S. Pat. Nos. 7,588,767 and 7,763,420; and International Pub. No. WO 2009/139921). Such modifications are in addition to the modification of the viruses herein to contain heterologous DNA encoding a chromophore-producing enzyme or enzymes, such as a melanin-producing enzyme or enzymes, for example any described above.

[0382] A non-limiting description of exemplary genes encoding heterologous proteins for modification of virus strains is set forth in the following table. The sequence of the gene and encoded proteins are known to one of skill in the art from the literature. Hence, provided herein are virus strains, including any of the clonal viruses provided herein, that contain nucleotides encoding any of the heterologous proteins listed in Table 4.

TABLE 4
Exemplary Genes and Gene Products

```
Detectable gene products
  Optical Imaging
  Luciferase
```

```
bacterial luciferase
luciferase (from Vibrio harveyi or Vibrio fischeri)
  luxA
  luxB
  luxC
  luxD
  luxE
  luxAB
  luxCD
  luxABCDE
firefly luciferase
Renilla luciferase from Renilla reniformis
Gaussia luciferase
luciferases found among marine arthropods
luciferases that catalyze the oxidation of Cypridina (Vargula) luciferin
luciferases that catalyze the oxidation of Coleoptera luciferin
```

luciferase photoproteins

aequorin photoprotein to which luciferin is non-covalently bound

click beetle luciferase

CBG99
(CBG99)mRFP1

Fusion Proteins

Ruc-GFP

Fluorescent Proteins
GFP

aequorin from Aequorea victoria
GFP from Aequorea victoria
GFP from Aequorea coerulescens
GFP from the anthozoan coelenterates Renilla reniformis and Renilla koellikeri (sea
pansies)
Emerald (Invitrogen, Carlsbad, CA)
EGFP (Clontech, Palo Alto, CA)
Azami-Green (MBL International, Woburn, MA)
Kaede (MBL International, Woburn, MA)
ZsGreen1 (Clontech, Palo Alto, CA)
CopGFP (Evrogen/Axxora, LLC, San Diego, CA)
Anthozoa reef coral
Anemonia sea anemone
Renilla sea pansy
Galaxea coral
Acropora brown coral
Trachyphyllia stony coral
Pectiniidae stony coral
GFP-like proteins

RFP

RFP from the corallimorph Discosoma (DsRed) (Matz et al. (1999) Nature
Biotechnology 17: 969-973)
Heteractis reef coral, Actinia or Entacmaea sea anemone
RFPs from Discosoma variants

mRFP1 (Wang et al. (2004) Proc. Natl. Acad. Sci. U.S.A. 101: 16745-9)
mCherry (Wang et al. (2004) PNAS USA. 101(48): 16745-9)
tdTomato (Wang et al. (2004) PNAS USA. 101 (48): 16745-9)
mStrawberry (Wang et al. (2004) PNAS USA. 101(48): 16745-9)
mTangerine (Wang et al. (2004) PNAS USA. 101(48): 16745-9)
DsRed2 (Clontech, Palo Alto, CA)
DsRed-T1 (Bevis and Click (2002) Nat. Biotechnol. 20: 83-87)
Anthomedusa J-Red (Evrogen)
Anemonia AsRed2 (Clontech, Palo Alto, CA)

far-red fluorescent protein

TurboFP635
mNeptune monomeric far-red fluorescent protein
Actinia AQ143 (Shkrob et al. (2005) Biochem J. 392(Pt 3): 649-54)
Entacmaea eqFP611 (Wiedenmann et al. (2002) PNAS USA. 99(18): 11646-51)
Discosoma variants

mPlum (Wang et al.. (2004) PNAS USA. 101(48): 16745-9)
mRasberry (Wang et al. (2004) PNAS USA. 101(48): 16745-9)
Heteractis HcRed1 and t-HcRed (Clontech, Palo Alto, CA)

IFP (infrared fluorescent protein)
near-infrared fluorescent protein
YFP

EYFP (Clontech, Palo Alto, CA)
YPet (Nguyen and Daugherty (2005) Nat Biotechnol. 23(3): 355-60)
Venus (Nagai et al. (2002) Nat. Biotechnol. 20(1): 87-90)
Zs Yellow (Clontech, Palo Alto, CA)
mCitrine (Wang et al. (2004) PNAS USA. 101(48): 16745-9)

OFP

cOFP (Strategene, La Jolla, CA)
mKO (MBL International, Woburn, MA)
mOrange (Wang et al. (2004) PNAS USA. 101(48): 16745-9)

CFP

Cerulean (Rizzo (2004) Nat Biotechnol. 22(4): 445-9)
mCFP (Wang et al. (2004) PNAS USA. 101(48): 16745-9)
AmCyan1 (Clontech, Palo Alto, CA)
MiCy (MBL International, Woburn, MA)
CyPet (Nguyen and Daugherty (2005) Nat Biotechnol. 23(3): 355-60)

BFP

EBFP (Clontech, Palo Alto, CA);
phycobiliproteins from certain cyanobacteria and eukaryotic algae, phycoerythrins
(red) and the phycocyanins (blue)

R-Phycoerythrin (R-PE)
B-Phycoerythrin (B-PE)
Y-Phycoerythrin (Y-PE
C-Phycocyanin (P-PC)
R-Phycocyanin (R-PC)
Phycoerythrin 566 (PE 566)
Phycoerythrocyanin (PEC)
Allophycocyanin (APC)
frp Flavin Reductase
CBP Coelenterazine-binding protein 1
PET imaging

Cyp11B1 transcript variant 1
Cyp11B1 transcript variant 2
Cyp11B2
AlstR
PEPR-1
LAT-4 (SLC43A2)
Cyp51 transcript variant 1
Cyp51 transcript variant 2

Transporter proteins
Solute carrier transporter protein families (SLC)

SLC1 solute carrier 1 transporter protein family
SLC1A1, SLC1A2, SLC1A3, SLC1A4, SLC1A5, SLC1A6, SLC1A7
SLC2 solute carrier 2 transporter protein family
SLC2A1, SLC2A2, SLC2A3, SLC2A4, SLC2A5, SLC2A6, SLC2A7, SLC2A8,
SLC2A9, SLC2A10, SLC2A11, SLC2A12, SLC2A13, SLC2A14)
SLC3 solute carrier 3 transporter protein family
SLC3A1, SLC3A2
SLC 4 solute carrier 4 transporter protein family
SLC4A1, SLC4A2, SLC4A3, SLC4A4, SLC4A5, SLC4A6, SLC4A7, SLC4A8,
SLC4A9, SLC4A10, SLC4A11
SLC5 solute carrier 5 transporter protein family
SLC5A1 sodium/glucose cotransporter 1
SLC5A2 sodium/glucose cotransporter 2
SLC5A3 sodium/myo-inositol cotransporter
SLC5A4 low affinity sodium-glucose cotransporter
SLC5A5 sodium/iodide cotransporter
SLC5A6 sodium-dependent multivitamin transporter
SLC5A7 high affinity choline transporter 1
SLC5A8 sodium-coupled monocarboxylate transporter 1
SLC5A9 sodium/glucose cotransporter 4
SLC5A10 sodium/glucose cotransporter 5, isoform 1
sodium/glucose cotransporter 5, isoform 2
sodium/glucose cotransporter 5, isoform 3
sodium/glucose cotransporter 5, isoform 4
SLC5A11 sodium/myo-inositol cotransporter 2, isoform 1
sodium/myo-inositol cotransporter 2, isoform 2
sodium/myo-inositol cotransporter 2, isoform 3
sodium/myo-inositol cotransporter 2, isoform 4
SLC5A12 sodium-coupled monocarboxylate transporter 2, isoform 1
sodium-coupled monocarboxylate transporter 2, isoform 2

Sodium Iodide Symporter (NIS)
hNIS (NM_000453)
hNIS (BC105049)
hNIS (BC105047)
hNIS (non-functional hNIS variant containing an additional 11 aa)

SLC6 solute carrier 6 transporter protein family
SLC6A1 sodium- and chloride-dependent GABA transporter 1
SLC6A2 norepinephrine transporter (sodium-dependent noradrenaline transporter)
SLC6A3 sodium-dependent dopamine transporter
SLC6A4 sodium-dependent serotonin transporter
SLC6A5 sodium- and chloride-dependent glycine transporter 1
SLC6A6 sodium- and chloride-dependent taurine transporter
SLC6A7 sodium-dependent proline transporter
SLC6A8 sodium- and chloride-dependent creatine transporter
SLC6A9 sodium- and chloride-dependent glycine transporter 1, isoform 1
sodium- and chloride-dependent glycine transporter 1, isoform 2
sodium- and chloride-dependent glycine transporter 1, isoform 3
SLC6A10 sodium- and chloride-dependent creatine transporter 2
SLC6A11 sodium- and chloride-dependent GABA transporter 3
SLC6A12 sodium- and chloride-dependent betaine transporter
SLC6A13 sodium- and chloride-dependent GABA transporter 2
SLC6A14 Sodium- and chloride-dependent neutral and basic amino acid transporter
B(0+)
SLC6A15 Orphan sodium- and chloride-dependent neurotransmitter transporter
NTT73
SLC6A16 Orphan sodium- and chloride-dependent neurotransmitter transporter
NTT5
SLC6A17 Orphan sodium- and chloride-dependent neurotransmitter transporter
NTT4
Sodium SLC6A18 Sodium- and chloride-dependent transporter XTRP2
SLC6A19 Sodium-dependent neutral amino acid transporter B(0)
SLC6A20 Sodium- and chloride-dependent transporter XTRP3
Norepinephrine Transporter (NET)

Human Net (hNET) transcript variant 1 (NM_001172504)
Human Net (hNET) transcript variant 2 (NM_001172501)
Human Net (hNET) transcript variant 3 (NM_001043)
Human Net (hNET) transcript variant 4 (NM_001172502)
Non-Human Net

SLC7 solute carrier 7 transporter protein family
SLC7A1, SLC7A2, SLC7A3, SLC7A4, SLC7A5, SLC7A6, SLC7A7, SLC7A8,
SLC7A9, SLC7A10, SLC7A11, SLC7A13, SLC7A14
SLC8 solute carrier 8 transporter protein family
SLC8A1, SLC8A2, SLC8A3
SLC9 solute carrier 9 transporter protein family
SLC9A1, SLC9A2, SLC9A3, SLC9A4, SLC9A5, SLC9A6, SLC9A7, SLC9A8,
SLC9A9, SLC9A10, SLC9A11
SLC10 solute carrier 10 transporter protein family
SLC10A1, SLC10A2, SLC10A3, SLC10A4, SLC10A5, SLC10A6, SLC10A7
SLC11 solute carrier 11 transporter protein family
SLC11A1
SCL11A2 or hDMT

SLC11A2 transcript variant 4
SLC11A2 transcript variant 1
SLC11A2 transcript variant 2
SLC11A2 transcript variant 3
SLC11A2 transcript variant 5
SLC11A2 transcript variant 6
SLC11A2 transcript variant 7

SLC12 solute carrier 12 transporter protein family
SLC12A1, SLC12A1, SLC12A2, SLC12A3, SLC12A4, SLC12A5, SLC12A6,
SLC12A7, SLC12A8, SLC12A9
SLC13 solute carrier 13 transporter protein family
SLC13A1, SLC13A2, SLC13A3, SLC13A4, SLC13A5
SLC 14 solute carrier 14 transporter protein family
SLC14A1, SLC14A2
SLC15 solute carrier 15 transporter protein family
SLC15A1, SLC15A2, SLC15A3, SLC15A4
SLC16 solute carrier 16 transporter protein family
SLC16A1, SLC16A2, SLC16A3, SLC16A4, SLC16A5, SLC16A6, SLC16A7,
SLC16A8, SLC16A9, SLC16A10, SLC16A11, SLC16A12, SLC16A13,
SLC16A14
SLC 17 solute carrier 17 transporter protein family
SLC17A1, SLC17A2, SLC17A3, SLC17A4, SLC17A5, SLC17A6, SLC17A7,
SLC17A8
SLC18 solute carrier 18 transporter protein family
SLC18A1, SLC18A2, SLC18A3
SLC19 solute carrier 19 transporter protein family
SLC19A1, SLC19A2, SLC19A3
SLC20 solute carrier 20 transporter protein family
SLC20A1, SLC20A2
SLC21 solute carrier 21 transporter protein family

subfamily 1; SLCO1A2, SLCO1B1, SLCO1B3, SLCO1B4,
SLCO1C1
subfamily 2; SLCO2A1, SLCO2B1
subfamily 3; SLCO3A1
subfamily 4; SLCO4A1, SLCO4C1
subfamily 5; SLCO5A1

SLC22 solute carrier 22 transporter protein family
SLC22A1, SLC22A2, SLC22A3, SLC22A4, SLC22A5, SLC22A6, SLC22A7,
SLC22A8, SLC22A9, SLC22A10, SLC22A11, SLC22A12, SLC22A13,
SLC22A14, SLC22A15, SLC22A16, SLC22A17, SLC22A18, SLC22A19,
SLC22A20
SLC23 solute carrier 23 transporter protein family
SLC23A1, SLC23A2, SLC23A3, SLC23A4
SLC24 solute carrier 24 transporter protein family
SLC24A1, SLC24A2, SLC24A3, SLC24A4, SLC24A5, SLC24A6
SLC25 solute carrier 25 transporter protein family
SLC25A1, SLC25A2, SLC25A3, SLC25A4, SLC25A5, SLC25A6, SLC25A7,
SLC25A8, SLC25A9, SLC25A10, SLC25A11, SLC25A12, SLC25A13,
SLC25A14, SLC25A15, SLC25A16, SLC25A17, SLC25A18, SLC25A19,
SLC25A20, SLC25A21, SLC25A22, SLC25A23, SLC25A24, SLC25A25,
SLC25A26, SLC25A27, SLC25A28, SLC25A29, SLC25A30, SLC25A31,
SLC25A32, SLC25A33, SLC25A34, SLC25A35, SLC25A36, SLC25A37,
SLC25A38, SLC25A39, SLC25A40, SLC25A41, SLC25A42, SLC25A43,
SLC25A44, SLC25A45, SLC25A46
SLC26 solute carrier 26 transporter protein family
SLC26A1, SLC26A2, SLC26A3, SLC26A4, SLC26A5, SLC26A6, SLC26A7,
SLC26A8, SLC26A9, SLC26A10, SLC26A11
SLC27 solute carrier 27 transporter protein family
SLC27A1, SLC27A2, SLC27A3, SLC27A4, SLC27A5, SLC27A6
SLC28 solute carrier 28 transporter protein family
SLC28A1, SLC28A2, SLC28A3
SLC29 solute carrier 29 transporter protein family
SLC29A1, SLC29A2, SLC29A3, SLC29A4
SLC30 solute carrier 30 transporter protein family
SLC30A1, SLC30A2, SLC30A3, SLC30A4, SLC30A5, SLC30A6, SLC30A7,
SLC30A8, SLC30A9, SLC30A10
SLC31 solute carrier 31 transporter protein family
SLC31A1
SLC32 solute carrier 32 transporter protein family
SLC32A1
SLC33 solute carrier 33 transporter protein family
SLC33A1
SLC34 solute carrier 34 transporter protein family
SLC34A1, SLC34A2, SLC34A3
SLC35 solute carrier 35 transporter protein family

subfamily A; SLC35A1, SLC35A2, SLC35A3, SLC35A4, SLC35A5
subfamily B; SLC35B1, SLC35B2, SLC35B3, SLC35B4
subfamily C; SLC35C1, SLC35C2
subfamily D; SLC35D1, SLC35D2, SLC35D3
subfamily E; SLC35E1, SLC35E2, SLC35E3, SLC35E4

SLC36 solute carrier 36 transporter protein family
SLC36A1, SLC36A2, SLC36A3, SLC36A4
SLC37 solute carrier 37 transporter protein family
SLC37A1, SLC37A2, SLC37A3, SLC37A4
SLC38 solute carrier 38 transporter protein family
SLC38A1, SLC38A2, SLC38A3, SLC38A4, SLC38A5, SLC38A6
SLC39 solute carrier 39 transporter protein family
SLC39A1, SLC39A2, SLC39A3, SLC39A4, SLC39A5, SLC39A6, SLC39A7,
SLC39A8, SLC39A9, SLC39A10, SLC39A11, SLC39A12, SLC39A13,
SLC39A14
SLC40 solute carrier 40 transporter protein family
SLC40A1
SLC41 solute carrier 41 transporter protein family
SLC41A1, SLC41A2, SLC41A3
SLC42 solute carrier 42 transporter protein family
RHAG, RhBG, RhCG
SLC43 solute carrier 43 transporter protein family
SLC43A1
SLC43A2
SLC43A3
SLC44 solute carrier 44 transporter protein family
SLC44A1, SLC44A2, SLC44A3, SLC44A4, SLC44A5
SLC45 solute carrier 45 transporter protein family
SLC45A1, SLC45A2, SLC54A3, SLC45A4
SLC46 solute carrier 46 transporter protein family
SLC46A1, SLC46A2
SLC47 solute carrier 47 transporter protein family
SLC47A1, SLC47A2

MRI Imaging

Human transferrin receptor
Mouse transferrin receptor
Human ferritin light chain (FTL)
Human ferritin heavy chain
FTL 498-199InsTC, a mutated form of the ferritin light chain
Bacterial ferritin

E. coli
E. coli strain K12
S. aureus strain MRSA252
S. aureus strain NCTC 8325
H. pylori B8

bacterioferritin
codon optimized bacterioferritin
MagA

Enzymes that modify a substrate to produce a detectable product or signal, or are
detectable by antibodies

alpha-amylase
alkaline phosphatase
secreted alkaline phosphatase
peroxidase
T4 lysozyme
oxidoreductase
pyrophosphatase

Therapeutic genes
therapeutic gene product
antigens

tumor specific antigens
tumor-associated antigens
tissue-specific antigens
bacterial antigens
viral antigens
yeast antigens
fungal antigens
protozoan antigens
parasite antigens
mitogens

an antibody or fragment thereof

virus-specific antibodies

antisense RNA
siRNA

siRNA directed against expression of a tumor-promoting gene

an oncogene
growth factor
angiogenesis promoting gene
a receptor

siRNA molecule directed against expression of any gene essential for cell growth,
cell replication or cell survival.
siRNA molecule directed against expression of any gene that stabilizes the cell
membrane or otherwise limits the number of tumor cell antigens released from the
tumor cell.

protein ligands
an antitumor oligopeptide
an antimitotic peptide

tubulysin,
phomopsin
hemiasterlin
taltobulin (HTI-286, 3)
cryptophycin

a mitosis inhibitor protein
an antimitotic oligopeptide
an anti-cancer polypeptide antibiotic
anti-cancer antibiotics

tissue factors

Tissue Factor (TF)
αvβ3-integrin RGD fusion protein

Immune modulatory molecules

GM-CSF
MCP-1 or CCL2 (Monocyte Chemoattractant Protein-1) Human
MCP-1 murine
IP-10 or Chemokine ligand 10 (CXCL10)
LIGHT
P60 or SEQSTM1 (Sequestosome 1 transcript variant 1)
P60 or SEQSTM1 (Sequestosome 1 transcript variant 3)
P60 or SEQSTM1 (Sequestosome 1 transcript variant 2)
OspF
OspG
STAT1alpha
STAT1beta

Interleukins

IL-18 (Interleukin-18)
IL-11 (Interleukin-11)
IL-6 (Interleukin-6)
SIL-6R-IL-6
interleukin-12
interleukin-1
interleukin-2
IL-24 (Interleukin-24)
IL-24 transcript variant 1
IL-24 transcript variant 4
IL-24 transcript variant 5
IL-4
IL-8
IL-10

chemokines

IP-10 (CXCL)
Thrombopoietin
members of the C-X-C and C-C chemokine families
RANTES
MIP1-alpha
MIP1-beta
MIP-2

CXC chemokines

GROα
GROβ (MIP-2)
GROγ
ENA-78
LDGF-PPBP
GCP-2
PF4
Mig
IP-10
SDF-1α/β
BUNZO/STRC33
I-TAC
BLC/BCA-1
MDC
TECK
TARC
HCC-1
HCC-4
DC-CK1
MIP-3α
MIP-3β
MCP-2
MCP-3 (Monocyte Chemoattractant Protein-3, CCL7)
MCP-4
MCP-5 (Monocyte Chemoattractant Protein-5; CCL12)
Eotaxin (CCL11)
Eotaxin-2/MPIF-2
I-309
MIP-5/HCC-2
MPIF-1
6Ckine
CTACK
MEC
lymphotactin
fractalkine

Immunoglobulin superfamily of cytokines

B7.1
B7.2.

Anti-angiogenic genes/angiogenesis inhibitors

Human plasminogen k5 domain (hK5)
PEDF (SERPINF1) (Human)
PEDF (mouse)
anti-VEGF single chain antibody (G6)
anti-DLL4 s.c. antibody GLAF-3
tTF-RGD (truncated human tissue factor protein fused to an RGD peptide)

viral attenuation factors

Interferons

IFN-γ
IFN-α
IFN-β

Antibody or scFv

Therapeutic antibodies (i.e. anticancer antibodies)

Rituximab (RITUXAN)
ADEPT
Trastuzumab (Herceptin)
Tositumomab (Bexxar)
Cetuximab (Erbitux)
Ibritumomab (90Y-Ibritumomab tiuxetan; Zevalin)
Alemtuzumab (Campath-1H)
Epratuzumab (Lymphocide)
Gemtuzumab ozogamicin (Mylotarg)
Bevacizumab (Avastin) and Edrecolomab (Panorex)
Infliximab

Metastasis suppressor genes

NM23 or NME1 Isoform a
NM23 or NME1 Isoform b

Anti-metastatic genes

E-Cad
Gelsolin
LKB1 (STK11)
RASSF1
RASSF2
RASSF3
RASSF4
RASSF5
RASSF6
RASSF7
RASSF8
Syk
TIMP-1 (Tissue Inhibitor of Metalloproteinase Type-1)
TIMP-2 (Tissue Inhibitor of Metalloproteinase Type-2)
TIMP-3 (Tissue Inhibitor of Metalloproteinase Type-3)
TIMP-4 (Tissue Inhibitor of Metalloproteinase Type-4)
BRMS-1
CRMP-1
CRSP3
CTGF
DRG1
KAI1
KiSS1 (kisspeptin)
kisspeptin fragments

kisspeptin-10
kisspeptin-13
kisspeptin-14
kisspeptin-54

Mkk4
Mkk6
Mkk7
RKIP
RHOGDI2
SSECKS
TXNIP/VDUP1

Cell matrix-degradative genes

Relaxin 1
hMMP9

Hormones

Human Erythropoietin (EPO)

MicroRNAs

pre-miRNA 181a (sequence inserted into viral genome)
miRNA 181a
mmu-miR-181a MIMAT0000210 mature miRNA 181a
pre-miRNA 126 (sequence inserted into the vial genome)
miRNA 126
hsa-miR-126 MI000471
hsa-miR-126 MIMAT0000445
pre-miRNA 335 (sequence inserted into the viral genome)
miRNA 335
hsa-miR-335 MI0000816
hsa-miR-335 MIMAT0000765

Genes for tissue regeneration and reprogramming Human somatic cells to pluripotency

nAG
Oct4
NANOG
Ngn (Neogenin 1) transcript variant 1
Ngn (Neogenin 1) transcript variant 2
Ngn (Neogenin 1) transcript variant 3
Ngn3
Pdx1
Mafa

Additional Genes

Myc-CTR1
FCU1
mMnSOD
HACE1
nppa1
GCP-2 (Granulocyte Chemotactic Protein-2, CXCL6)
hADH
Wildtype CDC6
Mut CDC6
GLAF-3 anti-DLL4 scFv
GLAF-4 anti-FAP (Fibroblast Activation Protein) scFv (Brocks et al., (2001) Mol.
Medicine 7(7): 461-469)
GLAF-5 anti-FAP scFv
BMP4
wildtype F14.5L

Other Proteins

WT1
p53
pseudomonas A endotoxin
diphtheria toxin
Arf or p16
Bax
Herpes simplex virus thymidine kinase
E. coli purine nucleoside phosphorylase
angiostatin
endostatin
Rb
BRCA1
cystic fibrosis transmembrane regulator (CFTR)
Factor VIII
low density lipoprotein receptor
alpha-galactosidase
beta-glucocerebrosidase
insulin
parathyroid hormone
alpha-1-antitrypsin
rsCD40L
Fas-ligand
TRAIL
TNF
microcin E492
xanthine guanine phosphoribosyltransferase (XGPRT)
E. coli guanine phosphoribosyltransferase (gpt)
hyperforin
endothelin-1 (ET-1)
connective tissue growth factor (CTGF)
vascular endothelial growth factor (VEGF)
cyclooxygenase
COX-2
cyclooxygenase-2 inhibitor
MPO (Myeloperoxidase)
Apo A1 (Apolipoprotein A1)
CRP (C Reactive Protein)
Fibrinogen
SAP (Serum Amyloid P)
FGF-basic (Fibroblast Growth Factor-basic)
PPAR-agonist
PE37/TGF-alpha fusion protein

Replacement of the A34R gene with another A34R gene from a different strain in order
to increase the EEV form of the virus

A34R from VACV IHD-J
A34R with a mutation at codon 151 (Lys 151 to Asp)
A34R with a mutation at codon 151 (Lys 151 to Glu)

Non-coding Sequence

Non-proteins
Non-coding nucleic acid

Ribozymes

Group I introns
Group II introns
RNaseP
hairpin ribozymes
hammerhead ribozymes

Prodrug converting enzymes

varicella zoster thymidine kinase
cytosine deaminase
purine nucleoside phosphorylase (e.g., from E. coli)
beta lactamase
carboxypeptidase G2
carboxypeptidase A
cytochrome P450

cytochrome P450-2B1
cytochrome P450-4B1

horseradish peroxidase
nitroreductase
rabbit carboxylesterase
mushroom tyrosinase
beta galactosidase (lacZ) (i.e., from E. coli)
beta glucuronidase (gusA)
thymidine phosphorylase
deoxycytidine kinase
linamerase

Proteins detectable by antibodies

chloramphenicol acetyl transferase
hGH

Viral attenuation factors

virus-specific antibodies

mucins
thrombospondin

tumor necrosis factors (TNFs)

TNFα

Superantigens
Toxins

diphtheria toxin
Pseudomonas exotoxin
Escherichia coli Shiga toxin
Shigella toxin
Escherichia coli Verotoxin 1
Toxic Shock Syndrome Toxin 1
Exfoliating Toxins (EXft)
Streptococcal Pyrogenic Exotoxin (SPE) A, B and C
Clostridial Perfringens Enterotoxin (CPET)
staphylococcal enterotoxins

SEA, SEB, SEC1, SEC2, SED, SEE and SEH

Mouse Mammary Tumor Virus proteins (MMTV)
Streptococcal M proteins
Listeria monocytogenes antigen p60
mycoplasma arthritis superantigens

Proteins that can bind a contrasting agent, chromophore, or a compound or ligand that
can be detected

siderophores

enterobactin
salmochelin
yersiniabactin
aerobactin

Growth Factors

platelet-derived growth factor (PDG-F)
keratinocyte growth factor (KGF)
insulin-like growth factor-1 (IGF-1)
insulin-like growth factor-binding proteins (IGFBPs)
transforming growth factor (TGF-alpha)
Growth factors for blood cells

Granulocyte Colony Stimulating Factor (G-CSF)

growth factors that can boost platelets

Other Groups

BAC (Bacterial Artificial Chromosome) encoding several or all proteins of a

specific pathway, e.g. wound healing-pathway

MAC (Mammalian Artificial Chromosome) encoding several or all proteins of a

specific pathway, e.g. woundhealing-pathway

tumor antigen
RNAi
ligand binding proteins
proteins that can induce a signal detectable by MRI
angiogenins
photosensitizing agents
anti-metabolites
signaling modulators
chemotherapeutic compounds
lipases
proteases
pro-apoptotic factors
anti-cancer vaccine

antigen vaccines
whole cell vaccines (i.e., dendritic cell vaccines)
DNA vaccines
anti-idiotype vaccines

tumor suppressors
cytotoxic protein
cytostatic proteins
costimulatory molecules

cytokines and chemokines

cancer growth inhibitors
gene therapy
BCG vaccine for bladder cancer

Proteins that interact with host cell proteins

[0383] i. Diagnostic or Reporter Gene Products

[0384] In some examples, the recombinant vaccinia viruses for insertion of heterologous DNA encoding a chromophore-producing enzyme or enzymes (e.g., a melanin-producing enzyme or enzymes) can express one or more additional genes whose products are detectable or whose products are capable of inducing a detectable signal, in addition to the melanin. In some examples, the viruses provided herein contain nucleic acid that encodes a detectable protein or a protein capable of inducing a detectable signal. Expression of such proteins allows detection of the virus in vitro and in vivo. A variety of detectable gene products, such as detectable proteins are known in the art, and can be used with the viruses provided herein.

[0385] Examples of such proteins are enzymes that can catalyze a detectable reaction or catalyze formation of a detectable product, such as, for example, luciferases, such as a click beetle luciferase, a Renilla luciferase, a firefly luciferase or beta-glucuronidase (GusA). Other examples of such proteins are proteins that emit a detectable signal, including fluorescent proteins, such as a green fluorescent protein (GFP) or a red fluorescent protein (RFP). A variety of DNA sequences encoding proteins that can emit a detectable signal or that can catalyze a detectable reaction, such as luminescent or fluorescent proteins, are known and can be used in the viruses and methods provided herein. Transformation and expression of these genes in viruses can permit detection of viral infection, for example, using a low light and/or fluorescence imaging camera.

[0386] Exemplary genes encoding light-emitting proteins include, for example, genes from bacterial luciferase from Vibrio harveyi (Belas et al., Science 218 (1982), 791-793), bacterial luciferase from Vibrio fischeri (Foran and Brown, Nucleic acids Res. 16 (1988), 177), firefly luciferase (de Wet et al., Mol. Cell. Biol. 7 (1987), 725-737), aequorin from Aequorea victoria (Prasher et al., Biochem. 26 (1987), 1326-1332), Renilla luciferase from Renilla reniformis (Lorenz et al, PNAS USA 88 (1991), 4438-4442). The luxA and luxB genes of bacterial luciferase can be fused to produce the fusion gene (Fab₂), which can be expressed to produce a fully functional luciferase protein (Escher et al., PNAS 86: 6528-6532 (1989)). In some examples, luciferases expressed by viruses can require exogenously added substrates such as decanal or coelenterazine for light emission. In other examples, viruses can express a complete lux operon, which can include proteins that can provide luciferase substrates such as decanal. For example, viruses containing the complete lux operon sequence, when injected intraperitoneally, intramuscularly, or intravenously, allowed the visualization and localization of microorganisms in live mice indicating that the luciferase light emission can penetrate the tissues and can be detected externally (Contag et al. (1995) Mol. Microbiol. 18: 593-603).

[0387] Exemplary fluorescent proteins include green fluorescent protein from Aequorea victoria (Prasher et al., Gene 111: 229-233 (1987)), and GFP variants and variants of GFP-like proteins. Such fluorescent proteins include monomeric, dimeric and tetrameric fluorescent proteins. Exemplary monomeric fluorescent proteins include, but are not limited to: violet fluorescent proteins, such as for example, Sirius; blue fluorescent proteins, such as for example, Azurite, EBFP, SBFP2, EBFP2, TagBFP; cyan fluorescent proteins, such as for example, mTurquoise, eCFP, Cerulean, SCFP, TagCFP, mTFP1; green fluorescent proteins, such as for example, GFP, mUkG1, aAG1, AcGFP1, TagGFP2, EGFP, mWasabi, EmGFP (Emerald); yellow fluorescent proteins, such as for example; TagYFP, EYFP, Topaz, SYFP2, YPet, Venus, Citrine; orange fluorescent proteins, such as for example, mKO, mKO2, mOrange, mOrange2, red fluorescent proteins, such as for example; TagRFP, TagRFPt, mStrawberry, mRuby, mCherry; far red fluorescent proteins, such as for example; mRasberry, mKate2, mPlum, and mNeptune; and fluorescent proteins having an increased stokes shift (i.e. >100 nm distance between excitation and emission spectra), such as for example, Sapphire, T-Sapphire, mAmetrine, and mKeima. Exemplary dimeric and tetrameric fluorescent proteins include, but are not limited to: AmCyanl, Midori-Ishi Cyan, copGFP (ppluGFP2), TurboGFP, ZsGreen, TurboYFP, ZsYellow1, TurboRFP, tdTomato, DsRed2, DsRed-Express, DsRed-Express2, DsRed-Max, AsRed2, TurboFP602, RFP611, Katushka (TurboFP635), Katushka2, and AQ143. Excitation and emission spectra for exemplary fluorescent proteins are well-known in the art (see also e.g., Chudakov et al. (2010) Physiol Rev 90, 1102-1163).

[0388] Exemplary detectable proteins also include proteins that can bind a contrasting agent, chromophore, or a compound or ligand that can be detected, such as a transferrin receptor or a ferritin; and reporter proteins, such as E. coli β-galactosidase, β-glucuronidase, xanthine-guanine phosphoribosyltransferase (gpt).

[0389] Exemplary detectable proteins are also gene products that can specifically bind a detectable compound, including, but not limited to receptors, metal binding proteins (e.g., siderophores, ferritins, transferrin receptors), ligand binding proteins, and antibodies. Other examples of detectable proteins include transporter proteins that can bind to and transport detectable molecules also are examples of detectable proteins. Such molecules can be used for detection of the virus, such as for applications involving imaging. Any of a variety of detectable compounds can be used, and can be imaged by any of a variety of known imaging methods. Exemplary compounds include receptor ligands and antigens for antibodies. The ligand can be labeled according to the imaging method to be used. Exemplary imaging methods include, but are not limited to, X-rays, magnetic resonance methods, such as magnetic resonance imaging (MRI) and magnetic resonance spectroscopy (MRS), and tomographic methods, including computed tomography (CT), computed axial tomography (CAT), electron beam computed tomography (EBCT), high resolution computed tomography (HRCT), hypocycloidal tomography, positron emission tomography (PET), single-photon emission computed tomography (SPECT), spiral computed tomography and ultrasonic tomography.

[0390] Labels appropriate for X-ray imaging are known in the art, and include, for example, Bismuth (III), Gold (III), Lanthanum (III) or Lead (II); a radioactive ion, such as ⁶⁷Copper, ⁶⁷Gallium, ⁶⁸Gallium, ¹¹¹Indium, ¹¹³Indium, ¹²³Iodine, ¹²⁵Iodine, ¹³¹Iodine, ¹⁹⁷Mercury, ²⁰³Mercury, ¹⁸⁶Rhenium, ¹⁸⁸Rhenium, ⁹⁷Rubidium, ¹⁰³Rubidium, ⁹⁹Technetium or ⁹⁰Yttrium; a nuclear magnetic spin-resonance isotope, such as Cobalt (II), Copper (II), Chromium (III), Dysprosium (III), Erbium (III), Gadolinium (III), Holmium (III), Iron (II), Iron (III), Manganese (II), Neodymium (III), Nickel (II), Samarium (III), Terbium (III), Vanadium (II) or Ytterbium UM; or rhodamine or fluorescein.

[0391] Labels appropriate for magnetic resonance imaging are known in the art, and include, for example, gadolinium chelates and iron oxides. Use of chelates in contrast agents is known in the art. Labels appropriate for tomographic imaging methods are known in the art, and include, for example, β-emitters such as ¹¹C, ¹³N, ¹⁵O or ⁶⁴Cu or γ-emitters such as ¹²³I. Other exemplary radionuclides that can, be used, for example, as tracers for PET include ⁵⁵Co, ⁶⁷Ga, ⁶⁸Ga, ⁶⁰Cu(II), ⁶⁷Cu(II), ⁵⁷Ni, ⁵²Fe and ¹⁸F (e.g., ¹⁸F-fluorodeoxyglucose (FDG)). Examples of useful radionuclide-labeled agents are a ⁶⁴Cu-labeled engineered antibody fragment (Wu et al. (2002) PNAS USA 97: 8495-8500), ⁶⁴Cu-labeled somatostatin (Lewis et al. (1999) J. Med. Chem. 42: 1341-1347), ⁶⁴Cu-pyruvaldehyde-bis (N4-methylthiosemicarbazone)(⁶⁴Cu-PTSM) (Adonai et al. (2002) PNAS USA 99: 3030-3035), ⁵²Fe-citrate (Leenders et al. (1994) J. Neural. Transm. Suppl. 43: 123-132), ⁵²Fe/^{52m}Mn-citrate (Calonder et al. (1999) J. Neurochem. 73: 2047-2055) and ⁵²Fe-labeled iron (III) hydroxide-sucrose complex (Beshara et al. (1999) Br. J. Haematol. 104: 288-295, 296-302).

[0392] Exemplary detectable proteins are transporter proteins that can bind to and transport detectable molecules, such as human epinephrine transporter (hNET) or sodium iodide symporter (NIS) that can bind to and transport detectable molecules, such as MIBG and other labeled molecules (e.g., Na¹²⁵I), into the cell.

[0393] The viruses can be modified for purposes of using the viruses for imaging, including for the purpose of dual imaging in vitro and/or in vivo to detect two or more detectable gene products, gene products that produce a detectable signal, gene products that can bind a detectable compound, or gene products that can bind other molecules to form a detectable product. In some examples, the two or more gene products are expressed by different viruses, whereas in other examples the two or more gene products are produced by the same virus. For example, a virus can express a gene product that emits a detectable signal and also express a gene product that catalyzes a detectable reaction. In other examples, a virus can express one or more gene products that emit a detectable signal, one or more gene products that catalyze a detectable reaction, one or more gene products that can bind a detectable compound or that can form a detectable product, or any combination thereof. Any combination of such gene products can be expressed by the viruses provided herein and can be used in combination with any of the methods provided herein. Imaging of such gene products can be performed, for example, by various imaging methods as described herein and known in the art (e.g., fluorescence imaging, MRI, PET, among many other methods of detection). Imaging of gene products also can be performed using the same method, whereby gene products are distinguished by their properties, such as by differences in wavelengths of light emitted. For example, a virus can express more than one fluorescent protein that differs in the wavelength of light emitted (e.g., a GFP and an RFP). In another non-limiting example, an RFP can be expressed with a luciferase. In yet other non-limiting examples, a fluorescent gene product can be expressed with a gene product, such as a ferritin or a transferrin receptor, used for magnetic resonance imaging. A virus expressing two or more detectable gene products or two or more viruses expressing two or more detectable gene products can be imaged in vitro or in vivo using such methods. In some examples the two or more gene products are expressed as a single polypeptide, such as a fusion protein. For example a fluorescent protein can be expressed as a fusion protein with a luciferase protein.

[0394] ii. Therapeutic Gene Products

[0395] The recombinant vaccinia viruses for insertion of heterologous DNA encoding a chromophore-producing enzyme or enzymes (e.g., a melanin-producing enzyme or enzymes) can contain a heterologous nucleic acid molecule that encodes one or more therapeutic gene products in addition to the chromophore-producing enzymes (melanin-producing enzyme(s)). Therapeutic gene products include products that cause cell death or cause an anti-tumor immune response. A variety of therapeutic gene products, such as toxic or apoptotic proteins, or siRNA, are known in the art, and can be used with the viruses provided herein. The therapeutic genes can act by directly killing the host cell, for example, as a channel-forming or other lytic protein, or by triggering apoptosis, or by inhibiting essential cellular processes, or by triggering an immune response against the cell, or by interacting with a compound that has a similar effect, for example, by converting a less active compound to a cytotoxic compound.

[0396] Exemplary therapeutic gene products that can be expressed by the viruses provided herein include, but are not limited to, gene products (i.e., proteins and RNAs), including those useful for tumor therapy, such as, but not limited to, an anticancer agent, an antimetastatic agent, or an antiangiogenic agent. For example, exemplary proteins useful for tumor therapy include, but are not limited to, tumor suppressors, cytostatic proteins and costimulatory molecules, such as a cytokine, a chemokine, or other immunomodulatory molecules, an anticancer antibody, such as a single-chain antibody, antisense RNA, siRNA, prodrug converting enzyme, a toxin, a mitosis inhibitor protein, an antitumor oligopeptide, an anticancer polypeptide antibiotic, an angiogenesis inhibitor, or tissue factor. For example, a large number of therapeutic proteins that can be expressed for tumor treatment in the viruses and methods provided herein are known in the art, including, but not limited to, a transporter, a cell-surface receptor, a cytokine, a chemokine, an apoptotic protein, a mitosis inhibitor protein, an antimitotic oligopeptide, an antiangiogenic factor (e.g., hk5), angiogenesis inhibitors (e.g., plasminogen kringle 5 domain, anti-vascular endothelial growth factor (VEGF) scAb, tTF-RGD, truncated human tissue factor-αᵥβ₃-integrin RGD peptide fusion protein), anticancer antibodies, such as a single-chain antibody (e.g., an antitumor antibody or an antiangiogenic antibody, such as an anti-VEGF antibody or an anti-epidermal growth factor receptor (EGFR) antibody), a toxin, a tumor antigen, a prodrug converting enzyme, a ribozyme, RNAi, and siRNA.

[0397] Additional therapeutic gene products that can be expressed by the oncolytic reporter viruses include, but are not limited to, cell matrix degradative genes, such as but not limited to, relaxin-1 and MMP9, and genes for tissue regeneration and reprogramming human somatic cells to pluripotency, such as but not limited to, nAG, Oct4, NANOS, Neogenin-1, Ngn3, Pdx1 and Mafa.

[0398] Costimulatory molecules for the methods provided herein include any molecules which are capable of enhancing immune responses to an antigen/pathogen in vivo and/or in vitro. Costimulatory molecules also encompass any molecules which promote the activation, proliferation, differentiation, maturation or maintenance of lymphocytes and/or other cells whose function is important or essential for immune responses.

[0399] An exemplary, non-limiting list of therapeutic proteins includes tumor growth suppressors such as IL-24, WT1, p53, pseudomonas A endotoxin, diphtheria toxin, Arf, Bax, HSV TK, E. coli purine nucleoside phosphorylase, angiostatin and endostatin, p16, Rb, BRCA1, cystic fibrosis transmembrane regulator (CFTR), Factor VIII, low density lipoprotein receptor, beta-galactosidase, alpha-galactosidase, beta-glucocerebrosidase, insulin, parathyroid hormone, alpha-1-antitrypsin, rsCD40L, Fas-ligand, TRAIL, TNF, antibodies, microcin E492, diphtheria toxin, Pseudomonas exotoxin, Escherichia coli Shiga toxin, Escherichia coli Verotoxin 1, and hyperforin. Exemplary cytokines include, but are not limited to, chemokines and classical cytokines, such as the interleukins, including for example, interleukin-1, interleukin-2, interleukin-6 and interleukin-12, tumor necrosis factors, such as tumor necrosis factor alpha (TNF-α), interferons such as interferon gamma (IFN-γ), granulocyte macrophage colony stimulating factor (GM-CSF), erythropoietin and exemplary chemokines including, but not limited to CXC chemokines such as IL-8 GROα, GROβ, GROγ, ENA-78, LDGF-PBP, GCP-2, PF4, Mig, IP-10, SDF-1α/β, BUNZO/STRC33, I-TAC, BLC/BCA-1; CC chemokines such as MIP-1α, MIP-1β, MDC, TECK, TARC, RANTES, HCC-1, HCC-4, DC-CK1, MIP-3α, MIP-3β, MCP-1, MCP-2, MCP-3, MCP-4, Eotaxin, Eotaxin-2/MPIF-2, I-309, MIP-5/HCC-2, MPIF-1, 6Ckine, CTACK, MEC; lymphotactin; and fractalkine. Other exemplary costimulatory molecules include immunoglobulin superfamily of cytokines, such as B7.1, B7.2.

[0400] Exemplary therapeutic proteins that can be expressed by the viruses provided herein and used in the methods provided herein include, but are not limited to, erythropoietin (e.g., SEQ ID NO: 195), an anti-VEGF single chain antibody (e.g., SEQ ID NO: 196), a plasminogen K5 domain (e.g., SEQ ID NO: 197), a human tissue factor-αvβ3-integrin RGD fusion protein (e.g., SEQ ID NO: 173), interleukin-24 (e.g., SEQ ID NO: 174), or immune stimulators, such as SIL-6-SIL-6 receptor fusion protein (e.g., SEQ ID NO: 74).

[0401] In some examples, the viruses provided herein can express one or more therapeutic gene products that are proteins that convert a less active compound into a compound that causes tumor cell death. Exemplary methods of conversion of such a prodrug compound include enzymatic conversion and photolytic conversion. A large variety of protein/compound pairs are known in the art, and include, but are not limited to, Herpes simplex virus thymidine kinase/ganciclovir, Herpes simplex virus thymidine kinase/(E)-5-(2-bromovinyl)-2′-deoxyuridine (BVDU), varicella zoster thymidine kinase/ganciclovir, varicella zoster thymidine kinase/BVDU, varicella zoster thymidine kinase/(E)-5-(2-bromovinyl)-1-beta-D-arabinofuranosyluracil (BVaraU), cytosine deaminase/5-fluorouracil, cytosine deaminase/5-fluorocytosine, purine nucleoside phosphorylase/6-methylpurine deoxyriboside, beta lactamase/cephalosporin-doxorubicin, carboxypeptidase G2/4-[(2-chloroethyl)(2-mesyloxyethyl)amino]benzoyl-L-glutamic acid (CMDA), carboxypeptidase A/methotrexate-phenylamine, cytochrome P450/acetaminophen, cytochrome P450-2B1/cyclophosphamide, cytochrome P450-4B1/2-aminoanthracene, 4-ipomeanol, horseradish peroxidase/indole-3-acetic acid, nitroreductase/CB 1954, rabbit carboxylesterase/7-ethyl-10-[4-(1-piperidino)-1-piperidino]carbonyloxy-camptothecin (CPT-11), mushroom tyrosinase/bis-(2-chloroethyl)amino-4-hydroxyphenylaminomethanone 28, beta galactosidase/1-chloromethyl-5-hydroxy-1,2-dihydro-3H-benz[e]indole, beta glucuronidase/epirubicin glucuronide, thymidine phosphorylase/5′-deoxy-5-fluorouridine, deoxycytidine kinase/cytosine arabinoside, and linamerase/linamarin.

[0402] Other therapeutic gene products that can be expressed by the viruses provided herein include siRNA and microRNA molecules. The siRNA and/or microRNA molecule can be directed against expression of a tumor-promoting gene, such as, but not limited to, an oncogene, growth factor, angiogenesis promoting gene, or a receptor. The siRNA and/or microRNA molecule also can be directed against expression of any gene essential for cell growth, cell replication or cell survival. The siRNA and/or microRNA molecule also can be directed against expression of any gene that stabilizes the cell membrane or otherwise limits the number of tumor cell antigens released from the tumor cell. Design of an siRNA or microRNA can be readily determined according to the selected target of the siRNA; methods of siRNA and microRNA design and down-regulation of genes are known in the art, as exemplified in U.S. Pat. Pub. Nos. 2003-0198627 and 2007-0044164, and Zeng et al., Molecular Cell 9:1327-1333 (2002).

[0403] Therapeutic gene products include viral attenuation factors, such as antiviral proteins. Antiviral proteins or peptides can be expressed by the viruses provided herein. Expression of antiviral proteins or peptides can control viral pathogenicity. Exemplary viral attenuation factors include, but are not limited to, virus-specific antibodies, mucins, thrombospondin, and soluble proteins such as cytokines, including, but not limited to TNFα, interferons (for example IFNα, IFNβ, or IFNγ) and interleukins (for example IL-1, IL-12 or IL-18).

[0404] Another exemplary therapeutic gene product that can be expressed by the viruses provided herein is a protein ligand, such as antitumor oligopeptide. Antitumor oligopeptides are short protein peptides with high affinity and specificity to tumors. Such oligopeptides could be enriched and identified using tumor-associated phage libraries (Akita et al. (2006) Cancer Sci. 97(10):1075-1081). These oligopeptides have been shown to enhance chemotherapy (U.S. Pat. No. 4,912,199). The oligopeptides can be expressed by the viruses provided herein. Expression of the oligopeptides can elicit anticancer activities on their own or in combination with other chemotherapeutic agents. An exemplary group of antitumor oligopeptides is antimitotic peptides, including, but not limited to, tubulysin (Khalil et al. (2006) Chembiochem. 7(4):678-683), phomopsin, hemiasterlin, taltobulin (HTI-286, 3), and cryptophycin. Tubulysin is from myxobacteria and can induce depletion of cell microtubules and trigger the apoptotic process. The antimitotic peptides can be expressed by the viruses provide herein and elicit anticancer activities on their own or in combination with other therapeutic modalities.

[0405] Another exemplary therapeutic gene product that can be expressed by the viruses provided herein is an anti-metastatic agent that inhibits one or more steps of the metastatic cascade. The encoded anti-metastatic agents include agents that inhibit invasion of local tissue, inhibit intravasation into the bloodstream or lymphatics, inhibit cell survival and transport through the bloodstream or lymphatics as emboli or potentially single cells, inhibit cell lodging in microvasculature at the secondary site, inhibit growth into microscopic lesions and subsequently into overt metastatic lesions, and/or inhibit metastasis formation and growth within the primary tumor, where the inhibition of metastasis formation is not a consequence of inhibition of primary tumor growth.

[0406] Exemplary anti-metastatic agents expressed by the viruses provided herein can directly or indirectly inhibit one or more steps of the metastatic cascade. Exemplary anti-metastatic agents include, but are not limited to, the following: BRMS-1 (Breast Cancer Metastasis Suppressor 1), CRMP-1 (Collapsin Response Mediator Protein-1), CRSP-3 (Cofactor Required for Sp1 transcriptional activation subunit 3), CTGF (Connective Tissue Growth Factor), DRG-1 (Developmentally-regulated GTP-binding protein 1), E-Cad (E-cadherin), gelsolin, KAI1, KiSS1 (Kisspeptin 1/Metastin), kispeptin-10, kispeptin-13, kispeptin-14, kispeptin-54, LKB1 (STK11 (serine/threonine kinase 11)), JNKK1/MKK4 (c-Jun-NH2-Kinase Kinase/Mitogen activated Kinase Kinase 4), MKK6 (mitogen activated kinase kinase 6), MKK7 (mitogen activated kinase kinase 7), Nm23 (NDP Kinase A), RASSF1-8 (Ras association (RalGDS/AF-6) domain family members), RKIP (Raf kinase inhibitor protein), RhoGDI2 (Rho GDP dissociation inhibitor 2), SSECKS (src-suppressed C-kinase substrate), Syk, TIMP-1 (Tissue inhibitor of metalloproteinase-1), TIMP-2 (Tissue inhibitor of metalloproteinase-2), TIMP-3 (Tissue inhibitor of metalloproteinase-3), TIMP-4 (Tissue inhibitor of metalloproteinase-4), TXNIP/VDUP1 (Thioredoxin-interacting protein). Such list of anti-metastatic agents is not meant to be limiting. Any gene product that can suppress metastasis formation via a mechanism that is independent of inhibition of growth within the primary tumor is encompassed by the designation of an anti-metastatic agent or metastasis suppressor and can be expressed by a virus as provided herein. One of skill in the art can identify anti-metastatic genes and can construct a virus expressing one or more anti-metastatic genes for therapy.

[0407] Another exemplary therapeutic gene product that can be expressed by the viruses provided herein is a protein that sequesters molecules or nutrients needed for tumor growth. For example, the virus can express one or more proteins that bind iron, transport iron, or store iron, or a combination thereof. Increased iron uptake and/or storage by expression of such proteins not only, increases contrast for visualization and detection of a tumor or tissue in which the virus accumulates, but also depletes iron from the tumor environment. Iron depletion from the tumor environment removes a vital nutrient from the tumors, thereby deregulating iron hemostasis in tumor cells and delaying tumor progression and/or killing the tumor.

[0408] Additionally, iron, or other labeled metals, can be administered to a tumor-bearing subject, either alone, or in a conjugated form. An iron conjugate can include, for example, iron conjugated to an imaging moiety or a therapeutic agent. In some cases, the imaging moiety and therapeutic agent are the same, e.g., a radionuclide. Internalization of iron in the tumor, wound, area of inflammation or infection allows the internalization of iron alone, a supplemental imaging moiety, or a therapeutic agent (which can deliver cytotoxicity specifically to tumor cells or deliver the therapeutic agent for treatment of the wound, area of inflammation or infection). These methods can be combined with any of the other methods provided herein.

[0409] The administered virus also can be modified to stimulate humoral and/or cellular immune response in the subject, such as the induction of cytotoxic T lymphocytes responses. For example, the virus can provide prophylactic and therapeutic effects against a tumor infected by the virus or other infectious diseases, by rejection of cells from tumors or lesions using viruses that express immunoreactive antigens (Earl et al., Science 234: 728-831 (1986); Lathe et al., Nature (London) 32: 878-880 (1987)), cellular tumor-associated antigens (Bernards et al., Proc. Natl. Acad. Sci. USA 84: 6854-6858 (1987); Estin et al., Proc. Natl. Acad. Sci. USA 85: 1052-1056 (1988); Kantor et al., J. Natl. Cancer Inst. 84: 1084-1091 (1992); Roth et al., Proc. Natl. Acad. Sci. USA 93: 4781-4786 (1996)) and/or cytokines (e.g., IL-2, IL-12), costimulatory molecules (B7-1, B7-2) (Rao et al., J. Immunol. 156: 3357-3365 (1996); Chamberlain et al., Cancer Res. 56: 2832-2836 (1996); Oertli et al., J. Gen. Virol. 77: 3121-3125 (1996); Qin and Chatterjee, Human Gene Ther. 7: 1853-1860 (1996); McAneny et al., Ann. Surg. Oncol.3: 495-500 (1996)), or other therapeutic proteins.

[0410] For example, the viruses provided herein can be modified to express one or more antigens. Sustained release of the antigen can result in an immune response by the viral-infected host, in which the host can develop antibodies against the antigen and/or the host can develop an immune response against cells expressing the antigen. Exemplary antigens include, but are not limited to, tumor specific antigens, tumor-associated antigens, tissue-specific antigens, bacterial antigens, viral antigens, yeast antigens, fungal antigens, protozoan antigens, parasite antigens and mitogens. Superantigens are antigens that can activate a large immune response, often brought about by a large response of T cells. A variety of superantigens are known in the art including, but not limited to, diphtheria toxin, staphylococcal enterotoxins (SEA, SEB, SEC1, SEC2, SED, SEE and SEH), Toxic Shock Syndrome Toxin 1, Exfoliating Toxins (EXft), Streptococcal Pyrogenic Exotoxin A, B and C (SPE A, B and C), Mouse Mammary Tumor Virus proteins (MMTV), Streptococcal M proteins, Clostridial Perfringens Enterotoxin (CPET), Listeria monocytogenes antigen p60, and mycoplasma arthritis superantigens.

[0411] Since many superantigens also are toxins, if expression of a virus of reduced toxicity is desired, the superantigen can be modified to retain at least some of its superantigenicity while reducing its toxicity, resulting in a compound such as a toxoid. A variety of recombinant superantigens and toxoids of superantigens are known in the art, and can readily be expressed in the viruses provided herein. Exemplary toxoids include toxoids of diphtheria toxin, as exemplified in U.S. Pat. No. 6,455,673 and toxoids of Staphylococcal enterotoxins, as exemplified in U.S. Pat. Pub. No. 2003-0009015.

[0412] iii. Modifications to Alter Attenuation of the Viruses

[0413] The toxicity of the viruses can be modulated. For example, viruses provided herein can be attenuated by addition, deletion and/or modification of nucleic acid in the viral genome. In particular, viruses can be attenuated by increasing transcriptional or translational load. In one example, the virus is attenuated by addition of heterologous nucleic acid that contains an open reading frame that encodes one or more gene products (e.g., a diagnostic gene product or a therapeutic gene product as described above). In another example, the virus is attenuated by modification of heterologous nucleic acid that contains an open reading frame that encodes one or more gene products. In a further example, the heterologous nucleic acid is modified by increasing the length of the open reading frame, removal of all or part of the open reading frame or replacement of all or part of the open reading frame. Such modifications can affect viral toxicity by disruption of one or more viral genes or by increasing or decreasing the transcriptional and/or translational load on the virus (see, e.g., International Patent Publication No. WO 2008/100292).

[0414] In another example, the virus can be attenuated by modification or replacement of one or more promoters contained in the virus. Such promoters can be replaced by stronger or weaker promoters, where replacement results in a change in the attenuation of the virus. In one example, a promoter of a virus provided herein is replaced with a natural promoter. In one example, a promoter of a virus provided herein is replaced with a synthetic promoter. Exemplary promoters that can replace a promoter contained in a virus can be a viral promoter, such as a vaccinia viral promoter, and can include a vaccinia early, intermediate, early/late or late promoter. Additional exemplary viral promoters are provided herein and known in the art and can be used to replace a promoter contained in a virus.

[0415] In another example, the virus is attenuated by modification of a heterologous nucleic acid contained in the virus by removal of all or a portion of a first heterologous nucleic acid molecule and replacement by a second heterologous nucleic acid molecule, where replacement changes the level of attenuation of the virus. The second heterologous nucleic acid molecule can contain a sequence of nucleotides that encodes a protein or can be a non-coding nucleic acid molecule. In some examples, the second heterologous nucleic acid molecule contains an open reading frame operably linked to a promoter. The second heterologous nucleic acid molecule can contain one or more open reading frames or one or more promoters. Further, the one or more promoters of the second heterologous nucleic acid molecule can be one or more stronger promoters or one or more weaker promoters, or can be a combination or both.

[0416] Attenuated vaccinia viruses are known in the art and are described, for example, in U.S. Patent Pub. Nos. US 2005-0031643 (now U.S. Pat. Nos. 7,588,767, 7,588,771 and 7,662,398), US 2008-0193373, US 2009-0098529, US 2009-0053244, US 2009-0155287, US 2009-0081639, US 2009-0117034 and US 2009-0136917, and International Patent Pub. Nos. WO 2005/047458, WO 2008/100292 and WO 2008/150496.

[0417] Viruses provided herein also can contain a modification that alters its infectivity or resistance to neutralizing antibodies. In one non-limiting example, deletion of the A35R gene in an vaccinia LIVP strain can decrease the infectivity of the virus. In some examples, the viruses provided herein can be modified to contain a deletion of the A35R gene. Exemplary methods for generating such viruses are described in PCT Publication No. WO2008/100292, which describes vaccinia LIVP viruses GLV-1j87, GLV-1j88 and GLV-1j89, which contain deletion of the A35R gene.

[0418] In another non-limiting example, replacement of viral coat proteins (e.g., A34R, which encodes a viral coat glycoprotein) with coat proteins from either more virulent or less virulent virus strains can increase or decrease the clearance of the virus from the subject. In one example, the A34R gene in a vaccinia LIVP strain can be replaced with the A34R gene from vaccinia IHD-J strain. Such replacement can increase the extracellular enveloped virus (EEV) form of vaccinia virus and can increase the resistance of the virus to neutralizing antibodies.

[0419] b. Control of Heterologous Gene Expression

[0420] In some examples, the heterologous nucleic acid, including heterologous nucleic acid encoding a chromophore-producing enzyme(s), also can contain one or more regulatory sequences to regulate expression of an open reading frame encoding, the heterologous RNA, and/or protein. Suitable regulatory sequences which, for example, are functional in a mammalian host cell are well-known in the art. Expression also can be influenced by one or more proteins or RNA molecules expressed by the virus. Gene regulatory elements, such as promoters and enhancers, possess cell-type specific activities and can be activated by certain induction factors (e.g., hormones, growth factors, cytokines, cytostatic agents, irradiation, heat shock) via responsive elements. Controlled and restricted expression of these genes can be achieved using such regulatory elements as internal promoters to drive the expression of therapeutic genes in viral vector constructs.

[0421] For example, the one or more heterologous nucleic acid molecules can be operably linked to a promoter for expression of the heterologous RNA and/or protein. For example, a heterologous nucleic acid that is operably linked to a promoter is also called an expression cassette. Hence, viruses provided herein can have the ability to express one or more heterologous genes. Gene expression can include expression of a protein encoded by a gene and/or expression of an RNA molecule encoded by a gene. In some embodiments, the viruses provided herein can express exogenous genes at levels high enough that permit harvesting products of the exogenous genes from the tumor. Exemplary promoters for the expression of heterologous genes are known in the art. The heterologous nucleic acid can be operatively linked to a native promoter or a heterologous promoter that is not native to the virus. Any suitable promoters, including synthetic and naturally-occurring and modified promoters, can be used. Exemplary promoters include synthetic promoters, including synthetic viral and animal promoters. Native promoters or heterologous promoters include, but are not limited to, viral promoters, such as vaccinia virus and adenovirus promoters.

[0422] In one example, the promoter is a poxvirus promoter, such as, for example, a vaccinia virus promoter. Vaccinia viral promoters for the expression of one or more heterologous genes can be synthetic or natural promoters, and include vaccinia early, intermediate, early/late and late promoters. Exemplary vaccinia viral promoters for controlling heterologous gene expression include, but are not limited to, P_{7.5k}, P₁₁ₖ, P_{SE}, P_{SEL}, P_{SL}, HSR, TK, P28, C11R, G8R, F17R, I3L, I8R, A1L, A2L, A3L, H1L, H3L, H5L, H6R, H8R, D1R, D4R, D5R, D9R, D11L, D12L, D13L, M1L, N2L, P4b or K1 promoters. Other viral promoters include, but are not limited to, adenovirus late promoter, Cowpox ATI promoter, or T7 promoter. Strong late promoters can be used to achieve high levels of expression of the heterologous genes. Early and intermediate-stage promoters also can be used. In one example, the promoters contain early and late promoter elements, for example, the vaccinia virus early/late promoter P_{7.5k}, vaccinia late promoter P₁₁ₖ, a synthetic early/late vaccinia P_{SEL} promoter (Patel et al., (1988) Proc. Natl. Acad. Sci. USA 85: 9431-9435; Davison and Moss, (1989) J Mol Biol 210: 749-769; Davison et al. (1990) Nucleic Acids Res. 18: 4285-4286; Chakrabarti et al. (1997), BioTechniques 23: 1094-1097). The viruses provided herein can exhibit differences in characteristics, such as attenuation, as a result of using a stronger promoter versus a weaker promoter. For example, in vaccinia, synthetic early/late and late promoters are relatively strong promoters, whereas vaccinia synthetic early, P_{7.5k} early/late, P_{7.5k} early, and P₂₈ late promoters are relatively weaker promoters (see e.g., Chakrabarti et al. (1997) BioTechniques 23(6) 1094-1097). Combinations of different promoters can be used to express different gene products in the same virus or two different viruses.

[0423] Expression of heterologous genes can be controlled by a constitutive promoter, or by an inducible promoter. For example, gene expression can be made inducible using a tetracycline-regulated promoter, whereby transcription is reversibly turned on or off in the presence of tetracycline or one of its derivative (e.g., doxycycline). In such a system, in the absence of an inducer, a tetracycline repressor (TetR) binds to the tet operator (tetO) to repress the activity of the promoter placed near the operator. In the presence of an inducer that binds to TetR, a conformational change occurs that prevents TetR from remaining bound to the operator, thereby permitting gene transcription.

[0424] In other examples, organ or tissue-specific expression can be controlled by regulatory sequences. In order to achieve expression only in the target organ or tissue, for example, a tumor to be treated, the foreign nucleotide sequence can be linked to a tissue specific promoter and used for gene therapy. Such promoters are well-known to those skilled in the art (see, e.g., Zimmermann et al., Neuron 12: 11-24 (1994); Vidal et al., EMBO J. 9: 833-840 (1990); Mayford et al., Cell 81: 891-904 (1995); and Pinkert et al., Genes & Dev. 1: 268-76 (1987)).

[0425] As is known in the art, regulatory sequences can permit constitutive expression of the exogenous gene or can permit inducible expression of the exogenous gene. Further, the regulatory sequence can permit control of the level of expression of the exogenous gene. In some examples, such as gene product manufacture and harvesting, the regulatory sequence can result in constitutive, high levels of gene expression. In some examples, such as anti-(gene product) antibody harvesting, the regulatory sequence can result in constitutive, lower levels of gene expression. In tumor therapy examples, a therapeutic protein can be under the control of an internally inducible promoter or an externally inducible promoter.

[0426] Hence, expression of heterologous genes can be controlled by a constitutive promoter or by an inducible promoter. Inducible promoters can be used to provide tissue specific expression of the heterologous gene or can be inducible by the addition of a regulatory molecule to provide temporal specific induction of the promoter. In some examples, inducible expression can be under the control of cellular or other factors present in a tumor cell or present in a virus-infected tumor cell. In further examples, inducible expression can be under the control of an administrable substance, including IPTG, RU486 or other known induction compounds. Additional regulatory sequences can be used to control the expression of the one or more heterologous genes inserted the virus. Any of a variety of regulatory sequences are available to one skilled in the art according to known factors and design preferences.

[0427] c. Exemplary Modified or Recombinant Viruses (Parental Strains)

[0428] Modified or recombinant vaccinia strains containing heterologous nucleic acid encoding a gene product or products have been or can be generated from any of a variety of vaccinia virus strains, including, but not limited to, Western Reserve (WR) (SEQ ID NO: 62), Copenhagen (SEQ ID NO: 63), Tashkent, Tian Tan, Lister, Wyeth, IHD-J, and IHD-W, Brighton, Ankara, MVA, Dairen I, LIPV, LC16M8, LC16MO, LIVP, WR 65-16, NYCBH. Such strains, or modified strains thereof, can be used as the parental or starting strain for insertion of heterologous DNA encoding a chromophore-producing enzyme or enzymes (e.g., a melanin-producing enzyme or enzymes), such as any described above, for use in the methods herein. The chromophore-producing enzyme or enzymes can replace the existing heterologous nucleic acid in the parental strain, or can be in addition to other introduced heterologous nucleic acid.

[0429] For example, recombinant vaccinia viruses, such as LIVP viruses, have been generated and are known in the art. Exemplary modified or recombinant vaccinia viruses provided herein for insertion of heterologous DNA encoding a chromophore-producing enzyme or enzymes (e.g., a melanin-producing enzyme or enzymes), such as any set forth above, are those derived from the Lister strain, and in particular the attenuated Lister strain LIVP. The modified LIVP viruses can be modified by insertion, deletion or amino acid replacement of heterologous nucleic acid compared to an LIVP strain having a genome set forth in any one of SEQ ID NOS: 1, 188 or 55-61, or having a genome that exhibits at least 97%, 98%, 99% or more sequence identity to any of SEQ ID NOS: 1, 188 or 55-61.

[0430] For example, known modified or recombinant LIVP viruses include GLV-1h68 or derivatives thereof. GLV-1h68 (also named RVGL21, SEQ ID NO: 2; described in U.S. Pat. Pub. No. 2005-0031643, now U.S. Pat. Nos. 7,588,767, 7,588,771, 7,662,398) is an attenuated virus of the LIVP strain containing a genome set forth in SEQ ID NO: 188 that contains DNA insertions in gene loci F14.5L (also designated in LIVP as F3) gene locus, thymidine kinase (TK) gene locus, and hemagglutinin (HA) gene locus with expression cassettes encoding detectable marker proteins. Specifically, GLV-1h68 contains an expression cassette containing a Ruc-GFP cDNA molecule (a fusion of DNA encoding Renilla luciferase and DNA encoding GFP) under the control of a vaccinia synthetic early/late promoter P_{SEL} ((P_{SEL})Ruc-GFP) inserted into the F14.5L gene locus; an expression cassette containing a DNA molecule encoding beta-galactosidase under the control of the vaccinia early/late promoter P_{7.5k} ((P_{7.5k})LacZ) and DNA encoding a rat transferrin receptor positioned in the reverse orientation for transcription relative to the vaccinia synthetic early/late promoter P_{SEL} ((P_{SEL})rTrfR) inserted into the TK gene locus (the resulting virus does not express transferrin receptor protein since the DNA molecule encoding the protein is positioned in the reverse orientation for transcription relative to the promoter in the cassette); and an expression cassette containing a DNA molecule encoding β-glucuronidase under the control of the vaccinia late promoter P₁₁ₖ ((P₁₁ₖ)gusA) inserted into the HA gene locus.

[0431] Other recombinant LIVP viruses are derived from GLV-1h68 and contain heterologous DNA that encodes a gene product or products (see e.g., U.S. Pub. Nos. US2003-0059400, US2003-0228261, US2007-0202572, US2007-0212727, US2009-0117034, US2009-0098529, U52009-0053244, US2009-0155287, US2009-0081639, US2009-0136917, US2009-0162288, US2010-0062016, US2010-0233078 and US2010-0196325; U.S. Pat. Nos. 7,588,767, 7,588,771, 7,662,398 and 7,754,221 and 7,763,420; and International Pub. No. WO 2009/139921). Examples of such recombinant viruses include those set forth in Table 5, including but not limited to, GLV-1h64 (set forth in SEQ ID NO: 189); GLV-1h188 (SEQ ID NO: 190), GLV-1h189 (SEQ ID NO: 191), GLV-1h190 (SEQ ID NO: 192), GLV-1h253 (SEQ ID NO: 193), and GLV-1h254 (SEQ ID NO: 3); GLV-1h311 (SEQ ID NO:65); GLV-1h312 (SEQ ID NO:66); GLV-1h330 (SEQ ID NO:210); or GLV-1h354 (SEQ ID NO:211).

[0432] Modified vaccinia viruses also include viruses that are modified by introduction of heterologous nucleic acid into an LIVP strain containing a genome set forth in any of SEQ ID NO: 55-61, or a genome that exhibits at least 97%, 98%, 99% or more sequence identity to any of SEQ ID NOS:55-61. For example, an exemplary modified vaccinia virus is a virus that is modified by insertion, deletion or replacement of heterologous nucleic acid compared to an LIVP strain having a genome set forth in SEQ ID NO: 55. An example of such as strain is GLV-2b372, which contains TurboFP635 (Far-red fluorescent protein “katushka”; set forth in SEQ ID NO: 50) under the control of the vaccinia synthetic early/late promoter at the TK locus. The genome of GLV-2b372 has the sequence of nucleotides set forth in SEQ ID NO: 194.

[0433] Exemplary modified or recombinant vaccinia viruses provided herein for insertion of heterologous DNA encoding a chromophore-producing enzyme or enzymes (e.g., a melanin-producing enzyme or enzymes), such as any set forth above, also include those derived from the WR strain. Examples of such recombinant viruses include those set forth in Table 5, including but not limited to, GLV-0b348 (set forth in SEQ ID NO: 201); GLV-0b358 (SEQ ID NO: 202), or GLV-0b365 (SEQ ID NO:203).

[0434] Table 5 sets forth exemplary viruses, the reference or parental vaccinia virus (e.g., LIVP set forth in SEQ ID NO: 1 or 188 or GLV-1h68 set forth in SEQ ID NO: 2) and the resulting genotype. The exemplary modifications of the Lister strain can be adapted to other vaccinia viruses (e.g., Western Reserve (WR), Copenhagen, Tashkent, Tian Tan, Lister, Wyeth, IHD-J, and IHD-W, Brighton, Ankara, MVA, Dairen I, LIPV, LC16M8, LC16MO, LIVP, WR 65-16, NYCBH). Any of these viruses, and other oncolytic viruses known in the art, can be further modified to encode a chromophore-producing enzyme or enzymes.

TABLE 5
Recombinant Viruses

| | | Genotype | | | | |
|---|---|---|---|---|---|---|
| Virus | Parent | | | A56R (HA | | |
| Name | Virus | F14.5L | J2R (TK locus) | locus) | A34R | A35R |

LIVP- & GLV-1h68-derived Virus Strains

| | | | | | | |
|---|---|---|---|---|---|---|
| GLV-1h68 | LIVP | (PSEL)Ruc-GFP | (PSEL)rTrfR- | (P11)gusA | wt | wt |
| | | | (P7.5)lacZ | | | |
| GLV-1i69 | GLV-1h68 | (PSEL)Ruc-GFP | (PSEL)rTrfR- | (P11)gusA | A34R from | wt |
| | | | (P7.5)lacZ | | IHD-J | |
| GLV-1h70 | GLV-1h68 | (PSEL)Ruc-GFP | (PSEL)rTrfR- | ko | wt | wt |
| | | | (P7.5)lacZ | | | |
| GLV-1h71 | GLV-1h68 | ko | (PSEL)rTrfR- | (P11)gusA | wt | wt |
| | | | (P7.5)lacZ | | | |
| GLV-1h72 | GLV-1h68 | (PSEL)Ruc-GFP | ko | (P11)gusA | wt | wt |
| GLV-1h73 | GLV-1h70 | ko | (PSEL)rTrfR- | ko | wt | wt |
| | | | (P7.5)lacZ | | | |
| GLV-1h74 | GLV-1h73 | ko | ko | ko | wt | wt |
| GLV-1h76 | GLV-1h68 | (PSEL)Ruc-GFP | (PSE)GM-CSF | (P11)gusA | wt | wt |
| GLV-1h77 | GLV-1h68 | (PSEL)Ruc-GFP | (PSEL)GM-CSF | (P11)gusA | wt | wt |
| GLV-1h78 | GLV-1h68 | (PSEL)Ruc-GFP | (PSL)GM-CSF | (P11)gusA | wt | wt |
| GLV-1h79 | GLV-1h68 | (PSEL)Ruc-GFP | (PSEL)mMCP-1 | (P11)gusA | wt | wt |
| GLV-1h80 | GLV-1h68 | (PSEL)Ruc-GFP | (PSL)mMCP-1 | (P11)gusA | wt | wt |
| GLV-1h81 | GLV-1h68 | (PSEL)Ruc-GFP | (PSEL)rTrfR- | (PSEL)hk5 | wt | wt |
| | | | (P7.5)lacZ | | | |
| GLV-1h82 | GLV-1h22 | (PSEL)Ruc-GFP | (PSEL)TrfR- | (PSEL)ftn | wt | wt |
| | | | (P7.5)lacZ | | | |
| GLV-1h83 | GLV-1h68 | (PSEL)Ruc-GFP | (PSEL)rTrfR- | (PSEL)ftn | wt | wt |
| | | | (P7.5)lacZ | | | |
| GLV-1h84 | GLV-1h68 | ko | (PSEL)CBG99- | ko | wt | wt |
| | | | mRFP1 | | | |
| GLV-1h85 | GLV-1h72 | ko | ko | (P11)gusA | wt | wt |
| GLV-1h86 | GLV-1h72 | (PSEL)Ruc-GFP | ko | ko | wt | wt |
| GLV-1j87 | GLV-1h68 | (PSEL)Ruc-GFP | (PSEL)rTrfR- | (P11)gusA | wt | ko |
| | | | (P7.5)lacZ | | | |
| GLV-1j88 | GLV-1h73 | ko | (PSEL)rTrfR- | ko | wt | ko |
| | | | (P7.5)lacZ | | | |
| GLV-1j89 | GLV-1h74 | ko | ko | ko | wt | ko |
| GLV-1h90 | GLV-1h68 | (PSEL)Ruc-GFP | (PSEL)rTrfR- | (PSE)sIL- | wt | wt |
| | | | (P7.5)lacZ | 6R/IL-6 | | |
| GLV-1h91 | GLV-1h68 | (PSEL)Ruc-GFP | (PSEL)rTrfR- | (PSEL)sIL- | wt | wt |
| | | | (P7.5)lacZ | 6R/IL-6 | | |
| GLV-1h92 | GLV-1h68 | (PSEL)Ruc-GFP | (PSEL)rTrfR- | (PSL)sIL- | wt | wt |
| | | | (P7.5)lacZ | 6R/IL-6 | | |
| GLV-1h93 | GLV-1h68 | (PSEL)Ruc-GFP | (PSEL)rTrfR- | (PSE)FCU1 | wt | wt |
| | | | (P7.5)lacZ | | | |
| GLV-1h94 | GLV-1h68 | (PSEL)Ruc-GFP | (PSEL)rTrfR- | (PSEL)FCU1 | wt | wt |
| | | | (P7.5)lacZ | | | |
| GLV-1h95 | GLV-1h68 | (PSEL)Ruc-GFP | (PSEL)rTrfR- | (PSL)FCU1 | wt | wt |
| | | | (P7.5)lacZ | | | |
| GLV-1h96 | GLV-1h68 | (PSE)IL-24 | (PSEL)rTrfR- | (P11)gusA | wt | wt |
| | | | (P7.5)lacZ | | | |
| GLV-1h97 | GLV-1h68 | (PSEL)IL-24 | (PSEL)rTrfR- | (P11)gusA | wt | wt |
| | | | (P7.5)lacZ | | | |
| GLV-1h98 | GLV-1h68 | (PSL)IL-24 | (PSEL)rTrfR- | (P11)gusA | wt | wt |
| | | | (P7.5)lacZ | | | |
| GLV-1h99 | GLV-1h68 | (PSE)hNET | (PSEL)rTrfR- | (P11)gusA | wt | wt |
| | | | (P7.5)lacZ | | | |
| GLV- | GLV-1h68 | (PSEL)Ruc-GFP | (PSE)hNET | (P11)gusA | wt | wt |
| 1h100 | | | | | | |
| GLV- | GLV-1h68 | (PSEL)Ruc-GFP | (PSL)hNET | (P11)gusA | wt | wt |
| 1h101 | | | | | | |
| GLV- | GLV-1h68 | (PSEL)Ruc-GFP | (PSEL)rTrfR- | (PSE)hDMT | wt | wt |
| 1h102 | | | (P7.5)lacZ | | | |
| GLV- | GLV-1h68 | (PSEL)Ruc-GFP | (PSL)hMCP1 | (P11)gusA | wt | wt |
| 1h103 | | | | | | |
| GLV- | GLV-1h68 | (PSEL)Ruc-GFP | (PSE)tTF-RGD | (P11)gusA | wt | wt |
| 1h104 | | | | | | |
| GLV- | GLV-1h68 | (PSEL)Ruc-GFP | (PSE/L)tTF-RGD | (P11)gusA | wt | wt |
| 1h105 | | | | | | |
| GLV- | GLV-1h68 | (PSEL)Ruc-GFP | (PSL)tTF-RGD | (P11)gusA | wt | wt |
| 1h106 | | | | | | |
| GLV- | GLV-1h68 | (PSEL)Ruc-GFP | (PSE)G6-FLAG | (P11)gusA | wt | wt |
| 1h107 | | | | | | |
| GLV- | GLV-1h68 | (PSEL)Ruc-GFP | (PSEL)G6-FLAG | (P11)gusA | wt | wt |
| 1h108 | | | | | | |
| GLV- | GLV-1h68 | (PSEL)Ruc-GFP | (PSL)G6-FLAG | (P11)gusA | wt | wt |
| 1h109 | | | | | | |
| GLV- | GLV-1h68 | (PSEL)Ruc-GFP | (PSEL)rTrfR- | (PSE)bfr | wt | wt |
| 1h110 | | | (P7.5)lacZ | | | |
| GLV- | GLV-1h68 | (PSEL)Ruc-GFP | (PSEL)rTrfR- | (PSEL)bfr | wt | wt |
| 1h111 | | | (P7.5)lacZ | | | |
| GLV- | GLV-1h68 | (PSEL)Ruc-GFP | (PSEL)rTrfR- | (PSL)bfr | wt | wt |
| 1h112 | | | (P7.5)lacZ | | | |
| GLV- | GLV-1h68 | (PSEL)Ruc-GFP | (PSEL)rTrfR- | (PSEL)bfrₒₚₜ | wt | wt |
| 1h113 | | | (P7.5)lacZ | | | |
| GLV- | GLV-1h68 | (PSEL)Ruc-GFP | (PSEL)rTrfR- | (PSE)mtr | wt | wt |
| 1h114 | | | (P7.5)lacZ | | | |
| GLV- | GLV-1h68 | (PSEL)Ruc-GFP | (PSEL)rTrfR- | (PSEL)mtr | wt | wt |
| 1h115 | | | (P7.5)lacZ | | | |
| GLV- | GLV-1h68 | (PSEL)Ruc-GFP | (PSE)mMnSOD | (P11)gusA | wt | wt |
| 1h116 | | | | | | |
| GLV- | GLV-1h68 | (PSEL)Ruc-GFP | (PSEL)mMnSOD | (P11)gusA | wt | wt |
| 1h117 | | | | | | |
| GLV- | GLV-1h68 | (PSEL)Ruc-GFP | (PSL)mMnSOD | (P11)gusA | wt | wt |
| 1h118 | | | | | | |
| GLV- | GLV-1h68 | (PSEL)Ruc-GFP | (PSE)mIP-10 | (P11)gusA | wt | wt |
| 1h119 | | | | | | |
| GLV- | GLV-1h68 | (PSEL)Ruc-GFP | (PSEL)mIP-10 | (P11)gusA | wt | wt |
| 1h120 | | | | | | |
| GLV- | GLV-1h68 | (PSEL)Ruc-GFP | (PSL)mIP-10 | (P11)gusA | wt | wt |
| 1h121 | | | | | | |
| GLV- | GLV-1h68 | (PSEL)Ruc-GFP | (PSE)mLIGHT | (P11)gusA | wt | wt |
| 1h122 | | | | | | |
| GLV- | GLV-1h68 | (PSEL)Ruc-GFP | (PSE/L)mLIGHT | (P11)gusA | wt | wt |
| 1h123 | | | | | | |
| GLV- | GLV-1h68 | (PSEL)Ruc-GFP | (PSL)mLIGHT | (P11)gusA | wt | wt |
| 1h124 | | | | | | |
| GLV- | GLV-1h68 | (PSEL)Ruc-GFP | (PSE)CBP | (P11)gusA | wt | wt |
| 1h125 | | | | | | |
| GLV- | GLV-1h68 | (PSEL)Ruc-GFP | (PSEL)CBP | (P11)gusA | wt | wt |
| 1h126 | | | | | | |
| GLV- | GLV-1h68 | (PSEL)Ruc-GFP | (PSL)CBP | (P11)gusA | wt | wt |
| 1h127 | | | | | | |
| GLV- | GLV-1h68 | (PSEL)Ruc-GFP | (PSE)P60 | (P11)gusA | wt | wt |
| 1h128 | | | | | | |
| GLV- | GLV-1h68 | (PSEL)Ruc-GFP | (PSEL)P60 | (P11)gusA | wt | wt |
| 1h129 | | | | | | |
| GLV- | GLV-1h68 | (PSEL)Ruc-GFP | (PSL)P60 | (P11)gusA | wt | wt |
| 1h130 | | | | | | |
| GLV- | GLV-1h68 | (PSEL)Ruc-GFP | (PSE)hFLH | (P11)gusA | wt | wt |
| 1h131 | | | | | | |
| GLV- | GLV-1h68 | (PSEL)Ruc-GFP | (PSEL)hFLH | (P11)gusA | wt | wt |
| 1h132 | | | | | | |
| GLV- | GLV-1h68 | (PSEL)Ruc-GFP | (PSL)hFLH | (P11)gusA | wt | wt |
| 1h133 | | | | | | |
| GLV- | GLV-1h68 | (PSEL)CBG99- | (PSEL)rTrfR- | (P11)gusA | wt | wt |
| 1h134 | | mRFP1 | (P7.5)lacZ | | | |
| GLV- | GLV-1h68 | wt | (PSEL)rTrfR- | (P11)gusA | wt | wt |
| 1e135 | | | (P7.5)lacZ | | | |
| GLV- | GLV-1h68 | (PSEL)Ruc-GFP | (PSE)PEDF | (P11)gusA | wt | wt |
| 1h136 | | | | | | |
| GLV- | GLV-1h68 | (PSEL)Ruc-GFP | (PSEL)PEDF | (P11)gusA | wt | wt |
| 1h137 | | | | | | |
| GLV- | GLV-1h68 | (PSEL)Ruc-GFP | (PSL)PEDF | (P11)gusA | wt | wt |
| 1h138 | | | | | | |
| GLV- | GLV-1h68 | (PSEL)Ruc-GFP | (PSEL)rTrfR- | (PSE)hNET | wt | wt |
| 1h139 | | | (P7.5)lacZ | | | |
| GLV- | GLV-1h68 | (PSEL)Ruc-GFP | (PSE)CYP11B1 | (P11)gusA | wt | wt |
| 1h140 | | | | | | |
| GLV- | GLV-1h68 | (PSEL)Ruc-GFP | (PSEL)CYP11B1 | (P11)gusA | wt | wt |
| 1h141 | | | | | | |
| GLV- | GLV-1h68 | (PSEL)Ruc-GFP | (PSL)CYP11B1 | (P11)gusA | wt | wt |
| 1h142 | | | | | | |
| GLV- | GLV-1h68 | (PSEL)Ruc-GFP | (PSE)CYP11B2 | (P11)gusA | wt | wt |
| 1h143 | | | | | | |
| GLV- | GLV-1h68 | (PSEL)Ruc-GFP | (PSEL)CYP11B2 | (P11)gusA | wt | wt |
| 1h144 | | | | | | |
| GLV- | GLV-1h68 | (PSEL)Ruc-GFP | (PSL)CYP11B2 | (P11)gusA | wt | wt |
| 1h145 | | | | | | |
| GLV- | GLV- | (PSEL)Ruc-GFP | (PSE)hNET | (PSE)IL-24 | wt | wt |
| 1h146 | 1h100 | | | | | |
| GLV- | GLV-1h68 | (PSEL)Ruc-GFP | (PSE)HACE1 | (P11)gusA | wt | wt |
| 1h147 | | | | | | |
| GLV- | GLV-1h68 | (PSEL)Ruc-GFP | (PSEL)HACE1 | (P11)gusA | wt | wt |
| 1h148 | | | | | | |
| GLV- | GLV-1h68 | (PSEL)Ruc-GFP | (PSL)HACE1 | (P11)gusA | wt | wt |
| 1h149 | | | | | | |
| GLV- | GLV- | (PSEL)Ruc-GFP | (PSL)hNET | (PSE)IL-24 | wt | wt |
| 1h150 | 1h101 | | | | | |
| GLV- | GLV-1h68 | (PSEL) Ruc-GFP | (PSE/L)TfR- | (PSE)hNIS | wt | wt |
| 1h151 | | | (P7.5)lacZ | | | |
| GLV- | GLV-1h68 | (PSEL) Ruc-GFP | (PSEL)TfR- | (PSE)hNISa | wt | wt |
| 1h153 | | | (P7.5)lacZ | | | |
| GLV- | GLV-1h22 | (PSEL) Ruc-GFP | (PSEL)TfR- | (PSEL)bfrₒₚₜ | wt | wt |
| 1h154 | | | (P7.5)lacZ | | | |
| GLV- | GLV-1h22 | (PSEL) Ruc-GFP | (PSEL)TfR- | (PSEL)hFH | wt | wt |
| 1h155 | | | (P7.5)lacZ | | | |
| GLV- | GLV- | (PSEL) Ruc-GFP | (PSEL)mtr | (PSEL)bfrₒₚₜ | wt | wt |
| 1h156 | 1h113 | | | | | |
| GLV- | GLV-1h68 | (PSEL) Ruc-GFP | (PSEL)mtr | (PSEL)hFH | wt | wt |
| 1h157 | | | | | | |
| GLV- | GLV-1h68 | (PSEL) Ruc-GFP | (PSEL)TfR- | (PSEL)G6- | wt | wt |
| 1h158 | | | (P7.5)lacZ | scAb | | |
| GLV- | GLV-1h68 | (PSEL) Ruc-GFP | (PSEL)TfR- | (PSL)G6- | wt | wt |
| 1h159 | | | (P7.5)lacZ | scAb | | |
| GLV- | GLV-1h68 | (PSEL)Ruc-GFP | (PSEL)luxAB | (P11)gusA | wt | wt |
| 1h160 | | | | | | |
| GLV- | GLV-1h68 | (PSEL)Ruc-GFP | (PSEL)TfR- | (PSEL)luxCD | wt | wt |
| 1h161 | | | (P7.5)lacZ | | | |
| GLV- | GLV-1h68 | (PSEL)luxE | (PSEL)rTrfR- | (P11)gusA | wt | wt |
| 1h162 | | | (P7.5)lacZ | | | |
| GLV- | GLV- | (PSEL)Ruc-GFP | (PSE)hNET | (PSEL)G6- | wt | wt |
| 1h163 | 1h100 | | | scAb | | |
| GLV- | GLV- | (PSEL)Ruc-GFP | (PSE)hNET | (PSEL)G6- | wt | wt |
| 1h164 | 1h100 | | | scAb | | |
| GLV- | GLV-1h68 | (PSEL)Ruc-GFP | (PSE)nAG | (P11)gusA | wt | wt |
| 1h165 | | | | | | |
| GLV- | GLV-1h68 | (PSEL)Ruc-GFP | (PSEL)NAG | (P11)gusA | wt | wt |
| 1h166 | | | | | | |
| GLV- | GLV-1h68 | (PSEL)Ruc-GFP | (PSL)nAG | (P11)gusA | wt | wt |
| 1h167 | | | | | | |
| GLV- | GLV-1h68 | (PSEL)Ruc-GFP | (PSE)RLN | (P11)gusA | wt | wt |
| 1h168 | | | | | | |
| GLV- | GLV-1h68 | (PSEL)Ruc-GFP | (PSEL)RLN | (P11)gusA | wt | wt |
| 1h169 | | | | | | |
| GLV- | GLV-1h68 | (PSEL)Ruc-GFP | (PSL)RLN | (P11)gusA | wt | wt |
| 1h170 | | | | | | |
| GLV- | GLV-1h68 | (PSEL)Ruc-GFP | (PSE)NM23A | (P11)gusA | wt | wt |
| 1h171 | | | | | | |
| GLV- | GLV-1h68 | (PSEL)Ruc-GFP | (PSEL)NM23A | (P11)gusA | wt | wt |
| 1h172 | | | | | | |
| GLV- | GLV-1h68 | (PSEL)Ruc-GFP | (PSL)NM23 | (P11)gusA | wt | wt |
| 1h173 | | | | | | |
| GLV- | GLV-1h68 | (PSEL)Ruc-GFP | (PSE)NPPA1 | (P11)gusA | wt | wt |
| 1h174 | | | | | | |
| GLV- | GLV-1h68 | (PSEL)Ruc-GFP | (PSEL)NPPA1 | (P11)gusA | wt | wt |
| 1h175 | | | | | | |
| GLV- | GLV-1h68 | (PSEL)Ruc-GFP | (PSL)NPPA1 | (P11)gusA | wt | wt |
| 1h176 | | | | | | |
| GLV- | GLV-1h68 | (PSEL)Ruc-GFP | (PSE)STAT1α | (P11)gusA | wt | wt |
| 1h177 | | | | | | |
| GLV- | GLV-1h68 | (PSEL)Ruc-GFP | (PSEL)STAT1α | (P11)gusA | wt | wt |
| 1h178 | | | | | | |
| GLV- | GLV-1h68 | (PSEL)Ruc-GFP | (PSL)STAT1α | (P11)gusA | wt | wt |
| 1h179 | | | | | | |
| GLV- | GLV-1h68 | (PSEL)Ruc-GFP | (PSE)CPG2 | (P11)gusA | wt | wt |
| 1h180 | | | | | | |
| GLV- | GLV-1h68 | (PSEL)Ruc-GFP | (PSEL)CPG2 | (P11)gusA | wt | wt |
| 1h181 | | | | | | |
| GLV- | GLV-1h68 | (PSEL)Ruc-GFP | (PSL)CPG2 | (P11)gusA | wt | wt |
| 1h182 | | | | | | |
| GLV- | GLV-1h68 | (PSEL)Ruc-GFP | (PSE)Ecad | (P11)gusA | wt | wt |
| 1h183 | | | | | | |
| GLV- | GLV-1h68 | (PSEL) Ruc-GFP | (PSE/L)TfR- | (PSE)magA | wt | wt |
| 1h184 | | | (P7.5)lacZ | | | |
| GLV- | GLV-1h68 | (PSEL)Ruc-GFP | (PSL)Ecad | (P11)gusA | wt | wt |
| 1h185 | | | | | | |
| GLV- | GLV-1h68 | (PSEL) Ruc-GFP | (PSEL)TfR- | (PSEL)FTL | wt | wt |
| 1h186 | | | (P7.5)lacZ | 498- | | |
| | | | | 499InsTC | | |
| GLV- | GLV-1h68 | (PSEL) Ruc-GFP | (PSEL)TfR- | (PSEL)FTL | wt | wt |
| 1h187 | | | (P7.5)lacZ | | | |
| GLV- | GLV-1h68 | (PSEL) Ruc-GFP | (PSEL)TfR- | (PSE)FUKW | wt | wt |
| 1h188 | | | (P7.5)lacZ | | | |
| GLV- | GLV-1h68 | (PSEL) Ruc-GFP | (PSEL)TfR- | (PSEL)FUKW | wt | wt |
| 1h189 | | | (P7.5)lacZ | | | |
| GLV- | GLV-1h68 | (PSEL) Ruc-GFP | (PSEL)TfR- | (PSL)FUKW | wt | wt |
| 1h190 | | | (P7.5)lacZ | | | |
| GLV- | GLV-1h68 | (PSEL)Ruc-GFP | (PSE)STAT1β | (P11)gusA | wt | wt |
| 1h191 | | | | | | |
| GLV- | GLV-1h68 | (PSEL)Ruc-GFP | (PSEL)STAT1β | (P11)gusA | wt | wt |
| 1h192 | | | | | | |
| GLV- | GLV-1h68 | (PSEL)Ruc-GFP | (PSL)STAT1β | (P11)gusA | wt | wt |
| 1h193 | | | | | | |
| GLV- | GLV- | (PSE)luxE | (PSEL)TfR- | (PSEL)luxCD | wt | wt |
| 1h194 | 1h161 | | (P7.5)lacZ | | | |
| GLV- | GLV- | (PSEL)Ruc-GFP | (PSE)luxAB | (PSEL)luxCD | wt | wt |
| 1h195 | 1h161 | | | | | |
| GLV- | GLV-1h68 | (PSEL)Ruc-GFP | (PSE)181a | (P11)gusA | wt | wt |
| 1h196 | | | | | | |
| GLV- | GLV-1h68 | | | | | |
| 1h197 | | | | | | |
| GLV- | GLV-1h68 | (PSEL)Ruc-GFP | (PSL)181a | (P11)gusA | wt | wt |
| 1h198 | | | | | | |
| GLV- | GLV-1h68 | (PSEL)Ruc-GFP | (PSE)335 | (P11)gusA | wt | wt |
| 1h199 | | | | | | |
| GLV- | GLV-1h68 | (PSEL)Ruc-GFP | (PSL)335 | (P11)gusA | wt | wt |
| 1h201 | | | | | | |
| GLV- | GLV-1h68 | | | | | |
| 1h202 | | | | | | |
| GLV- | GLV-1h68 | (PSEL)Ruc-GFP | (PSEL)126 | (P11)gusA | wt | wt |
| 1h203 | | | | | | |
| GLV- | GLV-1h68 | | | | | |
| 1h204 | | | | | | |
| GLV- | GLV-1h68 | (PSEL) Ruc-GFP | (PSEL)TfR- | (PSE)NAN | wt | wt |
| 1h205 | | | (P7.5)lacZ | OG | | |
| GLV- | GLV-1h68 | (PSEL) Ruc-GFP | (PSEL)TfR- | (PSE)Oct4 | wt | wt |
| 1h208 | | | (P7.5)lacZ | | | |
| GLV- | GLV-1h68 | (PSEL)Ruc-GFP | (P7.5E)hEPO | (P11)gusA | wt | wt |
| 1h210 | | | | | | |
| GLV- | GLV-1h68 | (PSEL)Ruc-GFP | (PSE)hEPO | (P11)gusA | wt | wt |
| 1h211 | | | | | | |
| GLV- | GLV-1h68 | (PSEL)Ruc-GFP | (PSEL)hEPO | (P11)gusA | wt | wt |
| 1h212 | | | | | | |
| GLV- | GLV-1h68 | (PSEL)Ruc-GFP | (PSL)hEPO | (P11)gusA | wt | wt |
| 1h213 | | | | | | |
| GLV- | GLV-1h68 | (PSEL)Ruc-GFP | (PSE)OspF | (P11)gusA | wt | wt |
| 1h214 | | | | | | |
| GLV- | GLV-1h68 | (PSEL)Ruc-GFP | (PSE)OspG | (P11)gusA | wt | wt |
| 1h215 | | | | | | |
| GLV- | GLV-1h68 | (PSEL)Ruc-GFP | (PSEL)OspG | (P11)gusA | wt | wt |
| 1h216 | | | | | | |
| GLV- | GLV-1h68 | (PSEL)Ruc-GFP | (PSL)OspG | (P11)gusA | wt | wt |
| 1h217 | | | | | | |
| GLV- | GLV-1h84 | ko | (PSEL)CBG99- | (PSE)RLN | wt | wt |
| 1h218 | | | mRFP1 | | | |
| GLV- | GLV-1h84 | ko | (PSEL)CBG99- | (PSEL)RLN | wt | wt |
| 1h219 | | | mRFP1 | | | |
| GLV- | GLV-1h84 | ko | (PSEL)CBG99- | (PSL)RLN | wt | wt |
| 1h220 | | | mRFP1 | | | |
| GLV- | GLV- | (PSE)luxE | (PSEL)luxAB | (P11)gusA | wt | wt |
| 1h221 | 1h160 | | | | | |
| GLV- | GLV-1h68 | (PSEL)Ruc-GFP | (PSE)Ngn3 | (P11)gusA | wt | wt |
| 1h222 | | | | | | |
| GLV- | GLV-1h68 | (PSEL)Ruc-GFP | (PSEL)Ngn3 | (P11)gusA | wt | wt |
| 1h223 | | | | | | |
| GLV- | GLV-1h68 | (PSEL)Ruc-GFP | (PSL)Ngn3 | (P11)gusA | wt | wt |
| 1h224 | | | | | | |
| GLV- | GLV-1h68 | (PSEL)Ruc-GFP | (PSE)hADH | (P11)gusA | wt | wt |
| 1h225 | | | | | | |
| GLV- | GLV-1h68 | (PSEL)Ruc-GFP | (PSEL)hADH | (P11)gusA | wt | wt |
| 1h226 | | | | | | |
| GLV- | GLV-1h68 | (PSEL)Ruc-GFP | (PSL)hADH | (P11)gusA | wt | wt |
| 1h227 | | | | | | |
| GLV- | GLV- | (PSE)luxE | (PSE)luxAB | (PSEL)luxCD | wt | wt |
| 1h228 | 1h194 | | | | | |
| GLV- | GLV- | (PSEL)luxE | (PSE)luxAB | (PSEL)luxCD | wt | wt |
| 1h229 | 1h195 | | | | | |
| GLV- | GLV-1h68 | (PSEL)Ruc-GFP | (PSE)Myc-CTR1 | (P11)gusA | wt | wt |
| 1h230 | | | | | | |
| GLV- | GLV-1h68 | (PSEL)Ruc-GFP | (PSL)Myc-CTR1 | (P11)gusA | wt | wt |
| 1h231 | | | | | | |
| GLV- | GLV-1h68 | (PSEL)Ruc-GFP | (PSE)CTR1 | (P11)gusA | wt | wt |
| 1h232 | | | | | | |
| GLV- | GLV-1h68 | (PSEL)Ruc-GFP | (PSE)mPEDF | (P11)gusA | wt | wt |
| 1h233 | | | | | | |
| GLV- | GLV-1h68 | (PSEL)Ruc-GFP | (PSEL)mPEDF | (P11)gusA | wt | wt |
| 1h234 | | | | | | |
| GLV- | GLV-1h68 | (PSEL)Ruc-GFP | (PSL)mPEDF | (P11)gusA | wt | wt |
| 1h235 | | | | | | |
| GLV- | GLV-1h73 | (PSEL)Ruc-GFP | rtfr(PEL) | (PSE)WTC | wt | wt |
| 1h236 | | | (P7.5)lacZ | DC6 | | |
| GLV- | GLV-1h73 | (PSEL)Ruc-GFP | rtfr(PEL) | (PSE)MutC | wt | wt |
| 1h237 | | | (P7.5)lacZ | DC6 | | |
| GLV- | GLV-1h68 | (PSEL) Ruc-GFP | (PSEL)TfR- | (PSL)CBG9 | wt | wt |
| 1h238 | | | (P7.5)lacZ | 9-mRFP1 | | |
| GLV- | GLV-1h68 | (PSEL)Ruc-GFP | (PSE)GLAF-3 | (P11)gusA | wt | wt |
| 1h239 | | | | | | |
| GLV- | GLV-1h68 | (PSEL)Ruc-GFP | (PSEL)GLAF-3 | (P11)gusA | wt | wt |
| 1h240 | | | | | | |
| GLV- | GLV-1h68 | (PSEL)Ruc-GFP | (PSL)GLAF-3 | (P11)gusA | wt | wt |
| 1h241 | | | | | | |
| GLV- | GLV-1h68 | (PSEL)Ruc-GFP | (PE)luxABCDE | (P11)gusA | wt | wt |
| 1h242 | | | | | | |
| GLV- | GLV- | (PSEL)Ruc-GFP | (PE)luxABCDE | (PSE)frp | wt | wt |
| 1h243 | 1h242 | | | | | |
| GLV- | GLV- | (PSEL) Ruc-GFP | (PSE)hNISa | (PSEL)FUKW | wt | wt |
| 1h244 | 1h189 | | | | | |
| GLV- | GLV- | (PSEL) Ruc-GFP | (PSEL)hNISa | (PSEL)FUKW | wt | wt |
| 1h245 | 1h189 | | | | | |
| GLV- | GLV- | (PSEL) Ruc-GFP | (PSL)hNISa | (PSEL)FUKW | wt | wt |
| 1h246 | 1h189 | | | | | |
| GLV- | GLV-1h68 | (PSEL) Ruc-GFP | (PSEL)TfR- | (PSE)IFP | wt | wt |
| 1h247 | | | (P7.5)lacZ | | | |
| GLV- | GLV-1h168 | (PSEL) Ruc-GFP | (PSEL)TfR | (PSEL)IFP | wt | wt |
| 1h248 | | | (P7.5)lacZ | | | |
| GLV- | GLV-1h68 | (PSEL) Ruc-GFP | (PSEL)TfR- | (PSL)IFP | wt | wt |
| 1h249 | | | (P7.5)lacZ | | | |
| GLV- | GLV- | (PSEL) Ruc-GFP | (PSEL)TfR- | (PSL)FUKW | wt | wt |
| 1h250 | 1h190 | | (P7.5)lacZ | | | |
| GLV- | GLV-1h68 | (PSE)hNISa | (PSEL)rTrfR- | (P11)gusA | wt | wt |
| 1h251 | | | (P7.5)lacZ | | | |
| GLV- | GLV-1h68 | (PSEL)Ruc-GFP | (PSE)hNISa | (P11)gusA | wt | wt |
| 1h252 | | | | | | |
| GLV- | GLV-1h71 | ko | (PSEL)TfR- | (PSE)FUKW | wt | wt |
| 1h253 | | | (P7.5)lacZ | | | |
| GLV- | GLV-1h71 | ko | (PSEL)TfR- | (PSL)FUKW | wt | wt |
| 1h254 | | | (P7.5)lacZ | | | |
| GLV- | GLV-1h68 | (PSEL)Ruc-GFP | (PSE)hMMP9 | (P11)gusA | wt | wt |
| 1h255 | | | | | | |
| GLV- | GLV-1h68 | (PSEL)Ruc-GFP | (PSL)hMMP9 | (P11)gusA | wt | wt |
| 1h256 | | | | | | |
| GLV- | GLV-1h68 | (PSEL) Ruc-GFP | (PSEL)TfR- | (PSE)mNeptune | wt | wt |
| 1h257 | | | (P7.5)lacZ | | | |
| GLV- | GLV-1h68 | (PSEL) Ruc-GFP | (PSEL)TfR- | (PSEL)mNeptune | wt | wt |
| 1h258 | | | (P7.5)lacZ | | | |
| GLV- | GLV-1h68 | (PSEL) Ruc-GFP | (PSEL)TfR- | (PSL)mNeptune | wt | wt |
| 1h259 | | | (P7.5)lacZ | | | |
| GLV- | GLV-1h68 | (PSE)mNeptune | (PSEL)rTrfR- | (P11)gusA | wt | wt |
| 1h260 | | | (P7.5)lacZ | | | |
| GLV- | GLV-1h68 | (PSEL)mNeptune | (PSEL)rTrfR- | (P11)gusA | wt | wt |
| 1h261 | | | (P7.5)lacZ | | | |
| GLV- | GLV-1h68 | (PSL)mNeptune | (PSEL)rTrfR- | (P11)gusA | wt | wt |
| 1h262 | | | (P7.5)lacZ | | | |
| GLV- | GLV- | (PSE)mNeptune | (PSE)hNET | (PSL)G6- | wt | wt |
| 1h263 | 1h164 | | | scAb | | |
| GLV- | GLV- | (PSEL)mNeptune | (PSE)hNET | (PSL)G6- | wt | wt |
| 1h264 | 1h164 | | | scAb | | |
| GLV- | GLV- | (PSL)mNeptune | (PSE)hNET | (PSL)G6- | wt | wt |
| 1h265 | 1h164 | | | scAb | | |
| GLV- | GLV- | (PSEL) Ruc-GFP | (PSE)AlstR | (PSEL)FUKW | wt | wt |
| 1h266 | 1h189 | | | | | |
| GLV- | GLV- | (PSEL) Ruc-GFP | (PSEL)AlstR | (PSEL)FUKW | wt | wt |
| 1h267 | 1h189 | | | | | |
| GLV- | GLV- | (PSEL) Ruc-GFP | (PSL)AlstR | (PSEL)FUKW | wt | wt |
| 1h268 | 1h189 | | | | | |
| GLV- | GLV- | (PSEL) Ruc-GFP | (PSE)PEPR1 | (PSEL)FUKW | wt | wt |
| 1h269 | 1h189 | | | | | |
| GLV- | GLV- | (PSEL) Ruc-GFP | (PSEL)PEPR1 | (PSEL)FUKW | wt | wt |
| 1h270 | 1h189 | | | | | |
| GLV- | GLV- | (PSEL) Ruc-GFP | (PSL)PEPR1 | (PSEL)FUKW | wt | wt |
| 1h271 | 1h189 | | | | | |
| GLV- | GLV- | (PSEL) Ruc-GFP | (PSE)LAT4 | (PSEL)FUKW | wt | wt |
| 1h272 | 1h189 | | | | | |
| GLV- | GLV- | (PSEL) Ruc-GFP | (PSEL)LAT4 | (PSEL)FUKW | wt | wt |
| 1h273 | 1h189 | | | | | |
| GLV- | GLV- | (PSEL) Ruc-GFP | (PSL)LAT4 | (PSEL)FUKW | wt | wt |
| 1h274 | 1h189 | | | | | |
| GLV- | GLV- | (PSEL) Ruc-GFP | (PSE)Cyp51 | (PSEL)FUKW | wt | wt |
| 1h275 | 1h189 | | | | | |
| GLV- | GLV- | (PSEL) Ruc-GFP | (PSEL)Cyp51 | (PSEL)FUKW | wt | wt |
| 1h276 | 1h189 | | | | | |
| GLV- | GLV- | (PSEL) Ruc-GFP | (PSL)Cyp51 | (PSEL)FUKW | wt | wt |
| 1h277 | 1h189 | | | | | |
| GLV- | GLV- | (PSEL)Ruc-GFP | (PSE)BMP4 | (PSEL)FUKW | wt | wt |
| 1h284 | 1h189 | | | | | |
| GLV- | GLV- | (PSEL)Ruc-GFP | (PSEL)BMP4 | (PSEL)FUKW | wt | wt |
| 1h285 | 1h189 | | | | | |
| GLV- | GLV- | (PSEL)Ruc-GFP | (PSL)BMP4 | (PSEL)FUKW | wt | wt |
| 1h286 | 1h189 | | | | | |
| GLV- | GLV-1h68 | (P_{SEL})Ruc-GFP | (P_{SL})tetO-CBG99- | (P₁₁ₖ)gusA | wt | wt |
| 1h311 | | | mRFP | | | |
| GLV- | GLV- | (P_{7.5k})-TetR | (P_{SL})tetO-CBG99- | (P₁₁ₖ)gusA | wt | wt |
| 1h312 | 1h311 | | mRFP | | | |
| GLV- | GLV-1h68 | (P_{7.5})tetR | (P_{SEL})rTrfR- | (P₁₁ₖ)gusA | wt | wt |
| 1h330 | | | (P_{7.5k})LacZ | | | |
| GLV- | GLV- | (P_{SEL})tetR | (P_{SL})tetO-CBG99- | (P₁₁ₖ)gusA | wt | wt |
| 1h354 | 1h311 | | mRFP1 | | | |

LIVP 1.1.1-Derived Virus Strains

| | | | | | | |
|---|---|---|---|---|---|---|
| GLV- | LIVP 1.1.1 | wt | (P_{SEL})FUKW | wt | wt | wt |
| 2b372 | | | | | | |

WR-Derived Strains

| | | | | | | |
|---|---|---|---|---|---|---|
| GLV- | WR | wt | (P_{SL})-tetO-CBG99- | wt | wt | wt |
| 0b348 | | | mRFP1 | | | |
| GLV- | GLV- | wt | (P_{SE})EFNA1 | wt | wt | wt |
| 0b358 | 0b348 | | | | | |
| GLV- | GLV- | wt | (P_{SE})EFNA1 | (P_{SEL})FUKW | wt | wt |
| 0e365 | 0b358 | | | | | |

[0435] d. Exemplary Vaccinia Viruses Encoding a Chromophore-Producing Enzyme or Enzymes

[0436] Exemplary vaccinia viruses provided herein, for use in the methods and methods of use herein, are vaccinia viruses that contain nucleic acid encoding a chromophore-producing enzyme that is a tyrosinase enzyme. The vaccinia virus can be any vaccinia virus, such as any known in the art or described above. In particular examples, the vaccinia virus is a Lister strain such as an LIVP virus, a clonal strain thereof or a derivative thereof that has been previously modified by insertion of heterologous DNA encoding a therapeutic product or reporter. The vaccinia virus also can be a WR strain, a clonal strain thereof or a derivative thereof that has been previously modified by insertion of heterologous DNA encoding a therapeutic product or reporter. Hence, any of the vaccinia viruses, modified viruses or recombinant viruses described above can be adapted to contain a sequence of nucleotides encoding a tyrosinase enzyme.

[0437] The vaccinia virus can be modified by insertion of nucleotides encoding a tyrosinase enzyme, such as any described above. For example, the virus is modified by insertion of a sequence of nucleotides encoding a tyrosinase enzyme having the sequence of amino acids set forth in any of SEQ ID NOS: 7, 81, 82, 84, 85, 87, 89, 91, 93, 95, 97, 99, 101, 103, 105, 107, 109, 111, 113, 115, or 117, or a mature form thereof lacking the signal sequence or a sequence of amino acids that exhibits at least 75% sequence identity to any of SEQ ID NOS: 7, 81, 82, 84, 85, 87, 89, 91, 93, 95, 97, 99, 101, 103, 105, 107, 109, 111, 113, 115, or 117, or a mature form thereof lacking the signal sequence. For example, the nucleic acid molecule encodes a tyrosinase enzyme having a sequence of amino acids that exhibits at least 80%, 85%, 86%, 87%, 88%, 89%, 90%, 91%, 92%, 93%, 94%, 95%, 96%, 97%, 98%, 99% or more sequence identity to any of SEQ ID NOS: 7, 81, 82, 84, 85, 87, 89, 91, 93, 95, 97, 99, 101, 103, 105, 107, 109, 111, 113, 115, or 117, or a mature form thereof lacking the signal sequence. The inserted nucleotide sequence can contain the sequence of nucleotides set forth in any of SEQ ID NOS: 6, 80, 83, 86, 88, 90, 92, 94, 96, 98, 100, 102, 104, 106, 108, 110, 112, 114, 116 or 118 or a sequence of nucleotides that exhibits at least 70% sequence identity to any of SEQ ID NOS: 6, 80, 83, 86, 88, 90, 92, 94, 96, 98, 100, 102, 104, 106, 108, 110, 112, 114, 116 or 118, for example, a sequence of nucleotides that exhibits at least 75%, 80%, 85%, 86%, 87%, 88%, 89%, 90%, 91%, 92%, 93%, 94%, 95%, 96%, 97%, 98%, 99% or more sequence identity to any SEQ ID NOS: 6, 80, 83, 86, 88, 90, 92, 94, 96, 98, 100, 102, 104, 106, 108, 110, 112, 114, 116 or 118.

[0438] The nucleic acid molecule encoding the tyrosinase enzyme can be operably linked to a promoter for expression of the heterologous RNA and/or protein. The promoter can be any promoter, such as any described herein above or known in the art. In particular examples herein, the promoter is a strong promoter in order to achieve high levels of expression and overproduction of tyrosinase in cells such that eumelanin is produced over pheomelanin. For example, the promoter is a late viral promoter, a retroviral LTR or other strong eukaryotic promoter. Examples of such promoters are adenoviral major late promoter, vaccinia synthetic early-late promoter (P_{SEL}), vaccinia synthetic late promoter (P_{SL}), simian virus (SV40) promoter, cytomegalovirus (CMV) promoter, respiratory syncytial virus (RSV) promoter, human elongation factor 1α-subunit (EF1-1α) promoter, a ubiquitin C promoter (Ubc), a phosphoglycerate kinase-1 (PGK) promoter, small nuclear RNA U1b promoter or glucose 6-phosphate dehydrogenase promoter. In particular, the encoded tyrosinase enzyme is under control of the vaccinia synthetic early-late promoter (P_{SEL}; SEQ ID NO:169) or the vaccinia synthetic early promoter (P_{SE}; SEQ ID NO:168), and generally under control of the vaccinia synthetic early-late promoter (P_{SEL}; SEQ ID NO:169). Examples of such viruses include, for example, GLV-1h326 (SEQ ID NO:69), GLV-1h327 (SEQ ID NO:70), GLV-1h459 (SEQ ID NO: 213), GLV-1h460 (SEQ ID NO:214), GLV-1h461 (SEQ ID NO:215), GLV-1h462 (SEQ ID NO:216), GLV-2b482 (SEQ ID NO:200) or GLV-0e407 (SEQ ID NO:205).

[0439] The promoter operatively linked to the tyrosinase enzyme or other chromophore-producing enzyme also can be regulated to be inducible in order to regulate gene expression of the chromophore-producing enzyme. In particular examples herein, a tetracycline-inducible gene expression system is employed such that the promoter controlling expression of the chromophore-producing enzyme (e.g., tyrosinase) bears a tet operon (tetO) that can be controlled by a tetR in the absence of an inducer. In the presence of an inducer, such as tetracycline or a derivative of tetracycline (e.g., doxycycline, oxytetracycline, minocycline or other derivative), transcription can be induced. Examples of such viruses are GLV-1h461 (SEQ ID NO:215) or GLV-1h462 (SEQ ID NO: 216).

[0440] The vaccinia virus also can be modified by insertion of a sequence of nucleotides encoding a further accessory melanin-producing enzyme. In such examples, the accessory melanin-producing enzyme is one that contributes to the production of eumelanin in a host cell into which it is expressed. Examples of such enzymes are tyrosinase-related protein 1 and dopachrome tautomerase as described herein above. The sequences encoding the accessory melanin-producing enzyme are operatively linked to a promoter for expression thereof. The promoter can be the same promoter or a different promoter than that controlling expression of the tyrosinase enzyme. In some examples, the sequences encoding the tyrosinase enzyme and the accessory melanin-producing enzyme or enzymes can be driven under control of the same promoter. The sequences can be separated by an internal ribosome entry site (IRES).

[0441] Thus, in some examples, a vaccinia virus, such as a Lister virus (e.g., LIVP) contains a sequence of nucleotides encoding a tyrosinase-related protein 1 (TRP-1; Tyrp1) enzyme having the sequence of amino acids set forth in any of SEQ ID NOS: 20, 120, 121, 123, 124, 126, 127, 129, 131, 133, 135, 137, 139, 141, 142 or 144, or a mature form thereof lacking the signal sequence, or a sequence of amino acids that exhibits at least 75% or more sequence identity to any of SEQ ID NOS: 20, 120, 121, 123, 124, 126, 127, 129, 131, 133, 135, 137, 139, 141, 142 or 144 or the mature form thereof lacking the signal sequence, such as a sequence of amino acids that exhibits at least 80%, 85%, 86%, 87%, 88%, 89%, 90%, 91%, 92%, 93%, 94%, 95%, 96%, 97%, 98%, 99% or more sequence identity to any of SEQ ID NOS: 20, 120, 121, 123, 124, 126, 127, 129, 131, 133, 135, 137, 139, 141, 142 or 144, or a mature form thereof lacking the signal sequence. For example, the nucleotide sequence can be any set forth in any of SEQ ID NOS: 19, 119, 122, 125, 128, 130, 132, 134, 136, 138, 140, 143 or 145 or a sequence of nucleotides that exhibits at least 70% sequence identity to any of SEQ ID NOS: 19, 119, 122, 125, 128, 130, 132, 134, 136, 138, 140, 143 or 145, such as at least 75%, 80%, 85%, 86%, 87%, 88%, 89%, 90%, 91%, 92%, 93%, 94%, 95%, 96%, 97%, 98%, 99% or more sequence identity to any SEQ ID NOS: 19, 119, 122, 125, 128, 130, 132, 134, 136, 138, 140, 143 or 145. Examples of such viruses are GLV-1h310 (SEQ ID NO:64), GLV-1h322 (SEQ ID NO:67); GLV-1h323 (SEQ ID NO:206); GLV-1h324 (SEQ ID NO:68), GLV-1h458 (SEQ ID NO: 212); GLV-2b452 (SEQ ID NO:198), GLV-2b453 (SEQ ID NO:199) or GLV-0e406 (SEQ ID NO:204).

[0442] In other examples, a vaccinia virus, such as a Lister virus (e.g., LIVP) contains a sequence of nucleotides encoding a DCT enzyme or an enzymatically active portion thereof or an enzymatically active variant thereof, such as a DCT enzyme having the sequence of amino acids set forth in any of SEQ ID NOS: 30, 146, 147, 148, 150, 152, 154, 156, 158, 160, 162, 164 or 166, or a mature form thereof lacking the signal sequence, or a sequence of amino acids that exhibits at least 75% or more sequence identity to any of SEQ ID NOS: 30, 146, 147, 148, 150, 152, 154, 156, 158, 160, 162, 164 or 166 or the mature form thereof lacking the signal sequence, such as at least 80%, 85%, 86%, 87%, 88%, 89%, 90%, 91%, 92%, 93%, 94%, 95%, 96%, 97%, 98%, 99% or more sequence identity to any of SEQ ID NOS: 30, 146, 147, 148, 150, 152, 154, 156, 158, 160, 162, 164 or 166, or a mature form thereof lacking the signal sequence. The nucleotide sequence can be any set forth in SEQ ID NOS: 29, 149, 151, 153, 155, 157, 159, 161, 163, 165 or 167 or a sequence of nucleotides that exhibits at least 70% sequence identity to any of SEQ ID NOS: 29, 149, 151, 153, 155, 157, 159, 161, 163, 165 or 167, such as at least 75%, 80%, 85%, 86%, 87%, 88%, 89%, 90%, 91%, 92%, 93%, 94%, 95%, 96%, 97%, 98%, 99% or more sequence identity to any SEQ ID NOS: 29, 149, 151, 153, 155, 157, 159, 161, 163, 165 or 167.

[0443] The genotypes of exemplary vaccinia viruses encoding a tyrosinase enzyme are set forth in Table 6. Among such viruses are those that also encode tyrosinase-related protein 1 (TRP-1; Tyrp1). Gene transcription of the enzyme is controlled by a promoter operatively linked to the nucleic acid encoding the tyrosinase enzyme (i.e., mTyr) and/or tyrosinase-related protein 1 (i.e., Tyrp1). In some cases, a tetracycline-inducible gene expression system is included. Hence, provided herein for use in the methods herein are vaccinia viruses having a genome containing the sequence of nucleotides set forth in any of SEQ ID NOS: 64, 67-70, 198-200, 204-206 or 212-216, or a sequence of nucleotides that exhibits at least 75% sequence identity to any of SEQ ID NOS: 64, 67-70, 198-200, 204-206 or 212-216 such as at least 80%, 81%, 82%, 83%, 84%, 85%, 86%, 87%, 88%, 89%, 90%, 91%, 92%, 93%, 94%, 95%, 96%, 97%, 98%, 99% or more sequence identity to any of SEQ ID NOS: 64, 67-70, 198-200, 204-206 or 212-216.

TABLE 6
Tyrosinase and Tyrosinase/Tyrosinase-Related Protein 1 - Expressing Virus
Strains

| | | | | | | |
|---|---|---|---|---|---|---|
| | SEQ | Vaccinia | | | | |
| virus | ID | virus | parent | F14.5L | | |
| name | NO: | type | strain | locus | TK locus | HA locus |

tyrosinase-expressing virus strains

| | | | | | | |
|---|---|---|---|---|---|---|
| GLV- | 69 | LIVP | GLV- | (P_{SEL})Ruc- | (P_{SE})mTyr | (P₁₁ₖ)gusA |
| 1h326 | | | 1h311 | GFP | | |
| GLV- | 70 | LIVP | GLV- | (P_{SEL})Ruc- | (P_{SEL})mTyr | (P₁₁ₖ)gusA |
| 1h327 | | | 1h311 | GFP | | |
| GLV- | 213 | LIVP | GLV- | (P_{SE})hNISa | (P_{SEL})mTyr | (P₁₁ₖ)gusA |
| 1h459 | | | 1h327 | | | |
| GLV- | 214 | LIVP | GLV- | (P_{SEL})Ruc- | (P_{SL})tetO-mTyr | (P₁₁ₖ)gusA |
| 1h460 | | | 1h311 | GFP | | |
| GLV- | 215 | LIVP | GLV- | (P_{7.5})tetR | (P_{SL})tetO-mTyr | (P₁₁ₖ)gusA |
| 1h461 | | | 1h330 | | | |
| GLV- | 216 | LIVP | GLV- | (P_{SEL})tetR | (P_{SL})tetO-mTyr | (P₁₁ₖ)gusA |
| 1h462 | | | 1h354 | | | |
| GLV- | 200 | LIVP | GLV- | wt | (P_{SEL})mTyr | wt |
| 2b482 | | | 2b372 | | | |
| GLV- | 205 | WR | GLV- | wt | (P_{SEL})mTyr | (P_{SEL})FUKW |
| 0e407 | | | 0e365 | | | |

tyrosinase- and tyrosinase-related protein 1- expressing virus strains

| | | | | | | |
|---|---|---|---|---|---|---|
| GLV- | 64 | LIVP | GLV- | (knock-out) | (P_{SEL})Tyrp1- | (P_{SL})TurboFP635 |
| 1h310 | | | 1h254 | | (P_{SEL})mTyr | |
| GLV- | 67 | LIVP | GLV- | (P_{SEL})Ruc- | (P_{SE})Tyrp1- | (P₁₁ₖ)gusA |
| 1h322 | | | 1h311 | GFP | (P_{SE})mTyr | |
| GLV- | 206 | LIVP | GLV- | (P_{SEL})Ruc- | (P_{SEL})Tyrp1- | (P₁₁ₖ)gusA |
| 1h323 | | | 1h311 | GFP | (P_{SEL})mTyr | |
| GLV- | 68 | LIVP | GLV- | (P_{SEL})Ruc- | (P_{SE})Tyrp1- | (P₁₁ₖ)gusA |
| 1h324 | | | 1h311 | GFP | (P_{SEL})mTyr | |
| GLV- | | LIVP | GLV- | (P_{SEL})Ruc- | (P_{SEL})Tyrp1- | (P₁₁ₖ)gusA |
| 1h325 | | | 1h311 | GFP | (P_{SE})mTyr | |
| GLV- | 212 | LIVP | GLV- | (P_{SE})hNISa | (P_{SE})Tyrp1- | (P₁₁ₖ)gusA |
| 1h458 | | | 1h324 | | (P_{SEL})mTyr | |
| GLV- | 198 | LIVP | GLV- | wt | (P_{SEL})Tyrp1- | wt |
| 2b452 | | | 2b372 | | (P_{SEL})mTyr | |
| GLV- | 199 | LIVP | GLV- | wt | (P_{SEL})mTyr | wt |
| 2b453 | | | 2b372 | | | |
| GLV- | 204 | WR | GLV- | wt | (P_{SE})Tyrp1- | (P_{SEL})FUKW |
| 0e406 | | | 0e365 | | (P_{SEL})mTyr | |

[0444] e. Methods of Generating Modified Viruses

[0445] The viruses for use in the compositions and methods herein can be modified by insertion, deletion, replacement or mutation as described herein, for example insertion or replacement of heterologous nucleic acid, using standard methodologies well-known in the art for modifying viruses. Methods for modification include, for example, in vitro recombination techniques, synthetic methods, direct cloning, and in vivo recombination methods as described, for example, in Sambrook et al., Molecular Cloning: A Laboratory Manual, 2nd edition, Cold Spring Harbor Laboratory Press, cold Spring Harbor N.Y. (1989), and in the Examples disclosed herein.

[0446] For example, generation of recombinant viruses, including recombinant vaccinia virus, is well-known in the art, and typically involves the generation of gene cassettes or transfer vectors using standard molecular biology techniques (see, e.g., U.S. Pat. No. 7,588,767 and US2009-0053244-A1, which describe exemplary methods of generating recombinant LIVP vaccinia viruses). Such techniques include various nucleic acid manipulation techniques, nucleic acid transfer protocols, nucleic acid amplification protocols, and other molecular biology techniques known in the art.

[0447] For example, point mutations or small insertions or deletions can be introduced into a gene of interest through the use of oligonucleotide mediated site-directed mutagenesis. In another example, homologous recombination can be used to introduce a mutation in the nucleic acid sequence or insertion or deletion of a nucleic acid molecule into a target sequence of interest. In some examples, mutations, insertions or deletions of nucleic acid in a particular gene can be selected for using a positive or negative selection pressure (see, e.g., Current Techniques in Molecular Biology, (Ed. Ausubel, et al.)).

[0448] Nucleic acid amplification protocols include, but are not limited to, polymerase chain reaction (PCR), or amplification via viruses or organisms, such as, but not limited to, bacteria, yeast, insect or mammalian cells. Use of nucleic acid tools such as plasmids, vectors, promoters and other regulating sequences, are well-known in the art for a large variety of viruses and cellular organisms.

[0449] Nucleic acid transfer protocols include calcium chloride transformation/transfection, electroporation, liposome mediated nucleic acid transfer, N-[1-(2,3-dioloyloxy)propyl]-N,N,N-trimethylammonium methylsulfate meditated transformation, and others. Further a large variety of nucleic acid tools are available from many different sources, including various commercial sources. One skilled in the art will be readily able to select the appropriate tools and methods for genetic modifications of any particular virus according to the knowledge in the art and design choice.

[0450] Hence, any of a variety of modifications can be readily accomplished using standard molecular biological methods known in the art. The modifications will typically be one or more truncations, deletions, mutations or insertions of the viral genome. In one example, the modification can be specifically directed to a particular sequence in the viral genome. The modifications can be directed to any of a variety of regions of the viral genome, including, but not limited to, a regulatory sequence, a gene-encoding sequence, an intergenic sequence, a sequence without a known role, or a non-essential region of the viral genome. Any of a variety of regions of viral genomes that are available for modification are readily known in the art for many viruses, including LIVP.

[0451] Heterologous nucleic acid molecules are typically inserted into the viral genome in an intergenic region or in a locus that encodes a nonessential viral gene product. Insertion of heterologous nucleic acid at such sites generally does not significantly affect viral infection or replication in the target tissue. Exemplary insertion sites are known in the art and include, but are not limited to, J2R (thymidine kinase (TK)), A56R (hemagglutinin (HA)), F14.5L, vaccinia growth factor (VGF), A35R, N1L, E2L/E3L, K1L/K2L, superoxide dismutase locus, 7.5K, C7-K1L (host range gene region), B13R+B14R (hemorrhagic region), A26L (A type inclusion body region (ATI)) or I4L (large subunit, ribonucleotide reductase) gene loci. Insertion sites for the viruses provided herein also include sites that correspond to intragenic regions described in other poxviruses such as Modified Vaccinia Ankara (MVA) virus (exemplary sites set forth in U.S. Pat. No. 7,550,147), NYVAC (exemplary sites set forth in U.S. Pat. No. 5,762,938).

[0452] Methods for the generation of recombinant viruses using recombinant DNA techniques are well-known in the art (e.g., see U.S. Pat. Nos. 4,769,330; 4,603,112; 4,722,848; 4,215,051; 5,110,587; 5,174,993; 5,922,576; 6,319,703; 5,719,054; 6,429,001; 6,589,531; 6,573,090; 6,800,288; 7,045,313; He et al. (1998) PNAS 95(5): 2509-2514; Racaniello et al., (1981) Science 214: 916-919; and Hruby et al., (1990) Clin Micro Rev. 3:153-170). Methods for the generation of recombinant vaccinia viruses are well-known in the art (e.g., see Hruby et al., (1990) Clin Micro Rev. 3:153-170, U.S. Pat. Pub. No. 2005-0031643, now U.S. Pat. Nos. 7,588,767, 7,588,771, 7,662,398 and U.S. Pat. No. 7,045,313).

[0453] For example, generating a recombinant vaccinia virus that expresses a heterologous gene product typically includes the use of a recombination plasmid which contains the heterologous nucleic acid, optionally operably linked to a promoter, with vaccinia virus DNA sequences flanking the heterologous nucleic acid to facilitate homologous recombination and insertion of the gene into the viral genome. Generally, the viral DNA flanking the heterologous gene is complementary to a non-essential segment of vaccinia virus DNA, such that the gene is inserted into a non-essential location. The recombination plasmid can be grown in and purified from Escherichia coli and introduced into suitable host cells, such as, for example, but not limited to, CV-1, BSC-40, BSC-1 and TK-143 cells. The transfected cells are then superinfected with vaccinia virus which initiates a replication cycle. The heterologous DNA can be incorporated into the vaccinia viral genome through homologous recombination, and packaged into infection progeny. The recombinant viruses can be identified by methods known in the art, such as by detection of the expression of the heterologous gene product, or by using positive or negative selection methods (U.S. Pat. No. 7,045,313).

[0454] In another example, the recombinant vaccinia virus that expresses a heterologous gene product can be generated by direct cloning (see, e.g., U.S. Pat. No. 6,265,183 and Scheiflinger et al. (1992) Proc. Natl. Acad. Sci. USA 89: 9977-9981). In such methods, the heterologous nucleic acid, optionally operably linked to a promoter, is flanked by restriction endonuclease cleavage sites for insertion into a unique restriction endonuclease site in the target virus. The virus DNA is purified using standard techniques and is cleaved with the sequence-specific restriction endonuclease, where the sequence is a unique site in the virus genome. Any unique site in the virus genome can be employed provided that modification at the site does not interfere with viral replication. For example, in vaccinia virus strain LIVP, the NotI restriction site is located in the ORF encoding the F14.5L gene with unknown function (Mikryukov et al., Biotekhnologiya 4: 442-449 (1988)). Table 7 provides a summary of unique restriction sites contained in exemplary LIVP strains and designates the nucleotide position of each. Such LIVP strains can be modified herein by direct cloning and insertion of heterologous DNA into the site or sites. Generally, insertion is in a site that is located in a non-essential region of the virus genome. For example, exemplary modifications herein include insertion of a foreign DNA sequence into the NotI digested virus DNA.

TABLE 7
Unique restriction endonuclease cleavage sites in LIVP clonal isolates

| Restriction Enzyme/ | | | | | | | | | LIVP |
|---|---|---|---|---|---|---|---|---|---|
| Site | | 1.1.1 | 2.1.1 | 4.1.1 | 5.1.1 | 6.1.1 | 7.1.1 | 8.1.1 | Parental |
| Name/ | SEQ | (SEQ ID | (SEQ ID | (SEQ ID | (SEQ ID | (SEQ ID | (SEQ ID | (SEQ ID | (SEQ ID |
| sequence | ID NO | NO: 55) | NO: 56) | NO: 57) | NO: 58) | NO: 59) | NO: 60) | NO: 61) | NO: 188) |
| SbfI | 238 | 40033/ | 40756/ | 39977/ | 40576/ | 40177/ | 40213/ | 40493/ | 38630/ |
| CCTGCAGG | | 40029 | 40752 | 39973 | 40572 | 40173 | 40209 | 40489 | 38626 |
| NotI | 239 | 42989/ | 43712/ | 42933/ | 43532/ | 43133/ | 43169/ | 43449/ | 41586/ |
| GCGGCCGC | | 42998 | 43716 | 42937 | 43536 | 43137 | 43173 | 43453 | 41590 |
| SgrAI | 240 | 114365/ | 115107/ | 114308/ | 114924/ | 114489/ | 114548/ | 114845/ | 112975/ |
| CRCCGGYG | | 114369 | 115111 | 114312 | 114928 | 114493 | 114552 | 114849 | 112979 |
| SmaI | 241 | 159260 | NA | NA | NA | NA | NA | NA | NA |
| CCCGGG | | | | | | | | | |
| TspMI | 241 | 159258/ | NA | NA | NA | NA | NA | NA | NA |
| CCCGGG | | 159262 | | | | | | | |
| XmaI | 241 | 159258/ | NA | NA | NA | NA | NA | NA | NA |
| CCCGGG | | 159262 | | | | | | | |
| ApaI | 242 | 180516/ | NA | 180377/ | 181027/ | 180638/ | 180596/ | 180972/ | NA |
| GGGCCC | | 180512 | | 180373 | 181023 | 180634 | 180592 | 180968 | |
| PspOMI | 242 | 180512/ | NA | 180373/ | 181023/ | 180634/ | 180592/ | 180968/ | NA |
| GGGCCC | | 180516 | | 180377 | 181027 | 180638 | 180596 | 180972 | |

[0455] In some examples, the virus genomic DNA is first modified by homologous recombination to introduce one or more unique restriction sites in the virus (see, e.g., Mackett et al. (1984) J. Virol. 857-864). Following cleavage with the restriction endonuclease, the cleaved DNA is optionally treated with a phosphatase to remove a phosphate moiety from an end of the DNA segment that is produced by cleavage with the endonuclease. Typically, a plasmid vector is generated that contains the heterologous DNA for insertion flanked by the restriction sites. Prior to insertion into the virus, the heterologous DNA is excised from the plasmid by cleavage with the sequence specific restriction endonuclease. The heterologous DNA is then ligated to the cleaved viral DNA and is packaged in a permissive cell line by infection of the cells with a helper virus, such as, but not limited to a fowlpox virus or a PUV-inactivated helper vaccinia virus, and transfection of the ligated DNA into the infected cells.

[0456] In some examples, the methods involve homologous recombination and/or use of unique restriction sites in the virus. For example, a recombinant LIVP vaccinia virus with an insertion, for example, in the F14.5L gene (e.g., in the Not I restriction site of an LIVP isolate), can be prepared by the following steps: (a) generating (i) a vaccinia shuttle/transfer plasmid containing the modification (e.g., a gene expression cassette or a modified F14.5L gene) inserted at a restriction site, X (e.g., Not 1), where the restriction site in the vector is flanked by parental virus sequences of the target insertion site and (ii) an LIVP virus DNA digested at restriction site X (e.g., Not I) and optionally dephosphorylated; (b) infecting cells with PUV-inactivated helper vaccinia virus and transfecting the infected host cells with a mixture of the constructs of (i) and (ii) of step a; and (c) isolating the recombinant vaccinia viruses from the transfectants. One skilled in the art knows how to perform such methods (see, e.g., Timiryasova et al. (Biotechniques 31: 534-540 (2001)). Typically, the restriction site X is a unique restriction site in the virus as described above.

[0457] In one example, the methods include introducing into the viruses one or more genetic modifications, followed by screening the viruses for properties reflective of the modification or for other desired properties. In some examples, the modification can be fully or partially random, whereupon selection of any particular modified virus can be determined according to the desired properties of the modified the virus.

[0458] 3. Methods of Producing Viruses

[0459] Viruses in the compositions and methods provided herein can be produced by methods known to one of skill in the art. Typically, the virus is propagated in host cells, quantified and prepared for storage before finally being prepared in the compositions described herein. The virus can be propagated in suitable host cells to enlarge the stock, the concentration of which is then determined. In some examples, the infectious titer is determined, such as by plaque assay. The total number of viral particles also can be determined. The viruses are stored in conditions that promote stability and integrity of the virus, such that loss of infectivity over time is minimized. In some examples, a large amount of virus is produced and stored in small aliquots of known concentration that can be used for multiple procedures over an extended period of time. Conditions that are most suitable for various viruses will differ, and are known in the art, but typically include freezing or drying, such as by lyophilization. The viruses can be stored at a concentration of 10⁵-10¹⁰ pfu/mL, for example, 10⁷-10⁹ pfu/mL, such as at least or about or 10⁶ pfu/mL, 10⁷ pfu/mL, 10⁸ pfu/mL or 10⁹ pfu/mL. Immediately prior to preparing compositions provided herein, the stored viruses can be reconstituted (if dried for storage) and diluted in an appropriate medium or solution.

[0460] The following sections provide exemplary methods that can be used for the production and preparation of viruses for use in preparing viruses in the compositions provided herein.

[0461] a. Host Cells for Propagation

[0462] Virus strains can be propagated in an appropriate host cell. Such cells can be a group of a single type of cells or a mixture of different types of cells. Host cells can include cultured cell lines, primary cells, and proliferative cells. These host cells can include any of a variety of animal cells, such as mammalian, avian and insect cells and tissues that are susceptible to the virus, such as vaccinia virus, infection, including chicken embryo, rabbit, hamster, and monkey kidney cells. Suitable host cells include, but are not limited to, hematopoietic cells (hematopoietic stem cells, leukocytes, lymphocytes, monocytes, macrophages, APC, dendritic cells, non-human cells and the like), pulmonary cells, tracheal cells, hepatic cells, epithelial cells, endothelial cells, muscle cells (e.g., skeletal muscle, cardiac muscle or smooth muscle), fibroblasts, and cell lines including, for example, CV-1, BSC40, Vero, and BSC-1, and human HeLa cells. Typically, viruses are propagated in cell lines that that can be grown in monolayers or in suspension. For example, exemplary cell lines for the propagation of vaccinia viruses include, but are not limited to, CV-1, BSC40, Vero, BGM, BSC-1 and RK-13 cells. Purification of the cultured strain from the system can be effected using standard methods.

[0463] b. Concentration Determination

[0464] The concentration of virus in a solution, or virus titer, can be determined by a variety of methods known in the art. In some methods, a determination of the number of infectious virus particles is made (typically termed plaque forming units (PFU)), while in other methods, a determination of the total number of viral particles, either infectious or not, is made. Methods that calculate the number of infectious virions include, but are not limited to, the plaque assay, in which titrations of the virus are grown on cell monolayers and the number of plaques is counted after several days to several weeks, and the endpoint dilution method, which determines the titer within a certain range, such as one log. Methods that determine the total number of viral particles, including infectious and non-infectious particles, include, but are not limited to, immunohistochemical staining methods that utilize antibodies that recognize a viral antigen and which can be visualized by microscopy or FACS analysis; optical absorbance, such as at 260 nm; and measurement of viral nucleic acid, such as by PCR, RT-PCR, or quantitation by labeling with a fluorescent dye.

[0465] c. Storage Methods

[0466] Once the virus has been purified (or to a desired purity) and the titer has been determined, the virus can be stored in conditions which optimally maintain its infectious integrity. Typically, viruses are stored in the dark, because light serves to inactivate the viruses over time. Viral stability in storage is usually dependent upon temperatures. Although some viruses are thermostable, most viruses are not stable for more than a day at room temperature, exhibiting reduced viability (Newman et al., (2003) J. Inf. Dis. 187:1319-1322). Vaccinia virus is generally stable at refrigerated temperatures, and can be stored in solution at 4° C., frozen at, for example −20° C., −70° C. or −80° C., or lyophilized with little loss of viability (Newman et al., (2003) J. Inf Dis. 187:1319-1322, Hruby et al., (1990) Clin. Microb. Rev. 3:153-170). Methods and conditions suitable for the storage of particular viruses are known in the art, and can be used to store the viruses used in the methods presented herein.

[0467] For short-term storage of viruses, for example, 1 day, 2 days, 4 days or 7 days, temperatures of approximately 4° C. are generally recommended. For long-term storage, most viruses can be kept at −20° C., −70° C. or −80° C. When frozen in a simple solution such as PBS or Tris solution (20 mM Tris pH 8.0, 200 NaCl, 2-3% glycerol or sucrose) at these temperatures, the virus can be stable for 6 months to a year, or even longer. Repeated freeze-thaw cycles are generally avoided, however, since it can cause a decrease in viral titer. The virus also can be frozen in media containing other supplements in the storage solution which can further preserve the integrity of the virus. For example, the addition of serum or bovine serum albumin (BSA) to a viral solution stored at −80° C. can help retain virus viability for longer periods of time and through several freeze-thaw cycles.

[0468] In other examples, the virus sample is dried for long-term storage at ambient temperatures. Viruses can be dried using various techniques including, but not limited to, freeze-drying, foam-drying, spray-drying and desiccation. Water is a reactant in nearly all of the destructive pathways that degrade viruses in storage. Further, water acts as a plasticizer, which allows unfolding and aggregation of proteins. Since water is a participant in almost all degradation pathways, reduction of the aqueous solution of viruses to a dry powder provides an alternative composition methodology to enhance the stability of such samples.

[0469] Lyophilization, or freeze-drying, is a drying technique used for storing viruses (see, e.g., Cryole et al., (1998) Pharm. Dev. Technol., 3(3), 973-383). There are three stages to freeze-drying; freezing, primary drying and secondary drying. During these stages, the material is rapidly frozen and dehydrated under high vacuum. Once lyophilized, the dried virus can be stored for long periods of time at ambient temperatures, and reconstituted with an aqueous solution when needed. Various stabilizers can be included in the solution prior to freeze-drying to enhance the preservation of the virus. For example, it is known that high molecular weight structural additives, such as serum, serum albumin or gelatin, aid in preventing viral aggregation during freezing, and provide structural and nutritional support in the lyophilized or dried state. Amino acids such as arginine and glutamate, sugars, such as trehalose, and alcohols such as mannitol, sorbitol and inositol, can enhance the preservation of viral infectivity during lyophilization and in the lyophilized state. When added to the viral solution prior to lyophilization, urea and ascorbic acid can stabilize the hydration state and maintain osmotic balance during the dehydration period. Typically, a relatively constant pH of about 7.0 is maintained throughout lyophilization.

[0470] Other methods for the storage of viruses at ambient, refrigerated or freezing temperatures are known in the art, and include, but are not limited to, those described in U.S. Pat. Nos. 5,149,653; 6,165,779; 6,255,289; 6,664,099; 6,872,357; and 7,091,030; and in U.S. Pat. Pub. Nos. 2003-0153065, 2004-003841 and 2005-0032044.

[0471] d. Preparation of Virus

[0472] Immediately prior to use, the virus can be prepared at an appropriate concentration in suitable media, and can be maintained at a cool temperature, such as on ice, until use. If the virus was lyophilized or otherwise dried for storage, then it can be reconstituted in an appropriate aqueous solution. The aqueous solution in which the virus is prepared is typically the medium used in the assay (e.g., DMEM or RPMI) or one that is compatible, such as a buffered saline solution (e.g., PBS, TBS, Hepes-buffered saline (HBS) solution). For pharmaceutical applications, the virus can be immediately prepared or reconstituted in a pharmaceutical solution. Numerous pharmaceutically acceptable solutions for use are well-known in the art (see e.g., Remington's Pharmaceutical Sciences (18^{th} edition) ed. A. Gennaro, 1990, Mack Publishing Co., Easton, Pa.). In one example, the viruses can be diluted in a physiologically acceptable solution, such as sterile saline or sterile buffered saline, with or without an adjuvant or carrier. In other examples, the pharmaceutical solution can contain a component that provides viscosity (e.g., glycerol) and/or component that has bactericidal properties (e.g., phenol). The virus can be reconstituted or diluted to provide the desired concentration or amount. The particular concentration can be empirically determined by one of skill in the art depending on the particular application.

[0473] 4. Anti-Tumorigenicity and Efficacy

[0474] Viruses for use in the compositions and methods provided herein can be tested for parameters indicative of its anti-tumorigenic property. Generally, the parameters selected for are desirable for the treatment of proliferative diseases and disorders, including the treatment of a tumor or metastasis. For example, a virus can destroy tumor cells by replicating such that continual amplification of the virus results in infection of adjacent cells and their subsequent destruction. Oncolytic viruses also exhibit anti-tumorigenicity by expression of proteins that are cytotoxic to cancer cells. In further examples, viruses can exhibit anti-tumorigenicity by initiating specific and nonspecific anti-tumor immune responses, for example, the initiation of cytokine expression from infected cells (e.g., TNF) or through a specific response (e.g., CTL response). Hence, any of the above parameters can be assessed as indicative of anti-tumorigenicity of a virus.

[0475] For example, the isolated virus is tested in one or more in vitro and/or in vivo assays that assess infectivity, viral nucleic acid replication, virus production, viral gene expression from tumor cells, effects on the host cell, cytotoxicity of tumor cells, tumor cell selectivity, tumor cell-type selectivity, specific and non-specific immune response, and therapeutic efficacy. Parameters indicative of anti-tumorigenicity can be assessed in vitro or in vivo. In particular examples, anti-tumorigenicity is assessed in vivo. In vivo parameters of anti-tumorigenicity include, but are not limited to, a desirable therapeutic index in an animal model of cancer, release of tumor antigens and preferential accumulation of the virus in tumor tissues following administration. Exemplary assays or methods to assess such parameters are described below.

[0476] a. Tumor-Associated Replication Indicator

[0477] Viruses in compositions provided herein can be tested for replication and/or infectivity in tumor cells. The replication indicator that is measured is any parameter from which the level or amount or relative amount of viral replication, typically within a day of administration to the tumor cells, can be assessed or inferred. In some examples, replication can be assessed by measurement of a viral replication indicator, such as, for example, viral titer (i.e., as assessed by the number of plaques produced in a plaque assay) or the changes in viral gene expression or host gene expression (see, e.g., U.S. Patent Pub. No. 2009-0136917). For example, replication can be determined by infecting or introducing the test virus into a tumor cell and assessing a replication indicator at a particular time or as a function of time. This can be compared to a predetermined standard, for example the parental virus preparation or mixture or other reference strain (e.g., recombinant virus), or compared to other test strains or controls. Viruses can be tested to assess selective replication in tumor cells compared to normal cells.

[0478] Assays to assess replication can be performed on cell lysates of cells infected in vitro with any of the provided vaccinia viruses. Exemplary cells that can be used for such replication assays include, but are not limited to, various tumor cell lines, primary tissues or cells as well as tumor cells such as from a biopsy. For example, a tissue or cell sample can be obtained (e.g., biopsy) from a subject (e.g., human or non-human animal subject), and the sample can be infected with one or more types of virus compositions. In other examples, tumor cell lines can be used. Tumor cell lines are known and available to one of skill in the art, for example, from the American Type Culture Collection (ATTC; Manassas, Va.) or from the European Collection of Cell Cultures (ECACC). Tumor cell lines also are available from the Division of Cancer Treatment and Diagnosis (DCTD) Tumor Repository (National Cancer Institute/National Institute of Health; dtp.nih.gov/index.html.). Exemplary tumor cell lines include human and other animal cells lines, including, but are not limited to, DU145 human prostate carcinoma cells, LNCaP human prostate cancer cells, MCF-7 human breast cancer cells, MRC-5 human lung fibroblast cells, MDA-MB-438 human breast cancer cells, MDA-MB-231 human breast carcinoma cells, PC3 human prostate cancer cells, T47D human breast cancer cells, THP-1 human acute myeloid leukemia cells, U87 human glioblastoma cells, SH-SY5Y human neuroblastoma cells, Saos-2 human cells, A549 human lung carcinoma cells, A2780 human ovarian carcinoma cells, HCT 116 human colon cells, HT-29 human colon cells, SW260 human colon cells, HT-180 human fibrosarcoma, MIA PaCa-2 human pancreatic carcinoma cells, PANC-1 human pancreatic cells, CMT 64 C57BL/6 mouse cell, JC mouse mammary cells, TIB-75 mouse hepatic cells, CT26 WT mouse colon carcinoma cells, MC-38 mouse adenocarcinoma cells, B16-F10 mouse melanoma cells, 4T1 murine mammary carcinoma cells and hamster pancreatic tumor HP-1 cells.

[0479] For example, cells or cell lines can be seeded onto wells of a plate. Virus compositions can then be added and allowed to infect the cells. At the end of the infection, the media can be changed to remove any residual virus and the cells further incubated. Then, the cells can be scraped into the media and collected. Cells can be lysed, for example, by freeze-thaw and/or sonication methods, to obtain virus-containing lysates. The extent of replication can be measured, such as by determination of viral titer or expression of genes as described further below. It is understood that the extent and degree of replication and/or infectivity efficiency of a virus will differ between various tumor cell types.

[0480] Assays to assess replication also can be performed on tumor-harvested virus propagated in vivo upon infection of tumor-bearing animals. Such an assay is a measure of the accumulation of the virus in tumor tissues. As discussed below, tumors can be established in animals by implantation of different tumor cell types. For example, tumor-bearing animals can be administered (e.g., topically or via intravenous administration or other route of administration) with a vaccinia virus, virus propagated in tumors and virus or tumor extracted therefrom. The extent of replication can be measured, such as by determination of viral titer or expression of genes, as described further below.

[0481] In one example, cell culture supernatants or cell lysates from the infected cells or tumor cell extracts can be obtained following infection and subjected to assays to measure viral titer. For example, a standard plaque assay can be used. The plaque assay can indicate the biological activity in different cell types, including different tumor cell types. Titration of virus by plaque assay is known to one of skill in the art. In one example of a plaque assay, supernatants or cells lysates of tumors or cells infected with the virus is harvested and plaque assays can be performed. Typically, serial dilutions of the virus supernatant or lysate is made in the range of 10⁻² (1:100) to 10⁻¹⁰, and in particular from 10⁻⁵ to 10⁻¹⁰. Diluted virus is added to a monolayer of cells, for example, monolayers of permissive cell line, such as, for example, CV-1, Vero, BHK, RK13 or HEK-293 cell lines, and incubated with virus. In some examples, the plaque assay can be performed directly on a monolayer of tumor cells provided that the tumor cells can form a monolayer. Following incubation, an agarose overlay is added to the monolayer of cells without dislodging the cells, and the plate is further incubated until plaques become visible. A dye or color stain solution that is taken up by healthy cells but not dead cells, such as neutral red, is added to each of the wells or plate. After incubation, the dye or stain is removed such that the plaques are observed to be clear, while non-lysed cells remain stained. Titer (pfu/mL) is calculated by counting the number of plaques in the well and dividing by the dilution factor (d) and the volume (V) of diluted virus added to the well (# plaques/d×V). The virus yield can be converted to pfu/cell by dividing the total amount of virus present in the sample by the number of cells originally infected in the sample.

[0482] Other indicators of replication also can be assessed. For example, expression of viral genes, tumor proteins and/or housekeeping genes that are correlated with viral replication and/or infectivity in tumor cells can be assessed (see e.g., U.S. Patent Pub. No. 2009-0136917). For example, expression of housekeeping genes or other genes in tumor cells associated with virus replication and infectivity can be assessed (U.S. Patent Pub. No. 2009-0136917). In some examples, expression of a plurality of such genes, such as housekeeping genes, whose expression increases in tumor cells upon infection with virus are assessed. Examples of such genes that can be assessed include expression of one or more genes encoding a protein selected from among IL-18 (Interleukin-18), MCP-5 (Monocyte Chemoattractant Protein-5; CCL12), IL-11 (Interleukin-11), MCP-1 (Monocyte Chemoattractant Protein-1), MPO (Myeloperoxidase), Apo A1 (Apolipoprotein A1), TIMP-1 (Tissue Inhibitor of Metalloproteinase Type-1), CRP (C Reactive Protein), Fibrinogen, MMP-9 (Matrix Metalloproteinase-9), Eotaxin (CCL11), GCP-2 (Granulocyte Chemotactic Protein-2; CXCL6), IL-6 (Interleukin-6), Tissue Factor (TF), SAP (Serum Amyloid P), FGF-basic (Fibroblast Growth Factor-basic), MCP-3 (Monocyte Chemoattractant Protein-3; CCL7), IP-10 (CXCL 10), MIP-2, Thrombopoietin, Cancer antigen 125, CD40, CD40 ligand, ENA-78, Ferritin, IL-12p40, IL-12p70, IL-16, MMP-2, PAI-1, TNF RII, TNF-beta and VCAM-1.

[0483] In another example, expression of a plurality of genes, such as housekeeping genes, whose expression decreases in tumor cells upon infection with virus are assessed. Examples of such genes include one or more genes encoding a protein selected from among MIP-1beta (Macrophage Inflammatory Protein-1beta), MDC (Macrophage-Derived Chemokine; CCL22), MIP-1 alpha (Macrophage Inflammatory Protein-1alpha; CCL3), KC/GROalpha (Melanoma Growth Stimulatory Activity Protein), VEGF (Vascular Endothelial Cell Growth Factor), Endothelin-1, MIP-3 beta (Macrophage Inflammatory Protein-3 beta; Exodus-3 or ELC), Beta-2 microglobulin, IL-5 (Interleukin-5), IL-1 alpha (Interleukin-1 alpha), EGF (Epidermal Growth Factor), Lymphotactin (XCL1), GM-CSF (Granulocyte Macrophage-Colony Stimulating Factor), MIP-1 gamma (Macrophage Inflammatory Protein-1 gamma; CCL4), IL-1beta (Interleukin-1 beta), BDNF (Brain-derived neutrophic factor), Cancer antigen 19-9, Carcinoembryonic antigen, C reactive protein, EGF, Fatty acid binding protein, Factor VII, Growth hormone, IL-1 alpha, IL-1 beta, IL-1 ra, IL-7, IL-8, MDC, Prostatic acid phosphatase, Prostate specific antigen, free, Stem cell factor, Tissue factor, TNF-alpha, VEGF and Von Willebrand factor.

[0484] Gene expression can be assayed after contacting a tumor sample with the virus for a period of time in vitro or in vivo and measuring the level of expression of one or more housekeeping genes or other genes. Any method known in the art can be used for assessing the expression of genes in a tumor can be employed. For example, methods for measuring protein expression levels which can be used include, but are not limited to, microarray analysis, ELISA assays, Western blotting, or any other technique for the quantitation of specific proteins. For RNA levels, examples of techniques which can be used include microarray analysis, quantitative PCR, Northern hybridization, or any other technique for the quantitation of specific nucleic acids. In some examples, a difference in expression of the same marker between the contacted and non-contacted biological samples of about less than 2-fold, about 2-fold, about 3-fold, about 4-fold, about 5-fold, about 6-fold, about 7-fold, about 8-fold, about 9-fold, about 10-fold, about 20-fold, about 30-fold, about 40-fold, about 50-fold, about 60-fold, about 70-fold, about 80-fold, about 90-fold, about 100-fold or greater than about 100-fold is indicative of specific replication and/or infectivity of a tumor cell.

[0485] For in vitro tests, varying doses/multiplicity of infection (MOI; ratio of virus to cell) of the virus can be assessed in order to assess the rate of viral infection and virus production at different infection levels. Viruses that exhibit a high rate of replication at a lower MOI are generally desirable for therapy of a proliferative disorder or disease. For example, cells can be infected at an MOI of at or between 0.1 to 10, such as 0.5 to 5, for example, 0.5 to 2, for example, an MOI of at or at least 0.25, 0.5, 1, 1.5, 2 or more.

[0486] In any of the examples herein of assessing replication or infectivity of a virus, tumor cell selectivity of the virus also can be assessed. For example, normal cells and tumor cells can be infected with the vaccinia virus composition followed by assessment of replication and or infectivity using any of the assays described herein or known to one of skill in the art. For example, measurement of viral titer by plaque assay or by expression of genes as described can be determined in virally-infected tumor cells versus virally-infected normal cells. Normal or non-transformed cells include, but are not limited to, MRC-5 lung fibroblast cells, Beas-2B bronchial epithelial cells, normal human bronchial epithelial (NHBE) cells, small airway bronchial epithelial cells(SAEC). Tumor cells include any described herein or known to one of skill in the art and include, but are not limited to, A2780, A549, HCT 116, HT 1080, LNCaP or SW620 cells. In some examples, paired tumor and non-tumor cell lines can be infected with virus and compared. Exemplary corresponding or paired tumor and non-tumor cell lines are known to one of skill in the art (see e.g., Gazdar et al. (1998) Int. J. Cancer, 78:766-774, Theodore et al. (2010) Int. J Oncology, 37:1477-1482; Niedbala et al. (2001) Radiation Research, 155:297-303). In other examples, tumors infected in vivo can be harvested and can be compared to normal cells or tissues that also are extracted from the same infected animal. Infection and replication of virus in normal cells and tumor cells can be assessed and compared. The therapeutic index of the virus can be determined by the ratio of replication in the tumor cell compared to the normal cell (e.g., virus produced per cell; pfu/cell).

[0487] b. Cytotoxicity

[0488] Viruses can be tested to determine if they are cytotoxic or kill tumor cells. For example, viruses can eliminate tumor cells via induction of cell death and/or lysis of the tumor cell (i.e., oncolysis). The cell killing activity of the virus can be assessed by a variety of techniques known in the art including, but not limited to, cytotoxicity/cell viability assays that can be employed to measure cell necrosis and/or apoptosis following virus infection, such as MTT (3-(4,5-dimethylthiazol-2-yl)-2,5-diphenyltetrazolium bromide) assays and other related tetrazolium salt based assays (e.g., XTT, MTS or WST), ATP assays, apoptosis assays, such as TUNEL staining of infected cells, DNA fragmentation assays, DNA laddering assays, and cytochrome C release assays. Such assays are well-known to one of skill in the art.

[0489] For example, viability of virally-infected cells can be assessed. Various tumor cell lines, for example any described above or known to one of skill in the art, can be seeded in a 96-well plate (e.g., at or about 5,000 cells/well) or other size well-plate and grown overnight, and then can be infected with serial dilution of virus compositions. For example, various MOI of the virus can be tested. MOI can range from, for example, 1000 to 0.0001, such as 100 to 0.001 or 10 to 0.01. It is within the level of one of skill in the art to empirically select or determine an appropriate MOI range in which to use. Once infected, the cells can be incubated for a period of time before assessment of cytotoxicity. For example, samples for assessment of cytotoxicity are typically obtained at selected time points following virus infection of the cells, such as, for example, 1 hour, 2 hours, 4 hours, 8 hours, 16 hours, 24 hours, 1.5 days. 2 days, 2.5 days, 3 days, 4 days, 5 days, 6 days or more. One of skill in the art can select appropriate time points for assessment of viral replication based on the relative infectivity of the virus compared to other known virus strains. Generally, infection is allowed to proceed at least 12 hours, 24 hours, 36 hours, 48 hours, 72 hours, 84 hours, 96 hours or more.

[0490] Following infection for the designated period, media is replaced and viability of the cells is determined based on any assay or procedure known to one of skill in the art. Exemplary assays to assess viability are colorimetric assays that permit visualization of cells based on metabolic activity and measure the reducing potential of the tetrazolium salt to a colored formazan product (e.g., MTT assay, MTS assay or XTT assay). Other redox assays include assays that measure the ability of cells to convert a redox dye resazurin to a fluorescent end product resorufin (McMillian et al. (2002) Cell Biol. Toxicology, 18:157-173; CellTiter-Blue™ Cell Viability Assay, Promega). In other examples, viability can be assessed using a CASY cell counting technology, which is an electric field multi-channel cell counting system based on existence of a transmitted electric field through injured or dead cells as compared to normal cells (e.g., CASY® Model TT; Roche Innovatis AG). Additional examples include, but are not limited to, trypan blue or propidium iodide dye exclusion assay, measurement of lactate dehydrogenase (LDH; see e.g., LDH Cytotoxicity Detection Kit, Clontech, Cat. #630117), sulforhodamine B (SRB) assay (e.g., CytoScan™ SRB Cytotoxicity Assay, GBiosciences, Cat. No. 786-213, WST assay (e.g., CytoScan™ WST-1 Cell Proliferation Assay, GBiosciences, Cat No. 786-212), clonogenic assay and luciferase-based ATP-based assays (e.g., CelTiter-Glo™ Luminescent Cell Viability Assay; Promega).

[0491] Generally, the assays are performed using various controls. For example, any assay to assess viability generally is performed with untreated wells containing cells only (e.g., 100% viable) as well as cell-free wells (0% viable). Also, in addition to the testing vaccinia virus compositions provided, other control viruses can be tested. For example, a reference virus strain, for example, a known attenuated recombinant strain can be tested. GLV-1h68, or a derivative thereof, containing inserted heterologous genes is an example of such a strain. In examples where virus is added as a control, the MOI range of virus that is used is the same as the tested virus composition.

[0492] A virus exhibits a cytopathic effect if it is determined to exhibit a reduction in cell viability relative to an untreated well containing cells only (100% viable). In other examples, a virus exhibits a cytopathic effect if it is determined to exhibit a reduction in cell viability relative to the viability of cells in a well-treated with a control or reference virus that is not oncolytic. In a further example, a virus exhibits a cytopathic effect if it is determined to exhibit a similar or greater effect on cell viability relative to the viability of cells in a well-treated with a known reference attenuated virus strain, such as an attenuated recombinant virus (e.g., GLV-1h68 or derivative thereof).

[0493] c. Tumor Growth

[0494] Viruses can be tested to determine if it causes shrinkage of tumor size and/or delays tumor progression. Tumor size can be assessed in vivo in tumor-bearing human or animal models treated with virus. Tumor shrinkage or tumor size can be assessed by various assays known in art, such as, by weight, volume or physical measurement.

[0495] Tumor-bearing animal models can be generated. In vivo tumors can be generated by any known method, including xenograft tumors generated by inoculating or implanting tumor cells (e.g., by subcutaneous injection) into an immunodeficient rodent, syngeneic tumors models generated by inoculating (e.g., by subcutaneous injection) a mouse or rat tumor cell line into the corresponding immunocompetent mouse or rat strain, metastatic tumors generated by metastasis of a primary tumor implanted in the animal model, allograft tumors generated by the implantation of tumor cells into same species as the origin of the tumor cells, and spontaneous tumors generated by genetic manipulation of the animal. The tumor models can be generated orthotopically by injection of the tumor cells into the tissue or organ of their origin, for example, implantation of breast tumor cells into a mouse mammary fat pad. Any of the above models provide a consistent and reproducible tool for evaluating tumor cell growth, as well as permitting easy access to assess the mass of the tumor.

[0496] In particular examples, xenograft models or syngenic models are used. For example, tumors can be established by subcutaneous injection at the right armpit with a cell suspension (e.g., 1×10⁶ to 5×10⁶ cells/animal) of different tumor cell types into immunocompetent hosts (syngeneic) or immunodeficient hosts (e.g., nude or SCID mice; xenograft). Exemplary human tumor xenograft models in mice, such as nude or SCID mice, include, but are not limited to, human lung carcinoma (A549 cells, ATCC No. CCL-185); human breast tumor (GI-101A cells, Rathinavelu et al., Cancer Biochem. Biophys., 17:133-146 (1999)); human ovarian carcinoma (OVCAR-3 cells, ATCC No. HTB-161); human pancreatic carcinoma (PANC-1 cells, ATCC No. CRL-1469 and MIA PaCa-2 cells, ATCC No. CRL-1420); DU145 cells (human prostate cancer cells, ATCC No. HTB-81); human prostate cancer (PC-3 cells, ATCC# CRL-1435); colon carcinoma (HT-29 cells); human melanoma (888-MEL cells, 1858-MEL cells or 1936-MEL cells; see e.g., Wang et al., (2006) J. Invest. Dermatol. 126:1372-1377); and human fibrosarcoma (HT-1080 cells, ATCC No. CCL-121,) and human mesothelioma (MSTO-211H cells). Exemplary rat tumor xenograft models in mice include, but are not limited to, glioma tumor (C6 cells; ATCC No. CCL-107). Exemplary mouse tumor homograft models include, but are not limited to, mouse melanoma (B16-F10 cells; ATCC No. CRL-6475). Exemplary cat tumor xenograft models in mice include, but are not limited to, feline fibrosarcoma (FC77.T cells; ATCC No. CRL-6105). Exemplary dog tumor xenograft models in mice include, but are not limited to, canine osteosarcoma (D17 cells; ATCC No. CCL-183). Non-limiting examples of human xenograft models and syngeneic tumor models are set forth in the Tables 8 and 9 below.

TABLE 8
Human Tumor Xenograft Models

| Tumor Type | Cell Line Name |
|---|---|
| Adenoid cystic | ACC-2 |
| carcinoma | |
| Bladder carcinoma | EJ |
| Bladder carcinoma | T24 |
| Breast carcinoma | BCaP-37 |
| Breast carcinoma | MX-1 |
| Cervical carcinoma | SiHa |
| Cervical carcinoma | HeLa |
| Colon carcinoma | Ls-174-T |
| Colon carcinoma | CL187 |
| Colon carcinoma | HCT-116 |
| Colon carcinoma | SW116 |
| Gastric carcinoma | MGC-803 |
| Gastric carcinoma | SGC-7901 |
| Gastric carcinoma | BGC-823 |
| Kidney carcinoma | Ketr-3 |
| Leukemia | HL-60 |
| Liver carcinoma | Bel-7402 |
| Liver carcinoma | HepG-2 |
| Liver carcinoma | QGY-7701 |
| Liver carcinoma | SMMC7721 |
| Lung carcinoma | A549 |
| Lung carcinoma | NCI-H460 |
| Melanoma | A375 |
| Melanoma | M14 |
| Melanoma | MV3 |
| Ovary carcinoma | A2780 |
| Pancreatic carcinoma | BXPC-3 |
| Prostate carcinoma | PC-3M |
| Tongue carcinoma | Tca-8113 |

TABLE 9
Syngeneic Mouse Tumor Model

| Tumor Type | Cell Line Name | Strain of Mice |
|---|---|---|
| Cervical carcinoma | U14 | ICR |
| Liver carcinoma | H22 | ICR |
| Lung carcinoma | Lewis | C57BL6 |
| Melanoma | B16F1, B16F10, B16BL6 | C57BL6 |
| Sarcoma | S180 | ICR |

[0497] Tumor size and volume can be monitored based on techniques known to one of skill in the art. For example, tumor size and volume can be monitored by radiography, ultrasound imaging, necropsy, by use of calipers, by microCT or by ¹⁸F-FDG-PET. Tumor size also can be assessed visually. In particular examples, tumor size (diameter) is measured directly using calipers. In other examples, tumor volume can be measured using an average of measurements of tumor diameter (D) obtained by caliper or ultrasound assessments. The volume can be determined from the formula V=D³×π/6 (for diameter measured using calipers) or V=D²×d×π/6 (for diameter measured using ultrasound where d is the depth or thickness). For example, caliper measurements can be made of the tumor length (l) and width (w) and tumor volume calculated as length×width²×0.52. In another example, microCT scans can be used to measure tumor volume (see e.g., Huang et al. (2009) PNAS, 106:3426-3430). In such an example, mice can be injected with Optiray Pharmacy ioversol injection 74% contrast medium (e.g., 741 mg of ioversol/mL), mice anesthetized, and CT scanning done using a MicroCat 1A scanner or other similar scanner (e.g., IMTek) (40 kV, 600 μA, 196 rotation steps, total angle or rotation=196). The images can be reconstructed using software (e.g., RVA3 software program; ImTek). Tumor volumes can be determined by using available software (e.g., Amira 3.1 software; Mercury Computer Systems).

[0498] Once the implanted tumors reach a predetermined size or volume, the models can be used for treatment with virus. The exact final tumor volume can be empirically determined and is a function of the particular type of tumor as well as the end-point of the analysis. Generally, mice are sacrificed if the tumor volume is greater than 3 cm³.

[0499] Tumor-bearing animals are infected with virus. The route of administration for infection can be any desired route of administration, for example, intravenous or topical. Other routes also can be employed, for example, intraperitoneal, such as subcutaneous, or can be intratumoral. The vaccinia can be administered at varying dosages. For example, the virus can be administered to tumor-bearing animals at or between about 1×10⁴ to 1×10⁸ pfu, such as 1×10⁵ to 1×10⁷ pfu, for example at least or about or 1×10⁶, 2×10⁶, 3×10⁶, 4×10⁶ or 5×10⁶ pfu. Progressing tumors are visualized and tumor size and tumor volume can be measured using any technique known to one of skill in the art. For example, tumor volume or tumor size can be measured using any of the techniques described herein. Tumor volume and size can be assessed or measured at periodic intervals over a period of time following virus infections, such as, for example, every hour, every 6 hours, every 12 hours, every 24 hours, every 36 hours, every 2 days, every 3 days, every 4 days, every 5 days, every 6 days, every 7-days, every week, every 3 weeks, every month or more post-infection. A graph of the median change in tumor volume over time can be made and the total area under the curve (AUC) can be calculated. A therapeutic index also can be calculated using the formula AUC_{untreated animals}−AUC_{virus-treated animals}/AUC_{untreated}×100.

[0500] In additional examples, tumors can be harvested from the animals and weighed. In further examples, the harvested tumors can be lysed. For example, lysis of tumors can be by freeze-thaw of the harvested tumor several times (e.g., at least 2 times, 3 times or 4 times) shortly after removal of the tumor from the animal. For example, the tumor is lysed by 3 freeze-thaw cycles within 2 hours of removal. The virus in the tumor lysates can be tittered as described above and the amount of virus in each tumor sample determined. In some examples, the virus titer can be expressed as tissue culture infectious dose normalized to the tissue weight (TCID₅₀/mg tissue). In particular examples, the effect of the virus on other organs or tissues in the animal can be assessed. For example, other organs can be harvested from the animals, weighed and/or lysed for viral titer determination.

[0501] Generally, tumor-bearing animals generated in the same manner, at the same time and with the same type of tumor cells are used as controls. Such control tumor-bearing animals include those that remain untreated (not infected with virus). Additional control animals can include those infected with a reference virus strain. An example of such a strain is GLV-1h68 or a derivative thereof containing inserted heterologous genes. Comparison of tumor size or volume can be made at any predetermined time post-infection, and can be empirically determined by one of skill in the art. In some examples, a comparison can be made at the day in which the untreated control is sacrificed. In other examples, analysis of the total AUC can be made, and AUC values compared as an indicator of the size and volume of the tumor over the time period of infection. A decrease in tumor size, volume or weight compared to control treated or untreated tumor-bearing animals means that the virus itself is mediating tumor regression or shrinkage or that the virus is mediating delayed tumor progression compared to control treated or untreated tumor-bearing animals. Tumor shrinkage or delay in tumor progression are parameters indicative of anti-tumorigenicity.

[0502] 5. Toxicity/Safety

[0503] Virus provided herein can be tested for parameters indicative of its toxicity/safety property. Viruses can be toxic to their hosts by manufacturing one or more compounds that worsen the health condition of the host. Toxicity to the host can be manifested in any of a variety of manners, including septic shock, neurological effects, or muscular effects. Typically, vaccinia virus exhibits minimal to no toxicity to a host, such that the host does not die or become severely ill from the toxic effects of the virus. For example, the viruses are not toxic or exhibit minimal toxicity if a host typically has no significant long-term effect from the presence of the viruses in the host, beyond any effect on tumorous, metastatic or necrotic organs or tissues. For example, minimal toxicity can be a minor fever or minor infection, which lasts for less than about a month, and following the fever or infection, the host experiences no adverse effects resultant from the fever or infection. In another example, the minimal toxicity can be measured as an unintentional decline in body weight of about 5% or less for the host after administration of the virus. In other examples, the virus has no toxicity to the host.

[0504] Parameters indicative of toxicity or safety of a virus can be tested in vitro or in vivo. Typically, assessment is in vivo. Exemplary methods include administration of the virus to a subject (e.g., animal model) and assessment of one or more properties associated with toxicity including, but not limited to, survival of the subject, decrease in body weight, existence of side effects such as fever, rash or other allergy, fatigue or abdominal pain, induction of an immune response in the subject, tissue distribution of the virus, amount of tumor antigens that are released and decreased rate of pock formation. Hence, any of the above parameters can be assessed as indicative of toxicity/safety of a virus.

[0505] As above, subjects (e.g., animals such as tumor-bearing animal models) are infected with virus. The route of administration for infection can be any desired route of administration, for example, intravenous or topical. Other routes also can be employed, for example, intraperitoneal, such as subcutaneous, or can be intratumoral. The virus can be administered at varying dosages. For example, the virus can be administered to tumor-bearing animals at or between about 1×10⁴ to 1×10⁸ pfu, such as 1×10⁵ to 1×10⁷ pfu, for example at least or about or 1×10⁶, 2×10⁶, 3×10⁶, 4×10⁶ or 5×10⁶ pfu. For humans, the virus can be administered at or between about 1×10⁷ to 1×10¹⁴ pfu, such as 1×10⁷ to 1×10¹⁰ pfu or 1×10⁹ to 1×10¹⁰ pfu, for example at least or about 1×10⁹, 2×10⁹, 3×10⁹, 4×10⁹, or 5×10⁹ pfu. Parameters indicative of toxicity such as the survival and weight of the subject can be monitored over time. For example, survival and weight can be monitored at periodic intervals over a period of time following virus infections, such as, for example, every hour, every 6 hours, every 12 hours, every 24 hours, every 36 hours, every 2 days, every 3 days, every 4 days, every 5 days, every 6 days, every 7-days, every week, every 3 weeks, every month or more post-infection.

[0506] Generally, control subjects (e.g., animal models such as tumor-bearing animal models) are similarly monitored. Such control subjects include those that remain untreated (not infected with virus). Additional controls animals can include those infected with a reference virus strain. GLV-1h68, or a derivative thereof, containing inserted heterologous genes is an example of such a strain.

### F. PHARMACEUTICAL COMPOSITIONS, COMBINATIONS AND KITS

[0507] Provided herein are pharmaceutical compositions, combinations and kits containing a virus provided herein. Pharmaceutical compositions can include a virus provided herein and a pharmaceutical carrier. Combinations can include, for example, two or more viruses, a virus and a detectable compound, a virus and a therapeutic compound, a virus and a viral expression modulating compound, or any combination thereof. Kits can include one or more pharmaceutical compositions or combinations provided herein, and one or more components, such as instructions for use, a device for administering the pharmaceutical composition or combination to a subject, a device for administering a therapeutic or diagnostic compound to a subject or a device for detecting a virus in a subject.

[0508] A virus contained in a pharmaceutical composition, combination or kit can include any virus provided herein. The pharmaceutical compositions, combinations or kits can include one or more additional viruses that can be selected from a viruses provided herein, or other therapeutic or diagnostic virus, such as any oncolytic virus provided herein.

[0509] 1. Pharmaceutical Compositions

[0510] Provided herein are pharmaceutical compositions containing a virus provided herein and a suitable pharmaceutical carrier. A pharmaceutically acceptable carrier includes a solid, semi-solid or liquid material that acts as a vehicle carrier or medium for the virus. Pharmaceutical compositions provided herein can be formulated in various forms, for example in solid, semi-solid, aqueous, liquid, powder or lyophilized form. Exemplary pharmaceutical compositions containing a virus provided herein include, but are not limited to, sterile injectable solutions, sterile packaged powders, eye drops, tablets, pills, powders, lozenges, sachets, cachets, elixirs, suspensions, emulsions, solutions, syrups, aerosols (as a solid or in a liquid medium), ointments, soft and hard gelatin capsules, and suppositories.

[0511] Examples of suitable pharmaceutical carriers are known in the art and include, but are not limited to, water, buffers, saline solutions, phosphate buffered saline solutions, various types of wetting agents, sterile solutions, alcohols, gum arabic, vegetable oils, benzyl alcohols, gelatin, glycerin, carbohydrates, such as lactose, sucrose, dextrose, amylose or starch, sorbitol, mannitol, magnesium stearate, talc, silicic acid, viscous paraffin, perfume oil, fatty acid monoglycerides and diglycerides, pentaerythritol fatty acid esters, hydroxy methylcellulose, powders, among others. Pharmaceutical compositions provided herein can contain other additives including, for example, antioxidants, preserving agents, analgesic agents, binders, disintegrants, coloring, diluents, excipients, extenders, glidants, solubilizers, stabilizers, tonicity agents, vehicles, viscosity agents, flavoring agents, sweetening agents, emulsions, such as oil/water emulsions, emulsifying and suspending agents, such as acacia, agar, alginic acid, sodium alginate, bentonite, carbomer, carrageenan, carboxymethylcellulose, cellulose, cholesterol, gelatin, hydroxyethyl cellulose, hydroxypropyl cellulose, hydroxypropyl methylcellulose, methylcellulose, octoxynol 9, oleyl alcohol, povidone, propylene glycol monostearate, sodium lauryl sulfate, sorbitan esters, stearyl alcohol, tragacanth, xanthan gum, and derivatives thereof, solvents, and miscellaneous ingredients, such as, but not limited to, crystalline cellulose, microcrystalline cellulose, citric acid, dextrin, liquid glucose, lactic acid, lactose, magnesium chloride, potassium metaphosphate, starch, among others. Such carriers and/or additives can be formulated by conventional methods and can be administered to the subject at a suitable dose. Stabilizing agents such as lipids, nuclease inhibitors, polymers, and chelating agents can preserve the compositions from degradation within the body. Other suitable formulations for use in a pharmaceutical composition can be found, for example, in Remington: The Science and Practice of Pharmacy (2005, Twenty-first edition, Gennaro & Gennaro, eds., Lippencott Williams and Wilkins).

[0512] Pharmaceutical formulations that include a virus provided herein for injection or mucosal delivery typically include aqueous solutions of the virus provided in a suitable buffer for injection or mucosal administration or lyophilized forms of the virus for reconstitution in a suitable buffer for injection or mucosal administration. Such formulations optionally can contain one or more pharmaceutically acceptable carriers and/or additives as described herein or known in the art. Liquid compositions for oral administration generally include aqueous solutions, suitably flavored syrups, aqueous or oil suspensions, and flavored emulsions with edible oils such as corn oil, cottonseed oil, sesame oil, coconut oil, or peanut oil, as well as elixirs and similar pharmaceutical vehicles.

[0513] Pharmaceutical compositions provided herein can be formulated to provide quick, sustained or delayed released of a virus as described herein by employing procedures known in the art. For preparing solid compositions such as tablets, a virus provided herein is mixed with a pharmaceutical carrier to form a solid composition. Optionally, tablets or pills are coated or otherwise compounded to provide a dosage form affording the advantage of prolonged action in the subject. For example, a tablet or pill contains an inner dosage and an outer dosage component, the latter being in the form of an envelope over the former. The two components can be separated by an enteric layer, for example, which serves to resist disintegration in the stomach and permit the inner component to pass intact into the duodenum or to be delayed in release. A variety of materials are used for such enteric layers or coatings, including, for example, a number of polymeric acids and mixtures of polymeric acids with such materials as shellac, cetyl alcohol, and cellulose acetate.

[0514] Compositions for inhalation or insufflation include solutions and suspensions in pharmaceutically acceptable, aqueous or organic solvents, or mixtures thereof, and powders. These liquid or solid compositions optionally can contain suitable pharmaceutically acceptable excipients and/or additives as described herein or known in the art. Such compositions are administered, for example, by the oral or nasal respiratory route for local or systemic effect. Compositions in pharmaceutically acceptable solvents are nebulized by use of inert gases. Nebulized solutions are inhaled, for example, directly from the nebulizing device, from an attached face mask tent, or from an intermittent positive pressure breathing machine. Solution, suspension, or powder compositions are administered, orally or nasally, for example, from devices which deliver the formulation in an appropriate manner such as, for example, use of an inhaler.

[0515] Pharmaceutical compositions provided herein can be formulated for transdermal delivery via a transdermal delivery devices (“patches”). Such transdermal patches are used to provide continuous or discontinuous infusion of a virus provided herein. The construction and use of transdermal patches for the delivery of pharmaceutical agents are performed according to methods known in the art (see, for example, U.S. Pat. No. 5,023,252). Such patches are constructed for continuous, pulsatile, or on-demand delivery of a virus provided herein.

[0516] Colloidal dispersion systems that can be used for delivery of viruses include macromolecule complexes, nanocapsules, microspheres, beads and lipid-based systems including oil-in-water emulsions (mixed), micelles, liposomes and lipoplexes. An exemplary colloidal system is a liposome. Organ-specific or cell-specific liposomes can be used in order to achieve delivery only to the desired tissue. The targeting of liposomes can be carried out by the person skilled in the art by applying commonly known methods. This targeting includes passive targeting (utilizing the natural tendency of the liposomes to distribute to cells of the reticuloendothelial system (RES) in organs which contain sinusoidal capillaries) or active targeting (for example, by coupling the liposome to a specific ligand, for example, an antibody, a receptor, sugar, glycolipid and protein by methods known to those of skill in the art). Monoclonal antibodies can be used to target liposomes to specific tissues, for example, tumor tissue, via specific cell-surface ligands.

[0517] 2. Host Cells

[0518] Host cells that contain a virus provided herein are provided. Such cells can be employed in vitro use or in vivo use, for example, as described in the diagnostic or therapeutic methods provided herein. The host cells can be a group of a single type of cells or a mixture of different types of cells. Host cells can include cultured cell lines, primary cells and proliferative cells. The host cells can include any of a variety of animal cells, such as mammalian, avian and insect cells and tissues that are susceptible to infection by the virus, including, but not limited to, human, primate, rodent (e.g., mouse, rate, hamster, or rabbit) and chicken embryo cells. Suitable host cells include, but are not limited to, hematopoietic cells (hematopoietic stem cells, leukocytes, lymphocytes, monocytes, macrophages, APC, dendritic cells, non-human cells and the like), pulmonary cells, tracheal cells, hepatic cells, epithelial cells, endothelial cells, muscle cells (e.g., skeletal muscle, cardiac muscle or smooth muscle), fibroblasts, tumor cells and cell lines including, for example, CV-1, BSC40, Vero, BSC40 and BSC-1, and human HeLa cells. Methods for infecting and/or transforming host cells, phenotypically selecting infected cells or transformants, and other such methods are known in the art.

[0519] 3. Combinations

[0520] Provided are combinations of a virus provided herein and a second agent, such as a second virus or other therapeutic or diagnostic agent. A combination can include a virus provided herein with one or more additional viruses, including, for example, one or more additional diagnostic or therapeutic viruses. A combination can contain pharmaceutical compositions containing a virus provided herein or host cells containing a virus as described herein. A combination also can include any virus or reagent for effecting treatment or diagnosis in accord with the methods provided herein such as, for example, an antiviral or chemotherapeutic agent. Combinations also can contain a compound used for the modulation of gene expression from endogenous or heterologous genes encoded by the virus.

[0521] Combinations provided herein can contain a virus and a therapeutic compound. Therapeutic compounds for the compositions provided herein can be, for example, an anti-cancer or chemotherapeutic compound. Exemplary therapeutic compounds include, for example, cytokines, growth factors, photosensitizing agents, radionuclides, toxins, siRNA molecules, enzyme/pro E drug pairs, anti-metabolites, signaling modulators, anti-cancer antibiotics, anti-cancer antibodies, angiogenesis inhibitors, chemotherapeutic compounds, antimetastatic compounds or a combination of any thereof.

[0522] Viruses provided herein can be combined with an anti-cancer compound, such as a platinum coordination complex. Exemplary platinum coordination complexes include, for example, cisplatin, carboplatin, oxaliplatin, DWA2114R, NK121, IS3 295, and 254-S. Exemplary chemotherapeutic agents also include, but are not limited to, methotrexate, vincristine, adriamycin, non-sugar containing chloroethylnitrosoureas, 5-fluorouracil, mitomycin C, bleomycin, doxorubicin, dacarbazine, taxol, fragyline, Meglamine GLA, valrubicin, carmustine, polifeprosan, MM1270, BAY 12-9566, RAS farnesyl transferase inhibitor, farnesyl transferase inhibitor, MMP, MTA/LY231514, lometrexol/LY264618, Glamolec, CI-994, TNP-470, Hycamtin/topotecan, PKC412, Valspodar/PSC833, Novantrone/mitoxantrone, Metaret/suramin, BB-94/batimastat, E7070, BCH-4556, CS-682, 9-AC, AG3340, AG3433, Incel/VX-710, VX-853, ZD0101, IS1641, ODN 698, TA 2516/marimastat, BB2516/marimastat, CDP 845, D2163, PD183805, DX8951f, Lemonal DP 2202, FK 317, picibanil/OK-432, valrubicin/AD 32, strontium-89/Metastron, Temodal/temozolomide, Yewtaxan/paclitaxel, Taxol/paclitaxel, Paxex/paclitaxel, Cyclopax/oral paclitaxel, Xeloda/capecitabine, Furtulon/doxifluridine, oral taxoids, SPU-077/cisplatin, HMR 1275/flavopiridol, CP-358 (774)/EGFR, CP-609 (754)/RAS oncogene inhibitor, BMS-182751/oral platinum, UFT(Tegafur/Uracil), Ergamisol/levamisole, Campto/levamisole, Eniluracil/776C85/5FU enhancer, Camptosar/irinotecan, Tomudex/raltitrexed, Leustatin/cladribine, Caelyx/liposomal doxorubicin, Myocet/liposomal doxorubicin, Doxil/liposomal doxorubicin, Evacet/liposomal doxorubicin, Fludara/fludarabine, Pharmorubicin/epirubicin, DepoCyt, ZD1839, LU 79553/Bis-Naphthalimide, LU 103793/Dolastatin, Gemzar/gemcitabine, ZD 0473/AnorMED, YM 116, Iodine seeds, CDK4 and CDK2 inhibitors, PARP inhibitors, D4809/dexifosfamide, Ifex/Mesnex/ifosfamide, Vumon/teniposide, Paraplatin/carboplatin, Platinol/cisplatin, VePesid/Eposin/Etopophos/etoposide, ZD 9331, Taxotere/docetaxel, prodrugs of guanine arabinoside, taxane analogs, nitrosoureas, alkylating agents such as melphalan and cyclophosphamide, aminoglutethimide, asparaginase, busulfan, carboplatin, chlorambucil, cytarabine HCl, dactinomycin, daunorubicin HCl, estramustine phosphate sodium, etoposide (VP16-213), floxuridine, fluorouracil (5-FU), flutamide, hydroxyurea (hydroxycarbamide), ifosfamide, interferon alfa-2a, interferon alfa-2b, leuprolide acetate (LHRH-releasing factor analogue), lomustine (CCNU), mechlorethamine HCl (nitrogen mustard), mercaptopurine, mesna, mitotane (o,p′-DDD), mitoxantrone HCl, octreotide, plicamycin, procarbazine HCl, streptozocin, tamoxifen citrate, thioguanine, thiotepa, vinblastine sulfate, amsacrine (m-AMSA), azacitidine, erythropoietin, hexamethylmelamine (HMM), interleukin 2, mitoguazone (methyl-GAG; methyl glyoxal bis-guanylhydrazone; MGBG), pentostatin (2′deoxycoformycin), semustine (methyl-CCNU), teniposide (VM-26) and vindesine sulfate. Additional exemplary therapeutic compounds for the use in pharmaceutical compositions and combinations provided herein can be found elsewhere herein (see e.g., Section I for exemplary cytokines, growth factors, photosensitizing agents, radionuclides, toxins, siRNA molecules, enzyme/pro-drug pairs, anti-metabolites, signaling modulators, anti-cancer antibiotics, anti-cancer antibodies, angiogenesis inhibitors, and chemotherapeutic compounds).

[0523] In some examples, the combination can include additional therapeutic compounds such as, for example, compounds that are substrates for enzymes encoded and expressed by the virus, or other therapeutic compounds provided herein or known in the art to act in.concert with a virus. For example, the virus can express an enzyme that converts a prodrug into an active chemotherapy drug for killing the cancer cell. Hence, combinations provided herein can contain a therapeutic compound, such as a prodrug. An exemplary virus/therapeutic compound combination can include a virus encoding Herpes simplex virus thymidine kinase with the prodrug ganciclovir. Additional exemplary enzyme/pro-drug pairs, for the use in combinations provided include, but are not limited to, varicella zoster thymidine kinase/ganciclovir, cytosine deaminase/5-fluorouracil, purine nucleoside phosphorylase/6-methylpurine deoxyriboside, beta lactamase/cephalosporin-doxorubicin, carboxypeptidase G2/4-[(2-chloroethyl)(2-mesyloxyethyl)amino]benzoyl-L-glutamic acid, cytochrome P450/acetaminophen, horseradish peroxidase/indole-3-acetic acid, nitroreductase/CB 1954, rabbit carboxylesterase/7-ethyl-10-[4-(1-piperidino)-1-piperidino]carbonyloxycamptothecin (CPT-11), mushroom tyrosinase/bis-(2-chloroethyl)amino-4-hydroxyphenylaminomethanone 28, beta galactosidase/1-chloromethyl-5-hydroxy-1,2-dihydro-3H-benz[e]indole, beta glucuronidase/epirubicin-glucuronide, thymidine phosphorylase/5′-deoxy-5-fluorouridine, deoxycytidine kinase/cytosine arabinoside, beta-lactamase and linamerase/linamarin. Additional exemplary prodrugs, for the use in combinations can also be found elsewhere herein (see e.g., Section I). Any of a variety of known combinations provided herein or otherwise known in the art can be included in the combinations provided herein.

[0524] In some examples, the combination can include compounds that can kill or inhibit viral growth or toxicity. Such compounds can be used to alleviate one or more adverse side effects that can result from viral infection (see, e.g., U.S. Patent Pub. No. US 2009-016228-A1). Combinations provided herein can contain antibiotic, antifungal, anti-parasitic or antiviral compounds for treatment of infections. In some examples, the antiviral compound is a chemotherapeutic agent that inhibits viral growth or toxicity.

[0525] Exemplary antibiotics which can be included in a combination with a virus provided herein include, but are not limited to, ceftazidime, cefepime, imipenem, aminoglycoside, vancomycin and antipseudomonal β-lactam. Exemplary antifungal agents which can be included in a combination with a virus provided herein include, but are not limited to, amphotericin B, dapsone, fluconazole, flucytosine, griseofulvin, itraconazole, ketoconazole, miconazole, clotrimazole, nystatin, and combinations thereof. Exemplary antiviral agents can be included in a combination with a virus provided herein include, but are not limited to, cidofovir, alkoxyalkyl esters of cidofovir (CDV), cyclic CDV, and (S)-9-(3-hydroxy-2 phosphonylmethoxypropyl)adenine, 5-(dimethoxymethyl)-2′-deoxyuridine, isatin-beta-thiosemicarbazone, N-methanocarbathymidine, brivudine, 7-deazaneplanocin A, ST-246, Gleevec, 2′-beta-fluoro-2′,3′-dideoxyadenosine, indinavir, nelfinavir, ritonavir, nevirapine, AZT, ddI, ddC, and combinations thereof. Typically, combinations with an antiviral agent contain an antiviral agent known to be effective against the virus of the combination. For example, combinations can contain a vaccinia virus with an antiviral compound, such as cidofovir, alkoxyalkyl esters of cidofovir, ganciclovir, acyclovir, ST-246, Gleevec, and derivatives thereof.

[0526] In some examples, the combination can include a detectable compound. A detectable compound can include, for example, a ligand, substrate or other compound that can interact with and/or bind specifically to a protein or RNA encoded and expressed by the virus, and can provide a detectable signal, such as a signal detectable by tomographic, spectroscopic, magnetic resonance, or other known techniques. In some examples, the protein or RNA is an exogenous protein or RNA. In some examples, the protein or RNA expressed by the virus modifies the detectable compound where the modified compound emits a detectable signal. Exemplary detectable compounds can be, or can contain, an imaging agent such as a magnetic resonance, ultrasound or tomographic imaging agent, including a radionuclide. The detectable compound can include any of a variety of compounds as provided elsewhere herein or are otherwise known in the art. Exemplary proteins that can be expressed by the virus and a detectable compound combinations employed for detection include, but are not limited to luciferase and luciferin, β-galactosidase and (4,7,10-tri(acetic acid)-1-(2-β-galactopyranosylethoxy)-1,4,7,10-tetraazacyclododecane) gadolinium (Egad), and other combinations known in the art.

[0527] In some examples, the combination can include a gene expression modulating compound that regulates expression of one or more genes encoded by the virus. Compounds that modulate gene expression are known in the art, and include, but are not limited to, transcriptional activators, inducers, transcriptional suppressors, RNA polymerase inhibitors and RNA binding compounds such as siRNA or ribozymes. Any of a variety of gene expression modulating compounds known in the art can be included in the combinations provided herein. Typically, the gene expression modulating compound included with a virus in the combinations provided herein will be a compound that can bind, inhibit or react with one or more compounds, active in gene expression such as a transcription factor or RNA of the virus of the combination. An exemplary virus/expression modulator combinations can be a virus encoding a chimeric transcription factor complex having a mutant human progesterone receptor fused to a yeast GALA DNA-binding domain an activation domain of the herpes simplex virus protein VP16 and also containing a synthetic promoter containing a series of GALA recognition sequences upstream of the adenovirus major late EIB TATA box, where the compound can be RU486 (see, e.g., Yu et al., (2002) Mol Genet Genomics 268:169-178). A variety of other virus/expression modulator combinations known in the art also can be included in the combinations provided herein.

[0528] In some examples, the combination can contain nanoparticles. Nanoparticles can be designed such that they carry one or more therapeutic agents provided herein. Additionally, nanoparticles can be designed to carry a molecule that targets the nanoparticle to the tumor cells. In one non-limiting example, nanoparticles can be coated with a radionuclide and, optionally, an antibody immunoreactive with a tumor-associated antigen.

[0529] In some examples, the combination can contain one or more additional therapeutic and/or diagnostic viruses or other therapeutic and/or diagnostic microorganism (e.g., therapeutic and/or diagnostic bacteria) for diagnosis or treatment. Exemplary therapeutic and/or diagnostic viruses are known in the art and include, but are not limited to, therapeutic and/or diagnostic poxviruses, herpesviruses, adenoviruses, adeno-associated viruses, and reoviruses. Exemplary oncolytic viruses are described herein above.

[0530] 4. Kits

[0531] The viruses, cells, pharmaceutical compositions or combinations provided herein can be packaged as kits. Kits can optionally include one or more components such as instructions for use, devices and additional reagents, and components, such as tubes, containers and syringes for practice of the methods. Exemplary kits can include a virus provided herein, and can optionally include instructions for use, a device for detecting a virus in a subject, a device for administering the virus to a subject, or a device for administering an additional agent or compound to a subject.

[0532] In one example, a kit can contain instructions. Instructions typically include a tangible expression describing the virus and, optionally, other components included in the kit, and methods for administration, including methods for determining the proper state of the subject, the proper dosage amount, and the proper administration method, for administering the virus. Instructions also can include guidance for monitoring the subject over the duration of the treatment.

[0533] In another example, a kit can contain a device for detecting a virus in a subject. Devices for detecting a virus in a subject can include a low light imaging device for detecting light, for example, emitted from luciferase, or fluoresced from fluorescent protein, such as a green or red fluorescent protein, a magnetic resonance measuring device such as an MRI or NMR device, a tomographic scanner, such as a PET, CT, CAT, SPECT or other related scanner, an ultrasound device, or other device that can be used to detect a protein expressed by the virus within the subject. Typically, the device of the kit will be able to detect one or more proteins expressed by the virus of the kit. Any of a variety of kits containing viruses and detection devices can be included in the kits provided herein, for example, a virus expressing luciferase and a low light imager or a virus expressing fluorescent protein, such as a green or red fluorescent protein, and a low light imager.

[0534] Kits provided herein also can include a device for administering a virus to a subject. Any of a variety of devices known in the art for administering medications, pharmaceutical compositions and vaccines can be included in the kits provided herein. Exemplary devices include, but are not limited to, a hypodermic needle, an intravenous needle, a catheter, a needle-less injection device, an inhaler and a liquid dispenser, such as an eyedropper. For example, a virus to be delivered systemically, for example, by intravenous injection, can be included in a kit with a hypodermic needle and syringe. Typically, the device for administering a virus of the kit will be compatible with the virus of the kit; for example, a needle-less injection device such as a high pressure injection device can be included in kits with viruses not damaged by high pressure injection, but is typically not included in kits with viruses damaged by high pressure injection.

[0535] Kits provided herein also can include a device for administering an additional agent or compound to a subject. Any of a variety of devices known in the art for administering medications to a subject can be included in the kits provided herein. Exemplary devices inclUde, but are not limited to, a hypodermic needle, an intravenous needle, a catheter, a needle-less injection device, an inhaler and a liquid dispenser, such as an eyedropper. Typically the device for administering the compound of the kit will be compatible with the desired method of administration of the compound. For example, a compound to be delivered systemically or subcutaneously can be included in a kit with a hypodermic needle and syringe.

[0536] The kits provided herein also can include any device for applying energy to a subject, such as electromagnetic energy. Such devices include, but are not limited to, a laser, light-emitting diodes, fluorescent lamps, dichroic lamps, and a light box. Kits also can include devices to effect internal exposure of energy to a subject, such as an endoscope or fiber optic catheter.

### G. THERAPEUTIC, DIAGNOSTIC AND MONITORING METHODS

[0537] The methods provided herein can be used for diagnostic, monitoring and/or therapeutic procedures. The initial step in the methods provided herein, involves administering a nucleic acid encoding one or more chromophore-producing enzymes to a subject, resulting in production of the chromophore(s) in a cell or tissue that is to be treated, detected and/or monitored. As described elsewhere herein, any expression vector, such as an oncolytic virus, for example LIVP virus, including derivatives thereof (described elsewhere herein), can be modified to contain nucleic acid encoding one or more chromophore-producing enzymes (e.g., Tyrosinase and/or Tyrosinase-related protein-1) and administered a subject, resulting in translation of the chromophore-producing enzyme(s) and production of the chromophore(s) in a target cell or tissue. Following nucleic acid delivery and chromophore accumulation, the chromophore-containing cell or tissue is exposed to one or more forms of energy, for example, electro-magnetic, acoustic, and/or magnetic energy, which is absorbed by the accumulated chromophore and utilized for therapeutic, diagnostic, and or monitoring applications.

[0538] The time between nucleic acid delivery and energy application depends on the desired application. Generally, timing is a function of the delivery agent and also the targeted tissue/cells. Energy should be applied/administered after a sufficient time for the delivered nucleic acid to be expressed and for the chromophore to be produced. For example, for therapeutic applications, the energy application can occur within 4 hr to 3 months after the nucleic acid(s) encoding one or more chromophore-producing enzymes are delivered to a subject, for example, within 6 hr to 2 months, 12 hr to 1 month, 18 hr to 2 weeks, typically 24 hr to 1 week or 1, 2, 3, 4, 5, 6, or 7 days post nucleic acid delivery. In some examples, for example, when circulating cells are the target of the therapeutic application, external energy application occurs within 4 to 36 hr after nucleic acid delivery, for example 12-24 hr, typically 18-24 hr after nucleic acid delivery, such as 18, 19, 20, 21, 22, 23, or 24 hr after nucleic acid delivery. Typically, for viruses, the energy is applied 24 hours, 48 hrs, 72 hours, 96 hours, 5 days, 6 days, 7 days, or 8 days after delivery of the nucleic acid.

[0539] The energy can be applied one time, repeatedly and/or intermittently after administration of the nucleic acid molecule. The energy also can be applied a plurality of times. Once nucleic acid treatment commences, and is repeated, each (nucleic acid delivery and energy treatment) can be administered at scheduled intervals. For example, treatment can be effected every day, every other day, once a week or once a month. In addition, since the energy treatment can be combined with detection, administration can be empirically determined as tumor tissue/cells are eliminated.

[0540] For example, application of therapeutic energy administration can occur in a single dose or in multiple doses, such as 2, 3, 4, 5, 6, 7 or more doses, for example, in one or more cycles of administration, over a period of time. In some examples, one or more forms of energy can be administered on the first day of the cycle, the first and second day of the cycle, each of the first three consecutive days of the cycle, each of the first four consecutive days of the cycle, each of the first five consecutive days of the cycle, each of the first six consecutive days of the cycle, or each of the first seven consecutive days of the cycle. The dose of energy applied need not be the same on consecutive days, nor in subsequent cycles. The type of energy applied (e.g., electro-magnetic, acoustic, and/or magnetic energy) also can vary between administrations. Generally, a cycle of administration is 7 days, 14 days, 21 days or 28 days. Depending on the responsiveness or prognosis of the patient, the cycle of administration is repeated over the course of several months or years.

[0541] For diagnostic and monitoring methods, described herein, chromophore-containing cells or tissues can be detected for example, beginning at 6 hr to 1 week after nucleic acid delivery, for example 12-72 hr, 16-48, typically 18-48 hr, such as 18, 20, 24, 30, 36, 42, or 48 hr after nucleic acid delivery. Detection of chromophore-containing cells or tissues can be repeated at any time after the initial detection, for example, for monitoring applications. In some examples the chromophore-containing cells or tissues are detected and/or monitored following a single administration of the nucleic acid encoding the chromophore-producing enzyme(s). In other examples, booster administrations of the nucleic acid can be administered between detection procedures.

[0542] In some examples diagnostic/detection methods are combined with therapeutic methods described herein. For example, diagnostic/detection methods can be used prior to therapeutic methods to detect the cell(s) or tissue(s) to be treated and direct application of the therapeutic treatment. In other examples, detection methods, described herein, can be used to monitor the efficacy of the therapeutic methods. In some examples, the detection methods can be used to monitor the effects of applied therapeutic methods and to diagnose additional cells or tissues for therapeutic treatment that may arise over the course of the treatment regimen.

[0543] For therapeutic methods described herein, energy, for example, electromagnetic energy, is applied to the cell or tissue containing the chromophore product, resulting in local production of heat and/or toxic chemicals (e.g., reactive oxygen species) which effect destruction of the host cell or tissue, or sensitize the cell or tissue for additional therapeutic treatment(s). For diagnostic methods described herein, the properties of the chromophore enhance detection and/or diagnosis of the chromophore-producing host cell or tissue using one or more diagnostic imaging methods, for example ultrasound, magnetic resonance, and/or optoacoustic imaging methods. The chromophore-containing cell or tissue of a subject also can be monitored using any one or more of the diagnostic imaging methods, for example before, during, and/or following one or more therapeutic treatments, including one or more therapeutic treatments exploiting the chromophore product as described herein.

[0544] The therapeutic, diagnostic, and/or monitoring methods described herein, can be applied to any proliferative disorders or hyperproliferative disorders, including any disorders involving abnormal proliferation of cells. Such disorders include, but are not limited to, neoplastic diseases; inflammatory responses and disorders, including wound healing responses; psoriasis; restenosis; macular degeneration; diabetic retinopathies; endometriosis; benign prostatic hypertrophy; benign prostatic hyperplasia; hypertrophic scarring; cirrhosis; proliferative vitreoretinopathy; retinopathy of prematurity; and autoimmune or immunoproliferative diseases or disorders, e.g., inflammatory bowel disease, rheumatoid arthritis, multiple sclerosis, systemic lupus erythematosus (SLE) and vascular hyperproliferation secondary to retinal hypoxia or vasculitis.

[0545] Exemplary neoplastic diseases, for which the therapeutic, diagnostic, and/or monitoring methods described herein can be applied, include carcinoma, sarcoma, lymphoma or leukemia. In particular, the methods provided herein can effect treatment and/or detection of solid tumors (e.g., sarcomas, carcinomas or epithelial tumors or lymphomas) and cancers, other than solid tumors, such as leukemia and metastatic disease. For example, exemplary tumors, cancers or neoplastic diseases include, for example, carcinoma of the tongue, mouth, throat, stomach, cecum, colon, rectum, breast, ovary, uterus, thyroid, adrenal cortex, lung, kidney, prostate, pancreas, a melanoma, a basal cell carcinoma of the skin, a leukemia, a lymphoma, or an osteosarcoma.

[0546] In particular, examples of solid tumors include, but are not limited to, sarcomas and carcinomas such as, but not limited to: fibrosarcoma, myxosarcoma, liposarcoma, chondrosarcoma, osteogenic sarcoma, chordoma, angiosarcoma, endotheliosarcoma, lymphangiosarcoma, lymphangioendotheliosarcoma, synovioma, mesothelioma, Ewing's tumor, leiomyosarcoma, rhabdomyosarcoma, colon carcinoma, pancreatic cancer, breast cancer, ovarian cancer, prostate cancer, squamous cell carcinoma, basal cell carcinoma, adenocarcinoma, sweat gland carcinoma, sebaceous gland carcinoma, papillary carcinoma, papillary adenocarcinomas, cystadenocarcinoma, medullary carcinoma, bronchogenic carcinoma, renal cell carcinoma, hepatoma, bile duct carcinoma, choriocarcinoma, seminoma, embryonal carcinoma, Wilms tumor, cervical cancer, testicular tumor, lung carcinoma, small cell lung carcinoma, bladder carcinoma, epithelial carcinoma, glioma, astrocytoma, medulloblastoma, craniopharyngioma, ependymoma, pinealoma, hemangioblastoma, acoustic neuroma, oligodendroglioma, meningioma, melanoma, neuroblastoma, and retinoblastoma.

[0547] Cancers amenable to the treatment and detection methods described herein also include cancers that metastasize. It is understood by those in the art that metastasis is the spread of cells from a primary tumor to a noncontiguous site, usually via the bloodstream or lymphatics, which results in the establishment of a secondary tumor growth. Examples of cancers contemplated for treatment include, but are not limited to melanoma, including choroidal and cutaneous melanoma; bladder, non-small cell lung, small cell lung, lung, head, neck, breast, pancreatic, gum, tongue, prostate, renal, bone, testicular, ovarian, cervical, gastrointestinal lymphoma, brain, or colon cancer; hepatocarcinoma; retinoblastoma; mesothelioma; astrocytoma; glioblastoma; neuroblastoma; and any other tumors or neoplasms that are metastasized or at risk of metastasis.

[0548] The subject of the methods provided herein can be any subject, such as an animal or plant subject, including mammal or avian species. For example, the animal subject can be a human or non-human animal including, but not limited to, domesticated and farm animals, such as a pig, cow, a goat, sheep, horse, cat, or dog. In particular examples, the animal subject is a human subject.

[0549] 1. Delivery of Nucleic Acid Encoding Melanin-Producing Enzymes and Melanin Biosynthesis

[0550] Any mode of administering exogenous nucleic acid to a can be employed to deliver a nucleic acid encoding a chromophore producing enzyme, such as a melanin-producing enzyme, to a subject, provided the mode of administration permits the nucleic acid to enter a target cell or tissue, for example, a tumor or metastasis. For example, viral or non-viral delivery methods of nucleic acid delivery can be used. The nucleic acid molecule can be cloned into any type of expression vector known to one of skill in the art, including plasmids, cosmids, artificial chromosomes, such as human artificial chromosomes, bacterial artificial chromosomes, yeast artificial chromosomes, and viral vectors.

[0551] a. Methods of Nucleic Acid Delivery

[0552] The nucleic acid molecule can be delivered or administered to a subject locally or systemically. For example, the nucleic acid molecule can be delivered intravenously, intraarterially, intratumorally, endoscopically, intralesionally, intramuscularly, intradermally, intraperitoneally, intravesicularly, intraarticularly, intrapleurally, percutaneously, subcutaneously, orally, parenterally, intranasally, intratracheally, by inhalation, intracranially, intraprostaticaly, intravitreally, topically, ocularly, vaginally, or rectally. Typically, administration is intravenous. In some examples, administration of the nucleic acid can be effected directly into the target tissue to be treated, such as locally into a body cavity. To increase the frequency of delivery into cells into a subject, the nucleic acid, such as a non-viral vector or DNA, can be delivered in the presence of a physical method to facilitate entry into cells selected from among electroporation, sonoporation, hydrodynamic, pressure, ultrasound and gene gun.

[0553] For example, several methods exist whereby an expression vector can be introduced into a target cell or tissue, including but not limited to transfection, microinjection, ballistic DNA injection (e.g., gene gun), and infection, any of which can be used in the methods provided herein. Methodologies of transfection of non-viral expression vectors are known in the art and including, but limited to, calcium phosphate, electroporation, heat shock, magnetofection, and the use of cationic lipids such as Lipofectamine™, FuGene®, Lipofectin™, Optifect™ and others known to one of skill in the art. One of skill in the art can determine which cell type should be transfected or infected, the type of expression vector to use, and by which method the expression vector is introduced, based on empirical determination.

[0554] In examples where the expression vector is a virus, any mode of viral delivery can be used. Modes of viral administration can include, but are not limited to, systemic, parenteral, intravenous, intraperitoneal, subcutaneous, intramuscular, transdermal, intradermal, intra-arterial (e.g., hepatic artery infusion), intravesicular perfusion, intrapleural, intraarticular, topical, intratumoral, intralesional, endoscopic, multipuncture (e.g., as used with smallpox vaccines), inhalation, percutaneous, subcutaneous, intranasal, intratracheal, oral, intracavity (e.g., administering to the bladder via a catheter, administering to the gut by suppository or enema), vaginal, rectal, intracranial, intraprostatic, intravitreal, aural, ocular or topical administration.

[0555] One skilled in the art can select any mode of administration compatible with the subject and the nucleic acid and that also is likely to result in the nucleic acid reaching and entering the target cell-type or tissue, e.g., tumors and/or metastases. The route of administration can be selected by one skilled in the art according to any of a variety of factors, including the nature of the disease, the properties of the target cell or tissue, and the nature of the nucleic acid, for example, the particular virus to be administered.

[0556] Provided herein are methods of systemically administering a vaccinia virus, such as any provided herein, to treat a proliferative or inflammatory disease or condition. In particular, the condition is associated with immunoprivileged cells or tissues. A disease or condition associated with immunoprivileged cells or tissues includes, for example, proliferative disorders or conditions, including the treatment (such as inhibition) of cancerous cells, neoplasms, tumors, metastases, cancer stem cells, and other immunoprivileged cells or tissues, such as wounds and wounded or inflamed tissues. In particular examples of such methods, compositions provided herein are administered by intravenous administration.

[0557] To decrease susceptibility of the administered nucleic acid to degradation by serum proteases following systemic administration, and improve stability in vivo, the nucleic acid can be condensed or encapsulated within vectors using viral capsids, lipids, cationic polymers, or protein polymers, such as silk-elastin like protein polymers (SELP). For example, a vaccinia virus, modified to contain nucleic acid encoding a chromophore-producing enzyme, can be encapsulated in a protein polymer and delivered to a subject by systemic administration (e.g., intravenous administration) or topical administration directly to the surface of a wound or lesion or other surface of a subject. For example, administration to the target site can be performed, for example, by systemic administration by injection into an artery or by topical administration by direct application onto a surface or by surface application of a coated device (e.g., bandage). Exemplary methods of delivery of such vaccinia in protein-polymer compositions is described in U.S. application Ser. No. 61/742,895, any of which can be used in the methods herein. In some examples, a diagnostic or therapeutic agent as described elsewhere herein also can be similarly administered.

[0558] The compositions provided herein can be administered by a single injection, by multiple injections, or continuously. For example, the compositions can be administered by slow infusion including using an intravenous pump, syringe pump, intravenous drip or slow injection. For example, continuous administration of the compositions can occur over the course of minutes to hours, such as between or about between 1 minute to 1 hour, such as between 20 and 60 minutes.

[0559] b. Dosages and Dosage Regimes

[0560] The dosage regimen can be any of a variety of methods and amounts, and can be determined by one skilled in the art according to known clinical factors. As is known in the medical arts, dosages for any one patient can depend on many factors, including the subject's species, size, body surface area, age, sex, immunocompetence, and general health, the particular virus to be administered, duration and route of administration, the kind and stage of the disease, for example, tumor size, and other treatments or compounds, such as chemotherapeutic or other drugs, being administered concurrently. In examples where the nucleic acid is a virus, dosage levels can be affected by the infectivity of the virus and the nature of the virus, in addition to the factors above, as can be determined by one skilled in the art. The dosages of administered nucleic acid or vector can be determined by one of skill in the art. Considerations in determining the dosage can include the cell type and/or tissue to which the nucleic acid is to be administered, the rate of translation of the chromophore-producing enzyme, the stability (half-life) of the chromophore-producing enzyme, the promoter used to express the transgene, the biosynthesis pathway of the chromophore produced by the expressed transgene, the particular delivered agent, the method of delivery and other factors.

[0561] Where the delivered agent is non-viral nucleic acid, an effective dosage amount of nucleic acid (i.e., DNA or RNA) is in the range of from about 0.005 mg/kg body weight to about 50 mg/kg body weight. Generally, the dosage is in a range of or of about from 0.005 mg/kg to about or 20 mg/kg, and more generally in a range of or of about 0.05 mg/kg to about or 5 mg/kg. For example, for non-viral nucleic acid (e.g., plasmid, naked DNA, siRNA, shRNA or antisense nucleic acid), 0.01 mg to 2000 mg is delivered, such as 0.05 mg to 1500 mg, 1 mg to 1000 mg, 10 mg to 1500 mg, or 100 mg to 1000 mg.

[0562] In the present methods, appropriate minimum dosage levels and dosage regimes of viruses in the compositions herein can be levels sufficient for the virus to survive, grow and replicate in a tumor, metastasis or other wound or lesion. Generally, the virus is administered in an amount that is at least or about or 1×10⁵ pfu. Exemplary minimum levels for administering a virus to a 65 kg human can include at least about 1×10⁵ plaque forming units (pfu), at least about 5×10⁵ pfu, at least about 1×10⁶ pfu, at least about 5×10⁶ pfu, at least about 1×10⁷ pfu, at least about 1×10⁸ pfu, at least about 1×10⁹ pfu, or at least about 1×10¹⁰ pfu. For example, the virus is administered in an amount that is at least or about or is 1×10⁵ pfu, 1×10⁶ pfu, 1×10⁷ pfu, 1×10⁸ pfu, 1×10⁹ pfu, 1×10¹⁰ pfu, 1×10¹¹ pfu, 1×10¹²pfu, 1×10¹³ pfu, or 1×10¹⁴ pfu at least one time over a cycle of administration.

[0563] In the dosage regime, the amount of virus can be delivered as a single administration or multiple times over a cycle of administration. Hence, the methods provided herein can include a single administration of a virus to a subject or multiple administrations of a virus to a subject. In some examples, a single administration is sufficient to establish a virus in a tumor, where the virus can proliferate and can cause or enhance an anti-tumor response in the subject; such methods do not require additional administrations of a virus in order to cause or enhance an anti-tumor response in a subject, which can result, for example in inhibition of tumor growth, inhibition of metastasis growth or formation, reduction in tumor or size, elimination of a tumor or metastasis, inhibition or prevention of recurrence of a neoplastic disease or new tumor formation, or other cancer therapeutic effects.

[0564] In other examples, the virus can be administered on different occasions, separated in time typically by at least one day. For example, the compositions can be administered two times, three time, four times, five times, or six times or more, with one day or more, two days or more, one week or more, or one month or more time between administrations. Separate administrations can increase the likelihood of delivering a virus to a tumor or metastasis, where a previous administration has been ineffective in delivering a virus to a tumor or metastasis. Separate administrations can increase the locations on a tumor or metastasis where virus proliferation can occur or can otherwise increase the titer of virus accumulated in the tumor, which can increase the scale of release of antigens or other compounds from the tumor in eliciting or enhancing a host's anti-tumor immune response, and also can, optionally, increase the level of virus-based tumor lysis or tumor cell death. Separate administrations of a virus can further extend a subject's immune response against viral antigens, which can extend the host's immune response to tumors or metastases in which viruses have accumulated, and can increase the likelihood of a host mounting an anti-tumor immune response.

[0565] When separate administrations are performed, each administration can be a dosage amount that is the same or different relative to other administration dosage amounts. In one example, all administration dosage amounts are the same. In other examples, a first dosage amount can be a larger dosage amount than one or more subsequent dosage amounts, for example, at least 10× larger, at least 100× larger, or at least 1000× larger than subsequent dosage amounts. In one example of a method of separate administrations in which the first dosage amount is greater than one or more subsequent dosage amounts, all subsequent dosage amounts can be the same or smaller amount relative to the first administration.

[0566] Separate administrations can include any number of two or more administrations, including two, three, four, five or six administrations. One skilled in the art can readily determine the number of administrations to perform or the desirability of performing one or more additional administrations according to methods known in the art for monitoring therapeutic methods and other monitoring methods provided herein. Accordingly, the methods provided herein include methods of providing to the subject one or more administrations of a virus, where the number of administrations can be determined by monitoring the subject, and, based on the results of the monitoring, determining whether or not to provide one or more additional administrations. Deciding on whether or not to provide one or more additional administrations can be based on a variety of monitoring results, including, but not limited to, indication of tumor growth or inhibition of tumor growth, appearance of new metastases or inhibition of metastasis, the subject's anti-virus antibody titer, the subject's anti-tumor antibody titer, the overall health of the subject, the weight of the subject, the presence of virus solely in tumor and/or metastases, the presence of virus in normal tissues or organs.

[0567] The time period between administrations can be any of a variety of time periods. The time period between administrations can be a function of any of a variety of factors, including monitoring steps, as described in relation to the number of administrations, the time period for a subject to mount an immune response, the time period for a subject to clear the virus from normal tissue, or the time period for virus proliferation in the tumor or metastasis. In one example, the time period can be a function of the time period for a subject to mount an immune response; for example, the time period can be more than the time period for a subject to mount an immune response, such as more than about one week, more than about ten days, more than about two weeks, or more than about a month; in another example, the time period can be less than the time period for a subject to mount an immune response, such as less than about one week, less than about ten days, less than about two weeks, or less than about a month.

[0568] In another example, the time period can be a function of the time period for a subject to clear the virus from normal tissue; for example, the time period can be more than the time period for a subject to clear the virus from normal tissue, such as more than about a day, more than about two days, more than about three days, more than about five days, or more than about a week. In another example, the time period can be a function of the time period for virus proliferation in the tumor or metastasis; for example, the time period can be more than the amount of time for a detectable signal to arise in a tumor or metastasis after administration of a virus expressing a detectable marker, such as about 3 days, about 5 days, about a week, about ten days, about two weeks, or about a month.

[0569] For example, an amount of virus is administered two times, three times, four times, five times, six times or seven times over a cycle of administration. The amount of virus can be administered on the first day of the cycle, the first and second day of the cycle, each of the first three consecutive days of the cycle, each of the first four consecutive days of the cycle, each of the first five consecutive days of the cycle, each of the first six consecutive days of the cycle, or each of the first seven consecutive days of the cycle. Generally, the cycle of administration is 7 days, 14 days, 21 days or 28 days. Depending on the responsiveness or prognosis of the patient the cycle of administration is repeated over the course of several months or years.

[0570] Generally, appropriate maximum dosage levels or dosage regimes of viruses are levels that are not toxic to the host, levels that do not cause splenomegaly of 3 times or more, levels that do not result in colonies or plaques in normal tissues or organs after about 1 day or after about 3 days or after about 7 days.

[0571] 2. Therapeutic Methods

[0572] The methods provided herein can be used for the treatment of any proliferative disorders or hyperproliferative disorders, including any disorders involving abnormal proliferation of cells, such as neoplastic diseases, inflammatory responses and disorders, which warrant removal of particular cells or tissues while preserving healthy cells and tissues. In particular, provided herein are methods of treating cancerous cells, neoplasms, tumors, metastases and cancer stem cells by delivering nucleic acid encoding a chromophore-producing enzyme (e.g., a melanin producing enzyme such as a tyrosinase or tyrosinase-related protein-1) followed by transferring energy to the chromophore resulting in the destruction of the chromophore-containing host cell or tissue. In some examples provided herein, viruses (e.g., the oncolytic viruses) containing the chromophore-producing enzyme(s) preferentially accumulate in tumors or metastases, resulting in chromophore (e.g., melanin) production in the targeted tissues.

[0573] In some examples, the administration alone of an oncolytic virus, containing nucleic acid encoding one or more melanin producing enzyme(s), results in a slowing of tumor growth, and in some cases an inhibition in tumor growth. As shown previously, solid tumors can be treated with viruses, such as vaccinia viruses, resulting in an enormous tumor-specific virus replication, which can lead to tumor protein antigen and viral protein production in the tumors (U.S. Patent Publication No. 2005-0031643, now U.S. Pat. Nos. 7,588,767, 7,588,771, 7,662,398), which provide and exemplify the GLV-1h68 virus and derivatives thereof. Vaccinia virus administration to mice resulted in lysis of the infected tumor cells and a resultant release of tumor-cell-specific antigens. Continuous leakage of these antigens into the body led to a very high level of antibody titer (in approximately 7-14 days) against tumor proteins, viral proteins, and the virus encoded engineered proteins in the mice. The newly synthesized anti-tumor antibodies and the enhanced macrophage, neutrophil count were continuously delivered via the vasculature to the tumor and thereby provided for the recruitment of an activated immune system against the tumor. The activated immune system then eliminated the foreign compounds of the tumor including the viral particles. This interconnected release of foreign antigens boosted antibody production and continuous response of the antibodies against the tumor proteins to function like an autoimmunizing vaccination system initiated by vaccinia viral infection and replication, followed by cell lysis, protein leakage and enhanced antibody production.

[0574] In the methods provided herein, the administration of a nucleic acid encoding a chromophore-producing enzyme (e.g., a melanin-producing enzyme) is followed by application of an energy source (e.g., electromagnetic energy, ultrasonic waves, or other conduction-based energy source), resulting in a transfer of energy to the chromophore (e.g., melanin). The absorption of the applied energy by the chromophore results in a release of thermal energy and/or the production of toxic products (e.g., ROS products), resulting in destruction of the host cell or tissue. In some examples, the tissue to be treated is a tumor and the transfer of energy from an energy source to the chromophore results in a decrease in tumor volume, including elimination or eradication of the tumor. In some examples, administration of an oncolytic virus containing nucleic acid encoding a melanin-producing enzyme results in selective infection of tumor cells and production of melanin within the tumor. Application of an energy source, for example a heat source, such as a wavelength of electromagnetic energy in the near infrared range, after melanin is produced in the tumor, results in a decrease in tumor volume, including elimination or eradication of the tumor.

[0575] Any form of energy which can be absorbed by the chromophore produced in the target cell or tissue, or precursors thereof, can be used in the methods provided herein, provided the energy can be absorbed by the chromophore product and converted in to a form of energy that can be used for therapeutic treatment. For example, chemical energy, electric energy, radiant energy, electromagnetic energy, nuclear energy, magnetic energy, elastic energy, sound energy, mechanical energy and luminous energy that can be absorbed by the chromophore product and used to generate a heat or chemical-based therapy to a target cell or tissue can be used.

[0576] In some examples, electromagnetic energy is applied as a phototherapeutic heating source to selectively induce toxicity or injury to melanin-producing cells and tissues, for example, cancer cells and tumors. Phototherapeutic tissue injury can be invoked by photothermal, photomechanical, or photochemical mechanisms, or a combination thereof. Photothermal mechanisms result from the conversion of light energy into thermal energy (heat). Photomechanical mechanisms result from rapid tissue heating, with very short, high energy pulses resulting in tissue rupture. Examples of photomechanical injury include photoablation (removal of tissue) and photoacoustics (shock waves). Photochemical mechanisms cause target molecules (e.g., photosensitizers) to start light-induced chemical reactions (e.g., photodynamic therapy (PDT)). The mechanism of tissue injury is a function of the density of power of the light source and the time of exposure. High power treatments for brief time periods (e.g., greater than 10⁶ W·cm²) for short periods of time (e.g., less than 10 μs) results in photomechanical tissue destruction.

[0577] One or more of the energy absorbing therapeutic methods described herein also can be employed in combination therapies, including with chemotherapy, radiotherapy and biological therapy.

[0578] a. Heat Therapies: Hyperthermia and Thermotherapy

[0579] In examples of the methods provided herein, energy is applied to a cell or tissue containing a chromophore, produced as a result of delivery of nucleic acid(s) encoding one or more chromophore-producing enzymes, resulting in the local production of heat which promotes or causes selective destruction of the cell or tissue hosting the chromophore. The degree to which the treated tissue is heated and the duration of the energy application determine the extent to which the chromophore-containing tissue is damaged. Elevating the temperature of a patient's tissue in the range of approximately 40-47° C., typically 41-42° C. (104-117° F., typically 106° F.) is called hyperthermia. At hyperthermic temperatures, heat shock pathways are activated. While some cellular components are damaged at hyperthermic temperatures, healthy cells and tissues are typically capable of recovery following exposure to temperatures within this range. When cells are exposed to higher temperatures, for example, temperatures exceeding approximately 50° C., the treatment is termed thermotherapy. Even brief exposure to thermotherapeutic temperatures results in irreparable damage and indiscriminant cell death, i.e., healthy and diseased cells and tissues are equally susceptible.

[0580] Several types of energy sources can be employed to produce the heat therapies described herein. For example, external or internal heating devices scan be used for application of local, regional, or whole-body heat therapy. Local heat therapies involve the application of heat to a small area, such as a tumor. Heat can be generated externally with high-frequency waves targeting a tumor from a device outside the body. Internal heating methods can employ a sterile probe, including thin, heated wires or hollow tubes filled with warm water, implanted microwave antennae and radiofrequency electrodes.

[0581] A patient's organ or a limb can be heated using regional hyperthermia therapy. This can be achieved with devices that produce high energy, such as magnets. Alternatively, some of the patient's blood can be removed and heated before being perfused into an area that will be internally heated. Whole-body heating also can be implemented in cases where cancer has spread throughout the body. Warm-water blankets, hot wax, inductive coils, and thermal chambers can be used for this purpose.

[0582] The heat therapies described herein results in cell or tissue damage or destruction. The types and extent of molecular and cellular damage caused depend on the duration and degree of heating. For example, extended heating, exceeding hyperthermic temperatures, such as temperatures of or of about 47° C. (e.g., thermotherapeutic temperatures), or temperatures of or exceeding 100° C., leads to increasing degrees of biological response and destruction. A list of some of the biological responses to varying degrees of heat treatment are set forth below in Table 10.

TABLE 10
Biological Responses to Heat Treatment

| | | |
|---|---|---|
| | | Increased heat |
| | | sensitivity of |
| Temper- | | tumors over |
| ature | Biological Effects | normal tissue |

hyperthermic temperatures

| | | |
|---|---|---|
| 40-44° C. | Protein conformational changes | yes |
| | Activation of heat shock pathway | |
| | Increased pore size/permeability | |
| | Increased cell sensitivity to radiation | |
| | Increased blood perfusion in normal tissues | |
| | Decreased blood perfusion in tumors | |
| 45-47° C. | Cytoskeleton reorganization | no |
| | Increased membrane fluidity | |
| | Inhibition of DNA, RNA, protein synthesis | |
| | hyperthermic killing | |

thermotherapeutic temperatures

| | | |
|---|---|---|
| 47-50° C. | Protein denaturation | no |
| ≧50° C. | Reduction of enzymatic activity | no |
| ≧60° C. | Irreversible denaturation of proteins | no |
| | Coagulation of collagens | |
| | Membrane rupture | |

vaporizing temperatures

| | | |
|---|---|---|
| 100° C. | Boiling of tissue water | no |
| | Formation of extracellular vacuoles | |
| | Cell shrinkage | |
| ≧100° C. | Breaking of vacuoles | no |
| | Carbonization | |
| ≧300° C. | Tissue thermoablation | no |
| | Charring | |

[0583] As set forth in forth in Table 10, treatment under hyperthermic conditions results in structural changes in protein conformation. This is due to breaking of hydrogen bonds and disruption of ionic interactions between macromolecules, including transmembrane proteins which are important for maintaining membrane integrity. Cell death, as a result of hyperthermia can be a combination of apoptotic cell death and necrosis. Thus, the extent of hyperthermic damage cannot be fully assessed until about 24-72 hr after treatment (Thomsen, (1991) Photochem Photobiol. 53(6):825-35).

[0584] At hyperthermic temperatures of 42-44° C., tumors are more sensitive than normal tissue (Dickson and Calderwood, “Thermosensitivity of neoplastic tissues in vivo,” in Hyperthermia in cancer therapy, FK Strom ed., (Boston:Hall Medical Publishers, 1983), pp. 63-140). Thus, clinical hyperthermia has been applied in this temperature range to induce cell death selectively of tumor cells while preserving the surrounding normal tissue. In addition, to exploit the hypersensitivity of tumors exposed to heat in this range, thermotherapy can be used in combination with other cancer treatments such as ionizing radiation, photodynamic therapies and drug therapies.

[0585] When temperatures exceed approximately 50° C., the treatment is termed thermotherapy. Thermotherapy facilitates rapid necrotic tissue destruction. There is no selectivity in heat sensitivity between neoplastic and healthy tissues at thermotherapeutic temperatures. Thus, thermotherapeutic treatments require precise targets. At temperatures at or exceeding 100° C., water in the tissue boils, resulting in trapped water vapor that leads to mechanical destruction from coalescing vapor bubbles and tissue dehydration. Continued heating results in burning, producing carbonized and/or charred tissue. Tissue destruction from vaporization and carbonization, at or above 100° C. can be vast and unpredictable. Thus for most applications of the heat therapies provided herein, heating the target cell(s) or tissue(s) to temperatures less than 100° C. is preferred.

[0586] In the methods provided herein, the target internal temperature of a tissue targeted for heat therapy, for example a chromophore-containing tumor, is approximately 42 to 99° C., or more, for a period of about 10 sec to 2 hr, such as 50 to 80° C. for a period of 30 sec to 20 min, for example, 1 to 10 min, such as 1, 2, 3, 4, 5, 6, 7, 8, 9 or 10 min. For some embodiments, the target internal temperature of the tissue targeted for heat therapy is up to or about 47° C. and maintained for a period of 2 min to 2 hr, for example 1 min to 1 hr, such as about 42 to 47° C. for a period of 2 min to 2 hr, 5 min to 1.5 hr, 15 min to 1 hr, 15, 20 min, 25, min, 30 min 45 min or 1 hr, 42 to 44° C. for a period of 5 min to 2 hr, or 45 to 47° C. for a period of 2 to 30 min, 2 to 15 min, 2 to 10 min, such as 2, 3, 4, 5, 6, 7, 8, 9 or 10 min.

[0587] In the methods provided herein, the healthy, non-targeted tissue (e.g., tissue not expressing the chromophore product) is not substantially damaged. For example, during the course of application of the methods provided herein, tissue not expressing the chromophore, with a 0 to 4 cm margin from the edge target tissue (e.g., a tumor), preferably a 1-2 cm margin from the edge of the target tissue does not exceed 44° C., preferably 42° C., more preferably less than 42° C., such as 40° C.

[0588] In some examples herein, measures optionally can be taken to reduce blood flow to a chromophore-expressing target tissue, for example to reduce convective heat loss from the target tissue during application of heat therapy, as described herein or to sensitize the tissue for heat therapy (see e.g., Sturesson et al., Lasers Surg Med. 43(1):29-35 (2011)). For example, a clamp, applying pressure adjacent to the region targeted for therapy, or an occlusion catheter, can isolate a region or segment of a tissue or organ from adjacent tissue(s) and from the surrounding vasculature and restrict blood flow to the target tissue. In some examples, the step of isolating a target tissue from the general circulation can be aided by imaging devices, such as ultrasonography, computed tomography or magnetic resonance imaging. In one example, an intra-operative ultrasound can be used to locate vascular patterns and other anatomical features of the tissue or organ in order to aid in blocking blood flow. In some examples, suction or flushing blood from the target tissue can be performed, in addition to isolation from surrounding vasculature, for example, prior to administration of the energy source to limit competing energy absorbance by biological chromophores present in blood (e.g., hemoglobin), and thereby optimize energy transfer to the chromophore product in the target tissue.

[0589] Methods of thermometry can optionally be employed in the methods provided herein to measure the temperature of the target tissue, for example, before, during and/or after application of the photothermal therapy. For example, the temperature of the target tissue is monitored during and/or immediately after treatment, preferably during treatment, to ensure proper dosage of the phototherapy. In some examples, the energy source of the phototherapy can be connected to a thermostat that can maintain a temperature over the course of the treatment. In other examples, the energy source is coupled to a thermistor, for example, such that the resistance increases when the target tissue reaches a pre-defined degree of temperature or after a pre-defined degree is maintained for a pre-determined amount of time. In other examples, a thermocouple is used, such as a fine-wire thermocouple to monitor and maintain a pre-determined temperature for a prescribed period of time.

[0590] Thus, in the methods described herein, one of skill in the art can determine the optimal irradiation parameters to achieve the desired biological effects in the treated tissue, while taking into account the temperature gradient and the resulting biological effects of the surrounding tissue(s).

[0591] i. Photothermal Therapy Methods

[0592] In the photothermal therapy methods provided herein, energy from electromagnetic radiation (light energy) is converted to thermal energy following absorbance of the applied electromagnetic radiation by one or more chromophores in a targeted cell or tissue, as a result of delivery of one or more chromophore-containing enzyme(s) the cell or tissue. Electromagnetic radiation is generally classified by wavelength (λ) as gamma rays, x-rays, ultraviolet (UV) light, visible light, infrared light, microwaves and radio waves. The wavelength of electromagnetic radiation is inversely proportional to the wave frequency, which is proportional to the photon energy. Table 11 below sets forth these three properties for the broad classifications of electromagnetic radiation.

TABLE 11
Wavelengths, frequencies, and energies of electromagnetic radiation

| Class | Wavelength | Frequency (Hz) | Photon Energy (eV) |
|---|---|---|---|
| Gamma ray | less than 0.01 nm | more than 10 EHZ | 100 keV-300+ GeV |
| X-Ray | 0.01 nm to 10 nm | 30 EHz-30 PHZ | 120 eV to 120 keV |
| Ultraviolet | 10 nm-390 nm | 30 PHZ-790 THz | 3 eV to 124 eV |
| Visible | 390 nm-750 nm | 790 THz-405 THz | 1.7 eV-3.3 eV |
| Infrared | 750 nm-1 mm | 405 THz-300 GHz | 1.24 meV-1.7 eV |
| Microwave | 1 mm-1 meter | 300 GHz-300 MHz | 1.24 μeV-1.24 meV |
| Radio | 1 mm-100,000 km | 300 GHz-3 Hz | 12.4 feV-1.24 meV |

[0593] Optical radiation is part of the electromagnetic radiation spectrum, ranging from 10 nm (in the UV range) to 1 mm (in the IR range). Many photobiology and photomedicine applications employ wavelengths within this range. The International Commission on Illumination (CIE) has subdivided this range into seven classes based on wavelength: UVC (100-280 nm), UVB (280-315 nm), UVA (315-400), light/visible radiation (400-780 nm), 1R-A (780-1400 nm), IR-B (1400-3000 nm), and IR-C (3000 nm-1 mm).

[0594] For biological applications, the dose (e.g., J/cm²) of electromagnetic radiation (light) is the product of the irradiance of the applied electromagnetic energy (i.e., power per unit area, e.g., W/cm²) and the exposure time (e.g., s). The exposure dose determines the biological effect of the exposure. Thus, for application of electromagnetic radiation in the methods provided herein, the same dose (with same effect) can be achieved by a high intensity of light applied for a short time or a lower intensity of light applied for a longer time. However, because chromophores absorb different wavelengths to different extents, the threshold exposure of a chromophore is wavelength dependent. For example, the threshold fluence for a wavelength that is better absorbed than another will be less than that for a wavelength that is less well-absorbed. The threshold fluence for a given chromophore can be determined by one skilled in the art using the absorbance spectrum of the chromophore and empirical determination.

[0595] Sources of electromagnetic energy include lasers, light-emitting diodes, fluorescent lamps, antennae, dichroic lamps, and a light box. Any wavelength, or range of wavelengths, of electromagnetic radiation can be used in the methods provided herein, provided that the energy from the electromagnetic radiation application is absorbed by the chromophore product(s), produced in a cell or tissue following administration of a nucleic acid encoding one or more chromophore-producing enzymes, and converted into thermal energy by way of heat dissipation.

[0596] a) Laser Light Therapy

[0597] In the methods described herein, laser light therapy can be used as an energy source for absorbance-based thermotherapeutic treatments. For example a laser can be used to transmit electromagnetic radiation to be absorbed by a chromophore-containing target cell or tissue, resulting from delivery of one or more nucleic acid molecules encoding one or more chromophore-producing enzyme(s) to the target tissue, which converts the electromagnetic energy into thermal energy and produces heat within the target cell or tissue.

[0598] i) Parameters

[0599] Any type of laser, known to one of skill in the art, can be used for the laser-based thermotherapy methods provided herein, including gas lasers, chemical and excimer lasers, solid-state lasers, fiber lasers, photonic crystal lasers, semiconductor lasers, dye lasers, and free electron lasers, which are named based on the type of gain medium used. Typically, solid-state lasers or fiber lasers, for example fiber optics, are employed in the methods provided herein.

[0600] Selection of the laser source depends on the parameters, selected by one of skill in the art for laser therapy. Parameters of a laser energy source include the wavelength, mean power (mW), irradiance (W/cm²), and dose (J/cm²) of the electromagnetic energy to be administered, the size of the area(s) to be treated, region of the tissue to be treated, for example external vs. interstitial applications, the beam shape (focused/collimated), including the numeric aperture if a focused beam is selected, beam waist, and beam area (mm²),

[0601] The optical power of the lasers used herein can be continuous or pulsed. In some examples, energy is emitted from the laser in continuous wave (CW) mode. In some examples pulsed lasers are used to transmit electromagnetic energy to a chromophore-containing cell or tissue. Pulsed laser operation can be achieved, for example, using Q-switching, mode-locking, or pulsed pumping techniques, depending on the desired output. In some examples, the pulse rate is modulated to regulate the amount of power delivered in a pulse.

[0602] Typically, lasers are engineered or tuned to transmit coherent monochromatic light (i.e., waves of a single wavelength that are in phase). Table 12 below sets forth several of the commonly used lasers and their corresponding wavelengths.

TABLE 12
Wavelengths of Common Lasers

| Laser Type | Wavelength (nm) |
|---|---|
| Argon Fluoride (ArF) | 193 |
| Xenon Chloride (XeCl) | 308 and 459 |
| Helium Cadmium (HeCd) | 325-442 |
| Nitrogen (N) | 337.1 nm |
| Xenon Fluoride (XeF) | 353 and 459 |
| Rhodamine 6G | 450-650 |
| Copper Vapor | 511 and 578 |
| Argon | 514.5 and 488 |
| Helium Neon (HeNe) | 543, 594, 612, and 632.8 |
| frequency doubled Nd: YAG | 532 and 266 |
| Laser Diodes | 630-950 |
| Krypton (Kr) | 647.1-676.4 |
| Ti: Sapphire | 690-960 |
| Ruby | 694.3 |
| Alexandrite | 720-780 |
| Ytterbium (Yb) | 1030-1120 |
| Neodymiun: YAG (Nd: YAG) | 1064 and 1319 |
| Hydrogen Fluoride (HF) | 2600-3000 |
| Carbon Monoxide (CO) | 5000-6000 |
| Carbon Dioxide (CO₂) | 10600 |

[0603] Emitted laser light can be collimated (parallel waves) or focused. Collimated beams permit exposure to more area and typically are held stationary during treatment. In examples where the area of the target tissue is larger than the laser beam, multiple overlapping exposures can be administered to cover the entire area of the target tissue. Focused beams can produce dramatically increased effective irradiance in a treated tissue, compared to collimated beams. Because focused beams have a smaller exposure area (beam waist, e.g., on the order of μm) compared to collimated beams, focused beams typically are scanned, for example by rastering, across the surface of the tissue to be treated (see e.g., Krause et al., Arch Opthalmol. 121:357-363 (2003).

[0604] In some examples, a stationary collimated beam is used to transmit electromagnetic energy at a desired wavelength for a predetermined amount of time to a chromophore-containing tissue, for example a melanin-containing tissue, to invoke a therapeutic heat response. In other examples, the surface of a chromophore-containing tissue is exposed to focused laser light at a desired wavelength for a predetermined amount of time using rastered scanning.

[0605] Any wavelength of electromagnetic radiation can be applied to a chromophore-containing tissue, by a laser source, provided that that chromophore is capable of absorbing the electromagnetic radiation at the applied wavelength and converting the applied energy into thermal energy, raising the temperature of the tissue to a predetermined degree. Several factors contribute to the selection of the wavelength to be applied to the chromophore-containing tissue in the methods provided herein. Such factors include, but are not limited to, the absorbance spectrum of the chromophore product contained within the target tissue, the thermal response of the chromophore to the selected wavelength, the absorbance properties of the tissue(s) and cells surrounding the target tissue at the selected wavelength(s), the extent of heating desired, the proximity of the energy source to the target tissue, the method of application, for example whether the source is external or internal to the target tissue, the extent of blood flow to the target tissue, and other parameters of the laser source.

[0606] ii) Laser Positioning

[0607] In the methods provided herein, electromagnetic energy emitted from a laser can be applied by invasive or non-invasive means. For example, the applied energy can be external or internal to the chromophore-containing tissue. In some examples using an external laser application, the laser can be positioned external to the subject, for example in direct contact with, or close to, the chromophore containing tissue to be treated, for example on the surface of a subject.

[0608] In other examples the laser light can be directed transdermally to the chromophore-containing target tissue, for example to a target tissue that underlies the skin of the subject, such as a subepidermal or subcutaneous tumor. For transdermal applications, the optical properties of the skin should be taken into consideration when selecting the wavelength to be applied. For example, wavelengths capable of penetrating skin, for example wavelengths of 600 to 1500 nm, such as 600 to 1200 nm, or 700 to 900 nm, such as 808 nm should be selected for maximum penetrance. Therefore, in some transdermal applications of the methods provided herein require accumulation of a chromophore product (e.g., melanin) in the target tissue that is capable of absorbing a sufficient amount of electromagnetic energy at the wavelengths provided above (i.e., wavelengths of or of about 600 to 1500 nm) to effect thermal energy emission in sufficient amounts to achieve hyperthermic or thermotherapeutic temperatures in the target tissue.

[0609] In other examples, electromagnetic energy can be emitted transdermally by two laser sources, of the same wavelength, within the range of 600 to 1500 nm, such as 600 to 1200 nm, for example 700 to 900 nm, such as 800 nm, 805 nm or 808 nm, that are positioned, or focused, for example, by a lens, so that the laser beams intersect (e.g., are confocal) at or within the target tissue, resulting in elevated electromagnetic energy levels in a focused volume at the point of laser beam intersection at or within the target tissue (see e.g., U.S. Pat. Nos. 5,829,448 and 7,036,516, incorporated herein by reference). In these examples, a chromophore product manufactured in the target tissue can be capable of absorbing a sufficient amount of electromagnetic energy at or about half of the wavelengths emitted by the individual lasers (i.e., at wavelengths of or of about 300 to 800 nm, such as 320 to 480 nm, for example about 400 nm) to effect thermal energy emission in sufficient amounts to achieve hyperthermic or thermotherapeutic temperatures in the target tissue.

[0610] In a particular example, external electromagnetic energy at a wavelength in the range of 600 to 1500 nm, such as 600 to 1200 nm, or 700 to 900 nm, such as 808 nm, from a laser source, such as a laser diode, such as a 2.0 W laser diode, is applied to a chromophore containing tissue, for example a melanin-containing tumor, such as a sub-cutaneous melanin-containing tumor at an energy level sufficient to increase the temperature of the target tissue for example by up to 30° C., such as by 3 to 30° C., for example 10 to 30° C., resulting in destruction of the target tissue. In this example, the electromagnetic energy can be applied for 10 seconds to 10 minutes, for example 30 seconds to 5 minutes, preferably 1 to 2 minutes.

[0611] In other examples, minimally invasive laser electromagnetic energy sources are used. In some examples, endoscopic laser sources can be inserted into a cavity of a subject, for example to position the energy source (i.e., laser) in proximity to an internal target tissue, for example a chromophore product-containing tumor, such as a melanin containing tumor. For endoscopic applications, similar considerations should be taken into account as for transdermal applications. For example, the laser source and wavelength should be selected to permit transmission of the electromagnetic energy through the lining of the cavity and to the chromophore-containing target tissue to effect heat therapy.

[0612] In some examples, fiber lasers, for example, fiber optics are inserted interstitially into the chromophore-containing target tissue so that the electromagnetic energy can be emitted directly into the target tissue, such as a chromophore-containing tumor. In some examples, imaging methods, such as ultrasound or magnetic resonance imaging, can be used to aid in the placement of the fiber optic within the target tissue. Because the fiber optic is placed interstitially, within the target tissue, electromagnetic energy is emitted directly into the chromophore product-containing target tissue, and any wavelength absorbed by the chromophore product can be selected and applied to the target tissue to effect heat therapy. Typically, multimode optical fibers, capable of emitting high-power light are used for interstitial laser therapy applications. In some examples, one fiber optic is inserted into the chromophore-containing target tissue. In other examples more than one fiber optic is inserted into the chromophore-containing tissue, for example, 2, 3, 4, or more fiber optics, depending on the size of the tissue to be treated.

[0613] In some examples, the interstitial laser heat therapy methods described herein employs a plane cut optical fiber to emit electromagnetic energy, for example, from a Nd:YAG laser, for example, at a power level of about 2 to 3 W, for example for a period of up to 30 min, for example 5-30 min, into a chromophore-expressing target tissue, such as a tumor, for example a tumor up to approximately 1.5 cm in diameter. In these examples, treatment should cease when the temperature at the border of the tumor reaches for example 50 to 60° C. or after a temperature of 45° C. is maintained at the border for approximately 5 to 30 min, for example, 15 min.

[0614] In another example, target tissues (e.g., a chromophore product-containing tumor) are subjected to interstitial laser thermotherapy using an optical fiber that is constructed with a sculpted fiber tip, for example a fiber tip fabricated from silica core/silica clad fiber, a silica core and polymer clad fiber, or a material that conducts heat well, such as artificial sapphire. In some examples, the manufactured tip is a continuous, integral part of the optical fiber to eliminate an interface, and any coupling losses or surface contamination between the tip and fiber. In other examples, the tip is attached to the optical fiber, for example, by a collar, such as a metal collar.

[0615] The fiber tip can be manufactured in a variety of shapes and sizes. For example, the fiber tip can be a taper or cone, convex or concave lens, diffuser, a side-fire tip or an angled end. In particular, the optical fiber can be equipped with a diffusing tip to increase the light emitting area of the optical fiber, so that more surface area of the chromophore product-containing target tissue can absorb the applied electromagnetic energy. The fiber tip optionally can be covered with a scattering coating, as described in van Hillegersberg et al., Lasers Surg. Med.14:124-138 (1994).

[0616] Methods employing an interstitial optical fiber for heat therapy also can employ a laser cooling mechanism to prevent undesired vaporization and carbonization at the tip of the energy source. Such cooling methods have been described in the art (see e.g., Doewlatshahi et al., Lasers Surg. Med. 12:159-164 (1992); Orth et al., Lasers Surg. Med. 20:149-156 (1997); Sturesson and Andersson-Engels, Phys. Med. Biol. 41:445-463 (1996); Sturesson and Andersson-Engels, Med. Phys. 24:461-470 (1997)).

[0617] In the methods provided herein, a chromophore-containing tissue (e.g., a melanin-containing tumor) can be treated by heat therapy, internally, by applying electromagnetic energy using an interstitial fiber optic. The type of laser used and the wavelengths emitted depend on the chromophore produced in the target tissue. In some examples, the chromophore product is melanin. In some examples, a melanin-containing tissue, for example a melanin-containing tumor is treated by interstitial laser heat therapy, and the wavelength selected is selected from the range of 500 to 1500 nm, such as 500 to 1200 nm, 600-100 nm, such as 805 nm, 808 nm, 1047 nm, or 1064 nm. The exposure time and power (i.e., the dosage) can be empirically determined based on the particular application. In some examples, a power of 0.1 to 3 W, such as 0.5 to 2 W power are used for a period of 30 sec to 30 min, such as 1 to 15 minutes, such as 5, 10, or 15 minutes. In some examples, temperatures at the border or within a 1 or 2 cm margin of the target tissue are maintained at temperatures less than 50° C., such as less than 47° C., preferably less than 45° C., such as 40 to 44° C.

[0618] In some examples, mathematical modeling can be used to predict the electromagnetic energy absorption of the chromophore product and target tissue, and generate maps of the heat distribution for different modes of treatment to aid in the planning of a treatment regimen (e.g., Sturesson and Andersson-Engels, Phys Med Biol. 40(12):2037-52 (1995); Fasano et al, Applied Mathematical Modeling 34(12):3831-3840 (2010)).

[0619] b) Microwave-Based Therapy

[0620] In other examples, non-invasive and invasive applications of microwaves can be used to induce heat therapy, for example hyperthermia and thermotherapy, in chromophore-containing target tissues. Microwave energy can be applied to treat superficial and deep-seated tumors using heat therapy (see for example, U.S. Pat. No. 6,181,970; Lindholm et al., Int. J. Hyperthermia 11:337-355, 1995; Vargas et al., (2004) Ann Surg Oncol. 11(2):139-46. Dooley et al., (2010) Ann Surg Oncol. 17(4):1076-93; Bicher et al., in Hyperthermic Oncology, vol. 1, J. Overgaard, ed. (London: Taylor and Francis, 1984), pp. 575-578). For example, one or more antennae, together with a radiating element, can be configured to transmit microwave wavelengths of electromagnetic energy toward a target tissue, and positioned proximal to the tissue to be treated, for example by endoscopic positioning, for heat therapy (see U.S. Pat. No. 6,181,970). Proximal positioning of the microwave generating device is important, because the electromagnetic energy at microwave wavelengths is substantially absorbed by water and lipid molecules in tissue. In some examples a second antenna can be positioned, for example in a body passage, to receive the transmitted microwave energy from the first antenna after passing through the target tissue.

[0621] While microwaves are substantially absorbed by water and lipid molecules in targeted biological tissue, the presence of other chromophores (e.g., melanin or other chromophore product) in the targeted tissue, which also absorb microwaves and produce heat, also can contribute to the induction of hyperthermia. In some examples, electromagnetic energy at microwave wavelengths, for example at wavelengths ranging from 3 to 100 cm (corresponding to frequencies of 10 GHz and 0.3 GHz, respectively) at a power range of 100 mW to 150 W, can be applied to a chromophore-containing tissue to increase the temperature of the treated tissue to hyperthermic or thermotherapeutic temperatures.

[0622] c) Red/Infrared Light Therapy

[0623] In some examples of the heat therapy methods described herein, infrared light therapy can be used to increase the temperature of chromophore-expressing cells, for example chromophore-expressing circulatory cells, such as chromophore-expressing activated lymphocytes. In one example, nucleic acid encoding a chromophore-producing enzyme is delivered selectively to activated leukocytes, such as activated monocytes or T lymphocytes, for example through the use of interleukin-2 receptors (IL-2Rs). Approximately 12 to 48 hr after nucleic acid delivery, for example, 12 to 24 hr after nucleic acid delivery, preferably 18 to 24 hr after nucleic acid delivery, such as 18, 19, 20, 21, 22, 23 or 24 hr after nucleic acid delivery, red light, for example broad spectrum red light or narrow spectrum red light is applied, for example transdermally, to promote destruction of the target cells by heat therapy.

[0624] In some examples, the wavelengths used are in the range of about 600-900 nm, typically in the range of 600-790 nm, preferably about 630-710 nm, such as 690-780 nm. Doses of irradiation at these wavelengths can range from 1-160 J/cm², for example 5-25 J/cm².

[0625] ii. Ultrasound Heat Therapy

[0626] Focused ultrasound (FUS), or high intensity ultrasound (HIUS) also can be used to apply focused sonic energy to produce local heat in chromophore-containing target tissues, for example, melanin-containing tumors as a form of heat therapy, such as hyperthermia or thermotherapy. In the methods provided here in, ultrasound waves can be absorbed by a chromophore product (e.g., melanin) that is manufactured within a target tissue following administration of one or more nucleic acids encoding one or more chromophore producing enzyme(s). This method can be used to non-invasively treat deep-seated tumors (see e.g., Lele, in Hyperthermia in cancer therapy, FK Strom, ed., (London: Taylor and Francis, 1984), pp. 333-367).

[0627] In some examples, focused ultrasound using high-frequencies (e.g., 1-4 MHz) are used to transmit sonic energy to be absorbed by the chromophore product, thereby creating a heating zone, typically on the order of millimeters. For large target areas, for example centimeter-sized tumors, multiple overlapping sonication applications can be employed (Malinen et al., (2005) Phys Med Biol. 50(15):3473-90; Zippel and Papa, (2005) Breast Cancer. 12(1):32-38; Ho et al., (2007) Phys. Med. Biol. 52:4584-4599).

[0628] In other examples, a lower frequency of ultrasound, such as 1 kHz can be absorbed by the chromophore product and used to heat larger areas with a single sonication application (Bakker et al., (2009) Phys. Med. Biol. 54:3201-3215).

[0629] In some examples, the chromophore product is melanin, which can absorb acoustic waves and produce heat and can be used to supplement ultrasound-induced hyperthermia and thermotherapy. Melanin, for example, is a well-established potent absorber of sound waves (Kono et al., (1979) J. Appl. Phys. 50, 1236), and increased accumulation of melanin in target cells/tissues can enhance ultrasound heat therapies, to achieve hyperthermic and thermotherapeutic temperatures of target tissues, for example deep seated tissues, such as internal tumors.

[0630] FUS and HIUS procedures described herein can be coupled with an imaging procedure, such as magnetic resonance imaging (MRI) or diagnostic sonography (ultrasound), to facilitate treatment planning and assist with targeting. Increased accumulation of a chromophore, such as melanin in a target cell or tissue, resulting from the methods described herein, also can be exploited to enhance visualization of the chromophore-containing target cells by diagnostic imaging (described elsewhere herein) when used alone or in combination with ultrasounds thermotherapy (e.g., FUS or HIUS) or other thermotherapy procedures described herein.

[0631] iii. Magnetic Conduction Methods

[0632] Alternating magnetic fields also can produce energy that can be absorbed by a chromophore product and converted to thermal energy to produce a form of heat therapy. For example, a chromophore-containing target tissue can be treated by the methods of magnetic heat treatment provided herein, provided the chromophore product is responsive to an alternating magnetic field and is capable of converting the energy absorbed from the alternating magnetic field into thermal energy. Many chromophores, such as melanin, are chelating agents and are thus responsive to application of an alternating magnetic field. Thus, in some examples, a target tissue, which produces melanin following uptake of one or more nucleic acids encoding one or more melanin producing enzyme(s) is exposed to energy resulting from an alternating magnetic field, which results in the production of heat in the target tissue. In some examples, an alternating magnetic field applicator applies an alternating magnetic field with an oscillation frequency of 80 to 300 kHz, typically, 90 to 150 kHz, more typically approximately 100 kHz; with an intensity ranging from about 2 to 40 kA/m, for example about 2 to 31 kA/m, preferably 2 to 15 kA/m.

[0633] In some examples, the subject can be administered a composition containing a metal ion to be chelated by the metal-chelating chromophore product to enhance the absorbance and thermal emission of the chromophore product upon exposure to an alternating magnetic field, prior to the initiation of magnetic heat therapy. In other examples, the target tissue can be perfused or injected with a metal containing composition. Exemplary compositions include compositions containing gadolinium (Gd), iron (Fe), or manganese (Mn). In some examples, a gadolinium containing composition can be administered, such as gadoterate (Dotarem), gadodiamide (Omniscan), gadobenate (MultiHance), gadopentetate (Magnevist, Magnegita, Gado-MRT ratiopharm), gadoteridol (ProHance), gadoversetamide (OptiMARK), gadoxetate (Primovist), gadobutrol (Gadovist), or gadofosveset (Ablavar, formerly Vasovist), gadoxetate (Eovist). In other examples an iron (Fe) containing solution can be administered, such as an iron oxide or iron platinum solution. Exemplary iron containing solutions include Feridex I.V. (Endorem or ferumoxide), Resovist (Cliavist), Sinerem (Combidex), Lumirem (Gastromark), Clariscan™ (PEG-fero, Feruglose). In other examples, a solution containing manganese can be administered, such as manganese chelates. Metal containing compositions can be administered systemically, for example by intravenous or oral administration, or locally, for example by local injection.

[0634] b. Photodynamic Therapy

[0635] The basis of photodynamic therapy (PDT) is the interaction of light with photosensitive agents to produce an energy transfer and a local chemical effect. PDT relies on administration of a light sensitive compound (i.e., photosensitizer) that is activated by the appropriate wavelength of light, in the presence of oxygen, resulting in the production of toxic reactive oxygen species (ROS) which elicit cellular and tissue destruction, for example, by apoptosis, necrosis and/or vascular damage.

[0636] In the methods provided herein, a chromophore product and/or chemical precursors in the biosynthetic pathway thereof, produced in a target tissue as a result of administration of one or more nucleic acids encoding one or more chromophore-producing enzyme, are utilized as photosensitizers for PDT applications. In some examples, the photosensitizer(s) is/are chromophore product melanin and/or the reactive precursors are 5-S-cysteinylDOPA (5-SCD), dopasemiquinone, 5,6-dihydroxyindole (DHI) and/or 5,6-dihydroxyindole-2-carboxylic acid (DHICA), for methods of PDT. In some examples, melanin acts as a photosensitizer that generates ROS in target cell(s) or tissues upon ultraviolet irradiation. In some examples, melanin contributes to ROS production and PDT following exposure to UV irradiation, for exposure to electromagnetic radiation at a wavelength within the range of 100 to 400 nm, 280 to 315 or 315 to 400 nm. In some examples the dose of irradiation is 1 to 200 kJ/m², for example 1250 J/m² for wavelengths in the range of approximately 280 to 315 nm or 100 kJ/m² for wavelengths in the range of 315-340 nm. In some examples, a laser, light-emitting diode, fluorescent lamp, dichroic lamp, or a light box can be used as a light source for PDT. In other examples, UV light is delivered to the target tissue using an endoscope or fiber optic catheter. In a preferred example, a laser is used as the UV light source, for example an interstitial laser, such as a fiber optic is used as the UV light source.

[0637] In other examples, electromagnetic energy can be emitted transdermally by two laser sources, of the same wavelength, within the tissue penetrating range of approximately 600 to 1500 nm, such as approximately 600 to 1200 nm, for example approximately 700 to 900 nm or approximately 600 to 800 nm, such as approximately 600, 650, 700, 750, 800, 805 or 808 nm, that are positioned, or focused, for example, by a lens, so that the laser beams intersect (e.g., are confocal) at or within the target tissue, resulting in elevated (approximately double) electromagnetic energy levels in a focused volume at the point of laser beam intersection at or within the target tissue (see e.g., U.S. Pat. Nos. 5,829,448 and 7,036,516, incorporated herein by reference). In these examples, a chromophore product manufactured in the target tissue can be capable of absorbing a sufficient amount of electromagnetic energy at or about half of the wavelengths emitted by the individual lasers (i.e., at wavelengths of or of about 300 to 800 nm or about 320 to 480 nm, for example about 300, 325, 350, 375 or 400 nm) to effect PDT in the target tissue.

[0638] 3. Methods of Detection

[0639] The methods provided herein can include methods of detection of a chromophore-containing target tissue. Any medical detection method, for example medical imaging method can be used for diagnostic or monitoring purposes. For example, X-rays, mammography, ultrasound, computed tomography (CT), magnetic resonance imaging (MRI), nuclear imaging, such as planar gamma imaging, single photon emission computed tomography (SPECT) imaging; positron emission tomography (PET), photoacoustic imaging and optoacoustic imaging can be used as a part of the therapeutic methods provided herein.

[0640] In some examples, imaging methods can be used to detect and diagnose tissues to be used as target tissues for the methods provided herein. In other examples, imaging methods can be used to monitor the treatment and/or progress of target tissues for the methods provided herein. In particular examples, the chromophore product (e.g., melanin), produced in a cell or target tissue, as a result of delivery of one or more nucleic acids encoding one or more chromophore-producing enzyme(s) (e.g., tyrosinase or tyrosinase-related protein-1) can enhance the detectability of the target tissue using the imaging methods provided herein.

[0641] a. Photoacoustic Tomography

[0642] In some examples, photoacoustic tomography is used as a detection method of target tissues in the methods provided herein, and the chromophore product manufactured in the target cell(s) or tissue(s) can enhance the detection of the target cell(s) or tissue(s) in vivo. For example, the chromophore product (e.g., melanin) can absorb non-ionizing laser pulses, for example radio frequency pulses, and convert the applied electromagnetic energy into heat, resulting in transient thermoelastic expansion and thus wideband (e.g., MHz) ultrasonic emission. The generated ultrasonic waves are then detected by ultrasonic transducers to form images. The presence of the chromophore product in the target tissue increases the absorbance properties of the target tissue, enhancing the contrast and facilitating distinction between the target cell(s) or tissue(s) and the surrounding cell(s) or tissue(s) (see e.g., Xu and L. H. Wang (2006). Review of Scientific Instruments. 77 (4): 041101; Filonov et al., (2012) Angew. Chem. Int. Ed. 51:1448-1451; Paproski et al., Biomedical Optics Express. 2(4):771-780, incorporated herein by reference; and Example 7 below). For some applications, detection of chromophore-containing tissues by photoacoustic imaging can utilize endoscopic techniques (Yang et al., (2009) Optics Letters, 34(10):1591-1593). In some examples photoacoustic tomography (e.g., photoacoustic endoscopy) can be combined with one or more therapeutic methods, such as the therapeutic methods described herein, for example, ultrasound methods (Yang et al., (2012) Nature Medicine. 18:1297-1302).

[0643] b. Multispectral Optoacoustic Tomography

[0644] The methods provided herein also can include multispectral optoacoustic tomography (MSOT) of chromophore-containing target cell(s) or tissue(s) Like photoacoustic imaging, MSOT relies on detection of ultrasonic signals following absorption of electromagnetic energy, typically in the near infrared range (e.g., 680-950 nm) by tissue components. For MSOT, images are acquired using several electromagnetic wavelengths (for example at least 3 wavelengths, such as at least 5 wavelengths, at least 10 wavelengths up to the continuum of wavelengths in the near infrared region), and reconstructed to produce an acoustic pressure distribution map of the imaged cell or tissue (Razansky et al., Optics Letters 32(19): 2891-2893).

[0645] Acoustic fingerprints of known, naturally occurring chromophores within the tissue imaged, for example oxy- or deoxy-melanin can be resolved and algorithms can be generated to subtract these signals from the reconstructed image (Glatz et al., (2011) Opt Express 19(4):3175-3184) and generate an image that is constructed from resolved chromophore product-specific signals. In some examples, the chromophore product, expressed in the target tissue subjected to MSOT is melanin. As described above, melanin can increase the contrast for photoacoustic applications and enhance the detection of a melanin-containing cell or tissue by MSOT (see e.g., Example 10 herein)

[0646] c. Magnetic Resonance

[0647] The methods provided herein also can include detection of a chromophore-containing target tissue by magnetic resonance (MR) imaging, also called MRI. Because the presence of metal in a tissue can increase contrast of an MRI through shortening the T1 relaxation time, accumulation of chromophore(s), or precursors thereof, which chelate metal ions can enhance the contrast of MR images and thereby facilitate and enhance detection of the chromophore-containing target cell(s) or tissue(s). In some examples, melanin is the metal-chelating chromophore that, together with metal-chelating precursors (e.g., DHI and DHICA), can accumulate in target cells or tissues, increase the contrast of MR images, and enhance detection of melanin-containing cells or tissues, which can include, for example, tumors or tumor cells, including metastases (see e.g., U.S. Pat. No. 5,310,539, Paproski et al., Biomedical Optics Express. 2(4):771-780; Weissleder et al. (1997) Radiology. 204(2):425-429; Enochs et al., (1997) Radiology. 204(2):417-423, incorporated herein by reference, and Examples 6 and 7 herein below).

[0648] In some examples, the subject can be administered a composition containing a metal ion to be chelated by the metal-chelating chromophore product (e.g., melanin) to enhance MRI detection of the target cell(s) or tissue(s). In other examples, the chelating chromophore (e.g., melanin)-containing target tissue can be perfused or injected with a metal containing composition. Exemplary compositions include compositions containing gadolinium (Gd), iron (Fe), or manganese (Mn). In some examples, a gadolinium containing composition can be administered, such as gadoterate (Dotarem), gadodiamide (Omniscan), gadobenate (MultiHance), gadopentetate (Magnevist, Magnegita, Gado-MRT ratiopharm), gadoteridol (ProHance), gadoversetamide (OptiMARK), gadoxetate (Primovist), gadobutrol (Gadovist), or gadofosveset (Ablavar, formerly Vasovist), gadoxetate (Eovist). In other examples an iron (Fe) containing solution can be administered, such as an iron oxide or iron platinum solution. Exemplary iron containing solutions include Feridex I.V. (Endorem or ferumoxide), Resovist (Cliavist), Sinerem (Combidex), Lumirem (Gastromark), Clariscan™ (PEG-fero, Feruglose). In other examples, a solution containing manganese can be administered, such as manganese chelates. Metal containing compositions can be administered systemically, for example by intravenous or oral administration, or locally, for example by local injection.

[0649] 4. Monitoring

[0650] The methods provided herein can further include one or more steps of monitoring the subject, monitoring the tumor, and/or monitoring the virus administered to the subject. Any of a variety of monitoring steps can be included in the methods provided herein, including, but not limited to, monitoring tumor size, monitoring anti-(tumor antigen) antibody titer, monitoring the presence and/or size of metastases, monitoring the subject's lymph nodes, monitoring the subject's weight or other health indicators including blood or urine markers, monitoring anti-(viral antigen) antibody titer, monitoring viral expression of a detectable gene product, and directly monitoring viral titer in a tumor, tissue or organ of a subject.

[0651] The purpose of the monitoring can be for assessing the health state of the subject or the progress of therapeutic treatment of the subject, or can be for determining whether or not further administration of the same or a different virus is warranted, or for determining when or whether or not to administer a compound to the subject where the compound can act to increase the efficacy of the therapeutic method, or the compound can act to decrease the pathogenicity of the virus administered to the subject.

[0652] a. Monitoring Gene Expression

[0653] In some examples, the methods provided herein can include monitoring one or more genes expressed as a result of nucleic acid delivery, for example virally expressed genes. The nucleic acids delivered in the methods herein can express one or more detectable products, including but not limited to, detectable proteins (e.g., fluorescent proteins), pigments, and/or compounds proteins that induce a detectable signal (e.g., pigments such as melanin that can be detected). The target cells/tissue of the nucleic acid delivery step of the methods provided herein can thus be imaged by one more optical or non-optical imaging methods.

[0654] Measurement of a detectable gene product expressed by an expression vector, for example a virus, can provide an accurate determination of the level of expression vector (e.g., virus) present in the subject. The detectable gene product can be measured by methods, such as for example, by imaging methods including, but not limited to, magnetic resonance, fluorescence, and tomographic methods, can determine the localization of the delivered nucleic acid in a subject. Accordingly, the methods provided herein that include monitoring a detectable gene or chromophore product can be used to determine the presence or absence of the administered nucleic acid in one or more organs or tissues of a subject, and/or the presence or absence of the administered nucleic acid (e.g., virus) in a tumor or metastases of a subject. Further, the methods provided herein that include monitoring a detectable viral gene product can be used to determine the titer of virus present in one or more organs, tissues, tumors or metastases.

[0655] Since methods provided herein can be used to monitor the amount of viruses at any particular location in a subject, the methods that include monitoring the localization and/or titer of viruses in a subject can be performed at multiple time points, and, accordingly can determine the rate of viral replication in a subject, including the rate of viral replication in one or more organs or tissues of a subject. Accordingly, the methods of monitoring a viral gene product can be used for determining the replication competence of a virus.

[0656] The methods provided herein also can be used to quantitate the amount of virus present in a variety of organs or tissues, and tumors or metastases, and can thereby indicate the degree of preferential accumulation of the virus in a subject. Accordingly, the viral gene product monitoring methods provided herein can be used in methods of determining the ability of a virus to accumulate in tumor or metastases in preference to normal tissues or organs.

[0657] Since the viruses used in the methods provided herein can accumulate in an entire tumor or can accumulate at multiple sites in a tumor, and can also accumulate in metastases, the methods provided herein for monitoring a viral gene product can be used to determine the size of a tumor or the number of metastases that are present in a subject. Monitoring such presence of viral gene product in tumor or metastasis over a range of time can be used to assess changes in the tumor or metastasis, including growth or shrinking of a tumor, or development of new metastases or disappearance of metastases, and also can be used to determine the rate of growth or shrinking of a tumor, or development of new metastases or disappearance of metastases, or the change in the rate of growth or shrinking of a tumor, or development of new metastases or disappearance of metastases. Accordingly, the methods of monitoring a viral gene product can be used for monitoring a neoplastic disease in a subject, or for determining the efficacy of treatment of a neoplastic disease, by determining rate of growth or shrinking of a tumor, or development of new metastases or disappearance of metastases, or the change in the rate of growth or shrinking of a tumor, or development of new metastases or disappearance of metastases.

[0658] Any of a variety of detectable proteins can be detected in the monitoring methods provided herein. An exemplary, non-limiting list of such detectable proteins includes any of a variety of fluorescent proteins (e.g., green or red fluorescent proteins), any of a variety of luciferases, transferrin or other iron binding proteins; or receptors, binding proteins, and antibodies, where a compound that specifically binds the receptor, binding protein or antibody can be a detectable agent or can be labeled with a detectable substance (e.g., a radionuclide or imaging agent); or transporter proteins (e.g., hNET or hNIS) that can bind to and transport detectable molecules into the cell. Viruses expressing a detectable protein can be detected by a combination of the methods provided herein and known in the art.

[0659] Viruses expressing more than one detectable protein or two or more viruses expressing various detectable protein can be detected and distinguished by dual imaging methods. For example, a virus expressing a fluorescent protein and an iron binding protein can be detected in vitro or in vivo by low light fluorescence imaging and magnetic resonance, respectively. In another example, a virus expressing two or more fluorescent proteins can be detected by fluorescence imaging at different wavelengths. In vivo dual imaging can be performed on a subject that has been administered a virus expressing two or more detectable gene products or two or more viruses each expressing one or more detectable gene products.

[0660] b. Monitoring Tumor Size

[0661] Also provided herein are methods of monitoring tumor and/or metastasis size and location. Tumor and or metastasis size can be monitored by any of a variety of methods known in the art, including external assessment methods or tomographic or magnetic imaging methods, such as the detection methods described herein. In addition, methods provided herein, for example, monitoring gene expression (e.g., viral gene expression), can be used for monitoring tumor and/or metastasis size.

[0662] Monitoring size over several time points can provide information regarding the efficacy of the therapeutic methods provided herein. In addition, monitoring the increase or decrease in size of a tumor or metastasis, and can also provide information regarding the presence (i.e., detection and/or diagnosis) of additional tumors and/or metastases in the subject. Monitoring tumor size over several time points can provide information regarding the development of a neoplastic disease in a subject, including the efficacy of treatments of a neoplastic disease in a subject, such as the treatments provided herein.

[0663] c. Monitoring Antibody Titer

[0664] The methods provided herein also can include monitoring the antibody titer in a subject, including antibodies produced in response to administration of a virus to a subject. For example, the viruses administered in the methods provided herein can elicit an immune response to endogenous viral antigens. The viruses administered in the methods provided herein also can elicit an immune response to exogenous genes expressed by a virus. The viruses administered in the methods provided herein also can elicit an immune response to tumor antigens. Monitoring antibody titer against viral antigens, viral expressed exogenous gene products, or tumor antigens can be used in methods of monitoring the toxicity of a virus, monitoring the efficacy of treatment methods, or monitoring the level of gene product or antibodies for production and/or harvesting.

[0665] In one example, monitoring antibody titer can be used to monitor the toxicity of a virus. Antibody titer against a virus can vary over the time period after administration of the virus to the subject, where at some particular time points, a low anti-(viral antigen) antibody titer can indicate a higher toxicity, while at other time points a high anti-(viral antigen) antibody titer can indicate a higher toxicity. The viruses used in the methods provided herein can be immunogenic, and can therefore elicit an immune response soon after administering the virus to the subject.

[0666] Generally, a virus against which a subject's immune system can quickly mount a strong immune response can be a virus that has low toxicity when the subject's immune system can remove the virus from all normal organs or tissues. Thus, in some examples, a high antibody titer against viral antigens soon after administering the virus to a subject can indicate low toxicity of a virus. In contrast, a virus that is not highly immunogenic can infect a host organism without eliciting a strong immune response, which can result in a higher toxicity of the virus to the host. Accordingly, in some examples, a high antibody titer against viral antigens soon after administering the virus to a subject can indicate low toxicity of a virus.

[0667] In other examples, monitoring antibody titer can be used to monitor the efficacy of treatment methods. In the methods provided herein, antibody titer, such as anti-(tumor antigen) antibody titer, can indicate the efficacy of a therapeutic method such as a therapeutic method to treat neoplastic disease. Therapeutic methods provided herein can include causing or enhancing an immune response against a tumor and/or metastasis. Thus, by monitoring the anti-(tumor antigen) antibody titer, it is possible to monitor the efficacy of a therapeutic method in causing or enhancing an immune response against a tumor and/or metastasis.

[0668] The therapeutic methods provided herein also can include administering to a subject a virus that can accumulate in a tumor and can cause or enhance an anti-tumor immune response. Accordingly, it is possible to monitor the ability of a host to mount an immune response against viruses accumulated in a tumor or metastasis, which can indicate that a subject has also mounted an anti-tumor immune response, or can indicate that a subject is likely to mount an anti-tumor immune response, or can indicate that a subject is capable of mounting an anti-tumor immune response.

[0669] In other examples, monitoring antibody titer can be used for monitoring the level of gene product or antibodies for production and/or harvesting. As provided herein, methods can be used for producing proteins, RNA molecules or other compounds by expressing an exogenous gene in a virus that has accumulated in a tumor. Further provided herein are methods for producing antibodies against a protein, RNA molecule or other compound produced by exogenous gene expression of a virus that has accumulated in a tumor. Monitoring antibody titer against the protein, RNA molecule or other compound can indicate the level of production of the protein, RNA molecule or other compound by the tumor-accumulated virus, and also can directly indicate the level of antibodies specific for such a protein, RNA molecule or other compound.

[0670] d. Monitoring General Health Diagnostics

[0671] The methods provided herein also can include methods of monitoring the health of a subject. Some of the methods provided herein are therapeutic methods, including neoplastic disease therapeutic methods. Monitoring the health of a subject can be used to determine the efficacy of the therapeutic method, as is known in the art. The methods provided herein also can include a step of administering to a subject a virus. Monitoring the health of a subject can be used to determine the pathogenicity of a virus administered to a subject. Any of a variety of health diagnostic methods for monitoring disease such as neoplastic disease, infectious disease, or immune-related disease can be monitored, as is known in the art. For example, the weight, blood pressure, pulse, breathing, color, temperature or other observable state of a subject can indicate the health of a subject. In addition, the presence or absence or level of one or more components in a sample from a subject can indicate the health of a subject. Typical samples can include blood and urine samples, where the presence or absence or level of one or more components can be determined by performing, for example, a blood panel or a urine panel diagnostic test. Exemplary components indicative of a subject's health include, but are not limited to, white blood cell count, hematocrit, or reactive protein concentration.

[0672] e. Monitoring Coordinated with Treatment

[0673] Also provided herein are methods of monitoring a therapy, for example, a heat therapy or photodynamic therapy applied to a chromophore-producing target cell or tissue, as described in the methods provided herein, and therapeutic decisions can be based on the results of the monitoring. The methods provided herein include a first step of administering a nucleic acid to a subject encoding a chromophore-producing enzyme, for example, a virus that encodes a melanin-producing enzyme, such as tyrosinase or tyrosinase-related protein-1, that can preferentially accumulates in a target cell or tissue (e.g., a tumor and/or metastasis), wherein the chromophore-producing enzyme contributes to the biosynthesis of a chromophore product(e.g., melanin). A subsequent step of the therapeutic methods provided herein includes administering a form of energy, such as electromagnetic, acoustic, or magnetic energy, that is absorbed by the chromophore product and converted into heat energy or chemical energy, causing or enhancing destruction of or sensitizing destruction of its host cell or tissue.

[0674] Such therapeutic methods can include a variety of steps including multiple administrations of a nucleic acid (e.g., a particular virus), administration of a second nucleic acid (e.g., a second virus), administration of a therapeutic compound, or administration of one or more additional therapeutic methods. Determination of the amount, timing or type of nucleic acid (e.g., a virus) to administer to the subject can be based on one or more results from monitoring the subject and/or target cell or tissue. In addition, determination of the dose, timing or type of energy application, for example as a part of a therapeutic treatment, can be based on one or more results from monitoring the subject and/or target cell or tissue. For example, the antibody titer in a subject can be used to determine whether or not it is desirable to administer a nucleic acid (e.g., a virus), the quantity of nucleic acid (e.g., a virus) to administer, and the type of nucleic acid (e.g., a virus) to administer, where, for example, an unchanged tumor volume can indicate the desirability of administering additional nucleic acid (e.g., virus) encoding a chromophore-producing enzyme, a nucleic acid (e.g., a virus) encoding a different chromophore-producing enzyme that can produce the same or different chromophore product.

[0675] In another example, monitoring can determine whether or not a nucleic acid has accumulated in a target tissue (e.g., a tumor or metastasis of a subject), whether a delivered nucleic acid expresses the chromophore-producing enzyme encoded by the nucleic acid, and/or whether the chromophore-producing enzyme leads to sufficient production of the chromophore. Upon such determinations, a decision can be made to further administer additional nucleic acid or a different nucleic acid to the subject.

[0676] In another example, monitoring a detectable expressed transgene product can be used to determine whether or not it is desirable to administer additional nucleic acid, the quantity of nucleic acid to administer, and the type of nucleic acid to administer. Such monitoring methods also can be used to determine whether or not a therapeutic method is effective, whether or not a therapeutic method is pathogenic to the subject, whether or not the nucleic acid (e.g., virus) has accumulated in a target tissue (e.g., tumor or metastasis), and whether or not the nucleic acid (e.g., virus) has accumulated in normal tissues or organs.

[0677] In another example, the overall health state of a subject can be used to determine whether or not it is desirable to a administer a nucleic acid or therapeutic treatment provided herein, the dose of nucleic acid or therapy (i.e., energy) to administer, and the type of nucleic acid or therapy (i.e., energy) to administer, where, for example, determining that the subject or target tissue is healthy can indicate the desirability of administering additional nucleic acid (e.g., a virus) or a different nucleic acid, or can indicate the desirability of administering additional therapy (i.e., energy) or an alternative therapy.

[0678] In another example, monitoring can indicate that a nucleic acid (e.g., a virus) is pathogenic to a subject. In such instances, a decision can be made to terminate administration of the virus to the subject, to administer lower levels of the virus to the subject, to administer a different virus to a subject, or to administer to a subject a compound that reduces the pathogenicity of the virus. In one example, administration of a virus that is determined to be pathogenic can be terminated. In another example, the dosage amount of a virus that is determined to be pathogenic can be decreased for subsequent administration.

[0679] In one example, a healthy target tissue, following therapeutic treatment, can indicate the desirability for administering additional therapy (i.e., energy), for example administering a stronger dose of energy or administering energy at a different wavelength or administering a range of energies. In another example, a healthy tissue, following therapeutic treatment within a cycle of therapeutic treatments can indicate the desirability for increasing the frequency of therapeutic applications. In another example, a healthy target tissue, following therapeutic treatment, can indicate the desirability for administering an alternative therapeutic treatment, such as a therapeutic provided herein or other therapeutic treatment known in the art. In another example, a healthy target tissue, following therapeutic treatment, can indicate the desirability for administering a combination of therapeutic treatments, including one or more therapeutic treatments provided herein or other therapeutic treatments known in the art. Based on such determinations, the desirability and form of further therapeutic methods can be derived.

[0680] In one example, determination of whether or not a therapeutic method is effective can be used to derive further therapeutic methods. Any of a variety of methods of monitoring can be used to determine whether or not a therapeutic method is effective, as provided herein or otherwise known in the art. If monitoring methods indicate that the therapeutic method is effective, a decision can be made to maintain the current course of therapy, which can include further administrations of a nucleic acid, or a decision can be made that no further administrations are required. If monitoring methods indicate that a therapeutic method is ineffective, the monitoring results can indicate whether or not a course of treatment should be discontinued (e.g., when a nucleic acid (e.g., a virus) is pathogenic to the subject or if the subject experiences unwanted side-effects from the treatment administered), or changed (e.g., when a therapeutic method has no effect on a chromophore-expressing target tissue), or increased in frequency or amount (e.g., when a chromophore-expressing target tissue is slightly affected by the therapeutic treatment).

### H. COMBINATION THERAPY

[0681] The methods provided herein also can be used in combination therapies. For example, therapeutic methods provided herein can be combined with perfusion, direct injection or local application of the area with an additional therapy, such as an anti-cancer therapy. Such treatment can be repeated, for example, every 1, 2, 3, 4, 5, 6, or 7 days, or every 1, 2, 3, 4, and 5 weeks or every 1, 2, 3, 4, 5, 6, 7, 8, 9, 10, 11, or 12 months. The treatments provided herein and treatments used in combination with those provided herein can be of varying dosages.

[0682] In some examples, the subject to be treated using the methods provided herein also can be undergoing secondary treatment, for example, for a tumor, cancer, wound, hyperproliferative surface lesion, or autoimmune disorder. For example, the methods herein can include combination therapy with a secondary anti-cancer therapy. Examples of such therapy include, but are not limited to, surgical therapy, chemotherapy, radiotherapy, immunotherapy, treatment with another therapeutic substance or agent and/or administration with another therapeutic virus.

[0683] In some examples, the target tissue is a tumor and treatment of the target tumor using a therapeutic method provided herein, followed by application of an additional therapy, for example, a second therapy described herein or a therapy set forth below, can cause a reduction in tumor volume, can cause tumor growth to stop or be delayed or can cause the tumor to be eliminated from the subject. The status of tumors, cancers and metastasis following treatment can be monitored using any of the methods provided herein and known in the art, including the monitoring methods described herein.

[0684] In some examples, target tissues, such as tumors, cancers and metastases can be monotherapy-resistant such as, for example, one that does not respond to a single therapy, but that does respond to therapy with a combination of therapies, for example heat therapy combined with a therapeutic agent (e.g., anti-cancer agent) or radiotherapy. The therapies to be used in combination can be administered simultaneously, sequentially or intermittently with the therapies provided herein. Combined treatment should be individualized for each subject.

[0685] a. Surgical Procedures

[0686] In some examples, a subject can be subjected to surgical procedures in addition to receiving treatment for a hyperproliferative disease or disorder, by one of the methods provided herein. Surgical procedures that can be used in combination with the methods provided herein include preventative surgery, diagnostic surgery, cryoreductive surgery, or cryosurgery, for example by slow freezing, rapid freezing, or defreezing. Surgical procedures can follow or precede a therapeutic treatment provided in the methods herein. One of skill in the art can determine the time needed for a subject to recover from heat therapy or a surgical procedure before commencing with the second procedure.

[0687] b. Radiotherapy

[0688] Radiation therapy (also called radiotherapy) has become a foremost choice of treatment for a majority of cancer patients. The wide use of radiation treatment stems from the ability of gamma-irradiation to induce irreversible damage in targeted cells with the preservation of normal tissue function. Ionizing radiation triggers apoptosis, the intrinsic cellular death machinery in cancer cells, and the activation of apoptosis seems to be the principal mode by which cancer cells die following exposure to ionizing radiation.

[0689] In some examples, a subject can be treated with radiotherapy in combination with the therapeutic methods provided herein. Modalities of radiotherapy include curative, adjuvant, and palliative radiotherapy, such as brachytherapy, metabolic, and radiotherapy. Factors to take into account when combining the therapeutic methods provided herein with radiotherapy include the pericellular environment, histological type, and the location of the tumor, including the radiosensitivity of surrounding healthy tissue(s). In addition, the properties of the chromophore manufactured in the target tissue as a part of the methods provided herein also should be taken into account. For example, a chromophore that can interfere with radiotherapy can alter the application, for example the dosage, of the radiotherapy or can be incompatible with radiotherapy.

[0690] In some examples, heat therapy, such as by the methods provided herein, sensitizes the chromophore-containing target tissue, rendering the chromophore-containing target tissue more susceptible to radiotherapy. For example, in some combination therapies, application of heat therapy, such as interstitial laser-induced heat therapy methods provided herein, can destroy or sensitize the target cells or tissue, especially poorly vascularized cells and tissues. Application of ionizing radiation, following heat therapy, can then be used to eradicate cells from the well-vascularized cells, for example cells at the tumor surface.

[0691] In some examples, radiotherapy follows within hours (e.g., within 3 to 10 hr) of a heat therapy, for example. In some examples, radiotherapy follows the heat (or photodynamic) therapy 1 day after heat therapy. In some examples, radiotherapy follows 2 days to 1 week, or more, after heat therapy. One of skill in the art can determine when to administer the therapeutic agent subsequent to the prior therapeutic treatment, for example, in vivo, in animal models. In some examples, it is preferable to administer radiotherapy prior to heat therapy, for example at 1 to 6 hr after radiotherapy, such as 3 to 4 hr after radiotreatment.

[0692] c. Therapeutic Compounds

[0693] Any therapeutic or anti-cancer agent can be used as a second therapeutic or anti-cancer agent in the combined cancer treatment methods provided herein. The methods can include administering one or more therapeutic compounds to the subject in addition to administering a therapy provided herein to a subject. Therapeutic compounds can act independently, or in conjunction with the therapy or method of detection, to achieve therapeutic effects, for example, anti-tumor effects. Therapeutic compounds or agents also include those that are immunotherapeutic compounds. Therapeutic compounds to be administered can be any of those provided herein or in the art. Therapeutic compounds that can act independently include any of a variety of known chemotherapeutic compounds that can inhibit tumor growth, inhibit metastasis growth and/or formation, decrease the size of a tumor or metastasis, eliminate a tumor or metastasis, without reducing the ability of a nucleic acid (e.g., a virus containing one or more nucleic acids encoding one or more chromophore-producing enzymes) to accumulate in a target tissue, such as a tumor, or the replication thereof.

[0694] Typically, a target chromophore-containing target cell(s) or tissue(s) is treated using a therapeutic method described herein to effect optimal destruction or sensitivity of the target cell(s) or tissue(s), prior to administration of a therapeutically effective amount of another therapeutic agent, for example an anti-cancer agent, such as a chemotherapeutic agent (e.g., cisplatin). In one example, the subsequent therapeutic agent is administered once daily for five consecutive days. One of skill in the art can determine when to administer the therapeutic agent subsequent to the prior therapeutic treatment, for example, in vivo, in animal models.

[0695] Therapeutic compounds or agents include, but are not limited to, chemotherapeutic agents, nanoparticles, siRNA molecules, enzyme/pro-drug pairs, photosensitizing agents, toxins, a radionuclide, an angiogenesis inhibitor, a mitosis inhibitor protein (e.g., cdc6), an antitumor oligopeptide (e.g., antimitotic oligopeptides, high affinity tumor-selective binding peptides), a signaling modulator, anti-cancer antibiotics, or a combination thereof.

[0696] Exemplary photosensitizing agents include, but are not limited to, for example, indocyanine green, toluidine blue, aminolevulinic acid, texaphyrins, benzoporphyrins, phenothiazines, phthalocyanines, porphyrins such as sodium porfimer, chlorins such as tetra(m-hydroxyphenyl)chlorin or tin(IV) chlorin e6, purpurins such as tin ethyl etiopurpurin, purpurinimides, bacteriochlorins, pheophorbides, pyropheophorbides or cationic dyes. In one example, a vaccinia virus, such as a vaccinia virus provided herein, is administered to a subject having a tumor, cancer or metastasis in combination with a photosensitizing agent.

[0697] Radionuclides can be used for diagnosis and/or for treatment, depending upon the radionuclide, amount and application. Radionuclides include, but are not limited to, for example, a compound or molecule containing ³²Phosphorus, ⁶⁰Cobalt, ⁹⁰Yttrium, ⁹⁹Technitium, ¹⁰³Palladium, ¹⁰⁶Ruthenium, ¹¹¹Indium, ¹¹⁷Lutetium, ¹²⁵Iodine, ¹³¹Iodine, ¹³⁷Cesium, ¹⁵³Samarium, ¹⁸⁶Rhenium, ¹⁸⁸Rhenium, ¹⁹²Iridium, ¹⁹⁸Gold, ²¹¹Astatine, ²¹²Bismuth or ²¹³Bismuth. In one example, a vaccinia virus, such as a vaccinia virus provided herein, is administered to a subject having a tumor, cancer or metastasis in combination with a radionuclide.

[0698] Toxins include, but are not limited to, chemotherapeutic compounds such as, but not limited to, 5-fluorouridine, calicheamicin and maytansine. Signaling modulators include, but are not limited to, for example, inhibitors of macrophage inhibitory factor, toll-like receptor agonists and stat3 inhibitors. In one example, a vaccinia virus, such as a vaccinia virus provided herein, is administered to a subject having a tumor, cancer or metastasis in combination with a toxin or a signaling modulator.

[0699] Chemotherapeutic compounds include, but are not limited to, alkylating agents such as thiotepa and cyclophosphamide; alkyl sulfonates such as busulfan, improsulfan and piposulfan; aziridines such as benzodepa, carboquone, meturedepa and uredepa; ethylenimine and methylmelamines, including altretamine, triethylenemelamine, triethylenephosphoramide, triethylenethiophosphoramide and trimethylmelamine nitrogen mustards such as chlorambucil, chlornaphazine, chlorophosphamide, estramustine, ifosfamide, mechlorethamine, mechlorethamine oxide hydrochloride, melphalan, novobiocin, phenesterine, prednimustine, trofosfamide, uracil mustard; nitrosoureas such as carmustine, chlorozotocin, fotemustine, lomustine, nimustine, ranimustine; antibiotics such as aclacinomycins, actinomycin, anthramycin, azaserine, bleomycins, cactinomycin, calicheamicin, carubicin, carminomycin, carzinophilin, chromomycins, dactinomycin, daunorubicin, detorubicin, 6-diazo-5-oxo-L-norleucine, doxorubicin, epirubicin, esorubicin, idarubicin, marcellomycin, mitomycins, mycophenolic acid, nogalamycin, olivomycins, peplomycin, porfiromycin, puromycin, quelamycin, rodorubicin, streptonigrin, streptozocin, tubercidin, ubenimex, zinostatin, zorubicin; anti-metabolites such as methotrexate and 5-fluorouracil (5-FU); folic acid analogues such as denopterin, methotrexate, pteropterin, trimetrexate; purine analogs such as fludarabine, 6-mercaptopurine, thiamiprine, thioguanine; pyrimidine analogs such as ancitabine, azacitidine, 6-azauridine, carmofur, cytarabine, dideoxyuridine, doxifluridine, enocitabine, floxuridine; androgens such as calusterone, dromostanolone propionate, epitiostanol, mepitiostane, testolactone; anti-adrenals such as aminoglutethimide, mitotane, trilostane; folic acid replenisher such as folinic acid; aceglatone; aldophosphamide glycoside; aminolevulinic acid; amsacrine; bestrabucil; bisantrene; edatrexate; defosfamide; demecolcine; diaziquone; eflornithine; elliptinium acetate; etoglucid; gallium nitrate; hydroxyurea; lentinan; lonidamine; mitoguazone; mitoxantrone; mopidamol; nitracrine; pentostatin; phenamet; pirarubicin; podophyllinic acid; 2-ethylhydrazide; procarbazine; polysaccharide-K; razoxane; sizofiran; spirogermanium; tenuazonic acid; triaziquone; 2,2′,2″-trichlorotriethylamine; urethan; vindesine; dacarbazine; mannomustine; mitobronitol; mitolactol; pipobroman; gacytosine; cytosine arabinoside; cyclophosphamide; thiotepa; taxoids, e.g., paclitaxel and docetaxel; chlorambucil; gemcitabine; 6-thioguanine; mercaptopurine; methotrexate; platinum analogs such as cisplatin and carboplatin; vinblastine; platinum; etoposide (VP-16); ifosfamide; mitomycin C; mitoxantrone; vincristine; vinorelbine; Navelbine; Novantrone; teniposide; daunomycin; aminopterin; Xeloda; ibandronate; CPT11; topoisomerase inhibitor RFS 2000; difluoromethylornithine (DMFO); retinoic acid; esperamycins; capecitabine; and pharmaceutically acceptable salts, acids or derivatives of any of the above.

[0700] Also included are anti-hormonal agents that act to regulate or inhibit hormone action on tumors such as anti-estrogens including for example tamoxifen, raloxifene, aromatase inhibiting 4(5)-imidazoles, 4-hydroxytamoxifen, trioxifene, keoxifene, LY117018, onapristone and toremifene (Fareston); and antiandrogens such as flutamide, nilutamide, bicalutamide, leuprolide and goserelin; and pharmaceutically acceptable salts, acids or derivatives of any of the above. Such chemotherapeutic compounds that can be used herein include compounds whose toxicities preclude use of the compound in general systemic chemotherapeutic methods.

[0701] Chemotherapeutic agents also include new classes of targeted chemotherapeutic agents such as, for example, imatinib (sold by Novartis under the trade name Gleevec in the United States), gefitinib (developed by AstraZeneca under the trade name Iressa) and erlotinib. Particular chemotherapeutic agents include, but are not limited to, cisplatin, carboplatin, oxaliplatin, DWA2114R, NK121, IS 3 295, and 254-S vincristine, prednisone, doxorubicin and L-asparaginase; mechlorethamine, vincristine, procarbazine and prednisone (MOPP), cyclophosphamide, vincristine, procarbazine and prednisone (C-MOPP), bleomycin, vinblastine, gemcitabine and 5-fluorouracil. Exemplary chemotherapeutic agents are, for example, cisplatin, carboplatin, oxaliplatin, DWA2114R, NK121, IS 3 295, and 254-S.

[0702] Exemplary anti-cancer antibiotics include, but are not limited to, anthracyclines such as doxorubicin hydrochloride (adriamycin), idarubicin hydrochloride, daunorubicin hydrochloride, aclarubicin hydrochloride, epirubicin hydrochloride and pirarubicin hydrochloride, phleomycins such as phleomycin and peplomycin sulfate, mitomycins such as mitomycin C, actinomycins such as actinomycin D, zinostatin stimalamer and polypeptides such as neocarzinostatin.

[0703] Anti-cancer antibodies include, but are not limited to, Rituximab, ADEPT, Trastuzumab (Herceptin), Tositumomab (Bexxar), Cetuximab (Erbitux), Ibritumomab (Zevalin), Alemtuzumab (Campath-1H), Epratuzumab (Lymphocide), Gemtuzumab ozogamicin (Mylotarg), Bevacimab (Avastin), Tarceva (Erlotinib), SUTENT (sunitinib malate), Panorex (Edrecolomab), RITUXAN (Rituximab), Zevalin (90Y-ibritumomab tiuxetan), Mylotarg (Gemtuzumab Ozogamicin) and Campath (Alemtuzumab).

[0704] Cancer growth inhibitors use cell-signaling molecules which control the growth and multiplication of cells, such as cancer cells. Drugs that block these signaling molecules can stop cancers from growing and dividing. Cancer growth inhibitors include drugs that block tyrosine kinases (i.e. tyrosine kinase inhibitors; TKIs) or that inhibit the proteasome. Examples of TKIs include, but are not limited to, Erlotinib (Tarceva, OSI-774), Iressa (Gefitinib, ZD 1839), Imatinib (Glivec, STI 571) and Bortezomib (Velcade).

[0705] In one example, nanoparticles can be designed such that they carry one or more therapeutic agents provided herein. Additionally, nanoparticles can be designed to carry a molecule that targets the nanoparticle to the tumor cells. In one non-limiting example, nanoparticles can be coated with a radionuclide and, optionally, an antibody immunoreactive with a tumor-associated antigen. In one example, a vaccinia virus in protein polymer composition, such as any provided herein, is administered to a subject having a tumor, cancer or metastasis in combination with a nanoparticle carrying any of the therapeutic agents provided herein.

[0706] Therapeutic compounds also include, but are not limited to, compounds that exert an immunotherapeutic effect, stimulate or suppress the immune system, carry a therapeutic compound, or a combination thereof. Such therapeutic compounds include, but are not limited to, anti-cancer antibodies, siRNA molecules and compounds that suppress the immune system (i.e. immunosuppressors, immunosuppressive agents). Exemplary immunosuppressive agents include, but are not limited to, glucocorticoids, alkylating agents, antimetabolites, cytokines and growth factors (e.g., interferons) and immunosuppressive antibodies (e.g., anti-CD3 and anti-IL-2 receptor antibodies). For example, immunosuppressive agents include biological response modifiers, such as monoclonal antibodies (mAbs), cancer vaccines, growth factors for blood cells, cancer growth inhibitors, anti-angiogenic factors, interferon alpha, interleukin-2 (IL-2), gene therapy and BCG vaccine for bladder cancer.

[0707] Cytokines and growth factors include, but are not limited to, interleukins, such as, for example, interleukins (e.g., interleukin-1, interleukin-2, interleukin-6 and interleukin-12), tumor necrosis factors, such as tumor necrosis factor alpha (TNF-α), interferons such as interferon gamma (IFN-γ) or interferon alpha (IFN-α), Granulocyte Colony Stimulating Factor (G-CSF; also called filgrastim (Neupogen) or lenograstim (Granocyte)), Granulocyte and Macrophage Colony Stimulating Factor (GM-CSF; also called molgramostim), angiogenins, erythropoietin (EPO) and tissue factors.

[0708] Cancer vaccines include, for example, antigen vaccines, whole cell vaccines, dendritic cell vaccines, DNA vaccines and anti-idiotype vaccines. Antigen vaccines are vaccines made from tumor-associated antigens in, or produced by, cancer cells. Antigen vaccines stimulate a subject's immune system to attack the cancer. Whole cell vaccines are vaccines that use the whole cancer cell, not just a specific antigen from it, to make the vaccine. The vaccine is made from a subject's own cancer cells, another subject's cancer cells or cancer cells grown in a laboratory. The cells are treated in the laboratory, usually with radiation, so that they can't grow, and are administered to the subject via injection or through an intravenous drip into the bloodstream so they can stimulate the immune system to attack the cancer.

[0709] One type of whole cell vaccine is a dendritic cell vaccine, which helps the immune system recognize and attack abnormal cells, such as cancer cells. Dendritic cell vaccines are made by growing dendritic cells alongside the cancer cells in the lab. The vaccine is administered to stimulate the immune system to attack the cancer.

[0710] Anti-idiotype vaccines are vaccines that stimulate the body to make antibodies against cancer cells. Cancer cells make some tumor-associated antigens that the immune system recognizes as foreign. But because cancer cells are similar to non-cancer cells, the immune system can respond weakly. DNA vaccines boost the immune response. DNA vaccines are made from DNA from cancer cells that carry the genes for the tumor-associated antigens. When a DNA vaccine is injected, it enables the cells of the immune system to recognize the tumor-associated antigens, and activates the cells in the immune system (i.e., breaking tolerance).

[0711] The dose scheme of the combination therapy administered is such that the combination of the two or more therapeutic modalities is therapeutically effective. Dosages will vary in accordance with such factors as the age, health, sex, size and weight of the patient, the route of administration, the toxicity of the drugs, frequency of treatment and the relative susceptibilities of the cancer to each of the therapeutic modalities. For combination therapies with additional therapeutic agents provided herein (e.g., chemotherapeutic compounds), dosages for the administration of such compounds are known in the art or can be determined by one skilled in the art according to known clinical factors (e.g., subject's species, size, body surface area, age, sex, immunocompetence, and general health, duration and route of administration, the kind and stage of the disease, for example, tumor size, and other viruses, treatments, or compounds, such as other chemotherapeutic drugs, being administered concurrently). As will be understood by one of skill in the art, the optimal treatment regimen will vary and it is within the scope of the treatment methods to evaluate the status of the disease under treatment and the general health of the patient prior to, and following one or more cycles of combination therapy in order to determine the optimal therapeutic combination.

### I. EXAMPLES

[0712] The following examples are included for illustrative purposes only and are not intended to limit the scope of the invention.

### Example 1

### mTyr, Tyrp1, and DCT Expression in HeLa Cells and Detection of Melanin Production

[0713] In this example, lentiviral expression vectors were constructed for the expression of mouse Tyrosinase (mTyr), human tyrosinase related protein 1 (Tyrp1) and human Dopachrome tautomerase/tyrosinase related protein 2 (DCT). The mTyr, Tyrp, and DCT proteins were expressed in HeLa cells by transfection with the expression vectors. Detection of melanin production was performed by visual inspection, measurement of optical density/absorbance, and magnetic resonance imaging (MRI).

### A. Construction of Expression Plasmids

[0714] Expression vectors driving expression of mTyr (SEQ ID NO: 6 (cDNA); SEQ ID NO: 7 (protein)), Tyrp 1 (SEQ ID NO: 19 (cDNA); SEQ ID NO: 20 (protein)), and DCT (SEQ ID NO: 29 (cDNA); SEQ ID NO: 30 (protein)), under the regulation of the CMV promoter, were constructed using the Multisite Gateway® system (Invitrogen), including the Gateway® vector pLENTI6/V5-DEST (Invitrogen, SEQ ID NO: 4). pLENTI6/V5-DEST is a lentiviral expression vector for lentiviral-based expression of a target gene in dividing and non-dividing mammalian cells., and contains the blasticidin selection marker for stable selection in mammalian cells.

[0715] To obtain Tyrp1 (SEQ ID NO: 19) and DCT (SEQ ID NO: 29) cDNAs, mRNA was isolated from 1936-Mel (NIH) human melanoma cell lines, using RNeasy Mini kit (Qiagen), and reverse transcribed using Revertaid cDNA Synthesis Kit (Fermentas). Double-stranded cDNAs, corresponding to Tyrp1 and DCT, were then amplified by PCR using Phusion High-fidelity DNA polymerase (Finnzymes) and forward and reverse primers attB1-TYRP1-for (SEQ ID NO: 35) and attB2-TYRP1-rev (SEQ ID NO: 36), respectively for TYRP1, and attB1-DCT-for (SEQ ID NO: 37) and attB2-DCT-rev (SEQ ID NO: 38), respectively for DCT (see Table 13 below). The forward primers used each contained attB1 sites for Gateway® cloning and a Kozak sequence for transcription initiation. The reverse primers each contained attB2 sites for Gateway® cloning. The initial denaturation step of the PCR reaction occurred at 98° C. for 60 seconds (s), followed by 30 cycles of 98° C. for 10 s, 58° C. for 15 s, and 72° C. for 35 s. The reaction was concluded with a final elongation step at 72° C. for 5 min before cooling down to 4° C.

[0716] cDNA encoding mTyr was obtained by PCR from the pTRETyBSnew plasmid (Gimenez et al., 2004) using forward primer attB1-mTYR-for (SEQ ID NO: 33) and reverse primer attB2-mTYR-rev (SEQ ID NO: 34) and the Phusion High-fidelity DNA polymerase (Finnzymes). The attB1-mTYR-for primer contains an attB1 site and the attB2-mTYR-rev contains an attB2 site for Gateway® cloning. The PCR reaction commenced with an initial denaturation step at 98° C. for 90 s, followed by 30 cycles of 98° C. for 20 s, 62° C. for 20 s, and 72° C. for 40 s and a final elongation step at 72° C. for 5 min before cooling down to 4° C.

[0717] Each PCR product was BP-cloned into donor vector pDONR221 (Invitrogen; SEQ ID NO: 5) to generate pENTR221-mTyr (SEQ ID NO: 8), pENTR221-TYRP1 (SEQ ID NO: 23), and pENTR221-DCT (SEQ ID NO: 31), each of which contain attP sites for recombination with pLENTI6N5-DEST. Recombination was carried out via LR-reaction according to the manufacturer's instructions, using half of all reagents/volumes described in the manual, to generate pLENTI6N5-DCT (SEQ ID NO: 32), pLENTI6/V5-Tyrp1 (SEQ ID NO: 24), pLENTI6N5-mTyr (SEQ ID NO: 9). Inserted sequences in resulting plasmids were confirmed by sequencing.

TABLE 3

| Primer | |
|---|---|
| name: | Sequence (5′-->3′) |
| attB1- | ggggacaagtttgtacaaaaaagcaggctAGCTTAGTGTAAAACAGGCTGAG |
| mTYR-for | (SEQ ID NO: 33) |
| attB2- | ggggaccactttgtacaagaaagctgggtAATTCCGGAAATTCACAATGAAGTAAG |
| mTYR-rev | (SEQ ID NO: 34) |
| attB1- | ggggacaagtttgtacaaaaaagcaggctgccaccgccATGAGTGCTCCTAAACTCCTCT |
| TYRP1-for | (SEQ ID NO: 35) |
| attB2- | ggggaccactttgtacaagaaagctgggtTTGTTAGACCACAGACTGATTAGG |
| TYRP1-rev | (SEQ ID NO: 36) |
| attB1-DCT- | ggggacaagtttgtacaaaaaagcaggctgccaccgccATGAGCCCCCTTTGG |
| for | (SEQ ID NO: 37) |
| attB2-DCT- | ggggaccactttgtacaagaaagctgggtAGCACCCTAGGCTTCTTCTGTG |
| rev | (SEQ ID NO: 38) |

CAPITAL letters = transgene sequence;
underline = Kozak sequence

### B. Visual Detection of Melanin Production in Transfected HeLa Cells

[0718] HeLa cells seeded into 24-well plates were grown to about 50% confluency (approximately 1×10⁵ cells/well) and transfected with 0.5 μg of plasmids pLENTI6N5-DCT, pLENTI6N5-Tyrp1, pLENTI6/V5-mTyr (or mixtures thereof) or control plasmids, expressing the reporter constructs EGFP (pLENTI6/V5-EGFP; SEQ ID NO: 71), mNeptune (pLENTI6/V5-mNeptune; SEQ ID NO: 72), or lacZ (pLENTI6N5-GW/lacZ; SEQ ID NO: 73) using GeneCellin™ (Bio Cell Challenge, Paris, France) according to the manufacturer's instructions. The transfected cells were then harvested at predetermined time points following transfection for analysis.

[0719] In a first experiment, HeLa cells were transfected with DCT alone, Tyrp 1 alone, mTyr alone, mTyr/DCT, mTyr/Tyrp1, or mTyr/Tyrp1/DCT. Control cells were mock transfected cells or cells transfected with EGFP or EGFP/mNeptune. The transfection efficiency was determined to be about 70% for single- and dual-plasmid transfection by flow cytometry of pLENTI-EGFP and pLENTI-EGFP+pLENTI-mNeptune transfected cells respectively. The cells were harvested 8 days post-transfection. Harvested samples were pelleted by centrifugation in microfuge tubes and photographed using a digital camera for visual assessment. Expression of mTyr alone, mTyr/DCT, mTyr/Tyrp1, and mTyr/Tyrp1/DCT all resulted in production of a dark pigment visible by eye in the cell pellet. In this experiment, the production of pigment in samples expressing DCT alone or Tyrp 1 alone was unclear.

[0720] In a further experiment, HeLa cells transfected with Tyrp1/DCT in addition to cells transfected with the construct combinations of the first experiment, to further examine the effects of DCT and Tyrp1 expression. Control samples for the second experiment included mock transfected cells and EGFP-transfected cells. In this experiment, HeLa cells were plated in 6-well plates and were transfected with 2.0 μg DNA upon becoming 50% confluent (approximately 5×10⁵ cells/well). Transfected HeLa cells were harvested 2 days post-transfection, and the transfection efficiency was determined to be >95% (determined only for single plasmid). Cells were pelleted by centrifugation, resuspended in a small volume (20 μL) of PBS, and dropped onto the lid of a 96-well plate, whereupon they were photographed using a digital camera for visual inspection.

[0721] In this experiment, production of melanin was observed only in cells expressing mTyr. Co-transfection of mTyr and DCT had no observable effect on melanin expression, compared to mTyr alone. In contrast, co-expression of mTyr and Tyrp 1 resulted in a pigment that appeared darker and blacker in color compared to expression of mTyr alone. The dark pigmentation indicates that co-expression of mTyr with Tyrp1 results in increased production of eumelanin.

### C. Absorbance Detection of Melanin Production in Transfected HeLa Cells

[0722] In this experiment, melanin production in HeLa cells was quantified based on changes in absorption rates following transfection with the melanin-producing enzymes, mTyr, Tyrp 1 and DCT, or combinations thereof. HeLa cells were transfected with vectors expressing DCT alone, Tyrp1 alone, mTyr alone, Tyrp1/DCT, mTyr/DCT, mTyr/Tyrp1 or mTyr/Tyrp1/DCT. Control samples included mock and lacZ transfected cells. HeLa cells were plated in a 24-well plated and transfected as described in part B, above, and harvested 2 days later. Cells were harvested from single wells (about 2×10⁵ cells) and resuspended in 100 μL ddH₂O containing 0.5 μL Benzonase. The cells were disrupted by ultrasound treatment (3×30 s at 80%), using a Sonifier Branson 450 (Heinemann, Schwäbisch Gmünd, Germany), followed by incubation at room temperature for 20 minutes. 10 μL 0.1% Triton X-100 in ddH2O was then added. After centrifugation (13,000 rpm for 3 min), the pigments were found in the pellet which was then resuspended in 100 μL ddH₂O. Of this suspension, 75 μL were added to a 384-well plate and the optical density/absorbance from 230 nm to 1000 nm was determined for each sample in 10 nm steps (bandwidth 230-310 nm: 5 nm, 320-1000 nm: 9 nm) using an Infinite 200 PRO NanoQuant Absorbance Reader (Tecan). Results were plotted as wavelength (nm) versus absorption (OD) and separately as wavelength (nm) versus absorption relative to lacZ-transfected cells.

[0723] The expression of mTyr resulted in production of pigments which resulted in high absorption of light over the whole tested spectrum, with the highest change in the visible spectrum observed at 450 nm. Co-expression of mTyr with Tyrp1 resulted in higher absorption (especially in the near infrared wavelengths). Additional expression of DCT with mTyr with Tyrp1 resulted in reduced absorption compared to mTyr with Tyrp1, but increased absorption compared to mTyr alone. Co-expression of DCT with mTyr resulted in reduced absorption compared to mTyr alone. The reduced absorption with the addition of DCT may be a consequence of reduced amounts of mTyr and/or Tyrp1 proteins, as the amount of each individual plasmid DNA is lower to achieve the same total amount of plasmid DNA for transfection.

### D. MRI Detection of Melanin Production in Transfected HeLa Cells

[0724] Melanin is associated with high signal intensity on T1-weighted MRI images due to shortened T1-relaxation times. In this experiment, changes in T1-relaxation times were examined in HeLa cells transfected with expression plasmids containing EGFP (pLENTI6N5-EGFP; SEQ ID NO: 71), mTyr (pLENTI6/V5-mTyr; SEQ ID NO: 9), Tyrp1 (pLENTI6N5-Tyrp1; SEQ ID NO: 24) transgenes, or combinations thereof.

[0725] HeLa cells were seeded in T175 flasks and transfected 3 days later with 20 μg total pLENTI6N5 plasmid DNA containing a 1:1 mixture of Tyrp1/EGFP, mTyr/EGFP, or Tyrp1/mTyr, or EGFP alone, using GeneCellin™ (20 mL total volume, 20 μg DNA dissolved in 0.5 mL medium with addition of 60 μL GeneCellin™ solution). The medium was supplemented with 250 μM ferric citrate. Three days after transfection, the cells were harvested by removing the medium, washing with 10 mL Hank's Balanced Salt Solution (HBSS), trypsinizing (5 mL Trypsin solution (PAA)) for 10 min at 37° C., adding 8 ml PBS (PAA) containing Ca²⁺ and Mg²⁺, centrifugation (1400 rpm for 5 min), and washing with 12 ml PBS. Harvested cells were counted and 3×10⁷ cells were pelleted by centrifugation at 1400 rpm for 5 min and then resuspended in 300 μL PBS. MRI-glass tubes (5 mm diameter) were then filled with the cell suspension, which were centrifuged at low speed before inversion recovery snapshot FLASH MR imaging was performed. Images were collected, using a Bruker Avance 500 equipped with an 11.7 T (500 MHz) vertical bore magnet at MR microscopy resolution with the following parameters: 40 echoes, 4 segments, TR=3,992 ms, TE=1,167 ms, flip angle α=4.5°, matrix size=128×128, FOV=20×20 mm² (with a resolution of 156.25×156.25 mm²), slice thickness=6 mm.

[0726] The experimentally determined T1 relaxation times were 1812±40 ms for EGFP, 1850±8 ms for mTyr/EGFP, 1899±6 ms for Tyrp1/EGFP and 1032±2 ms for mTyr/Tyrp 1. These results indicate that co-expression of mTyr and Tyrp 1, which results in increased eumelanin production (see Examples 1B and 1C), significantly reduces T1 relaxation time, which in turn produces greater contrast on images produced by MRI.

### Example 2

### Construction of Modified LIVP Vaccinia Viruses

[0727] Recombinant vaccinia viruses containing heterologous DNA were generated by insertion of one or more transgenes, from a transfer vector, into one or more loci of a starting vaccinia virus strain via homologous recombination, using methods described herein and known to those of skill in the art (see, e.g., Falkner and Moss (1990) J. Virol. 64:3108-2111; Chakrabarti et al. (1985) Mol. Cell Biol. 5:3403-3409; and U.S. Pat. No. 4,722,848). In these methods, the existing target gene in the starting vaccinia virus genome was replaced by an interrupted copy of the gene contained in the transfer vector through two crossover events: a first crossover event of homologous recombination between the vaccinia virus genome and the transfer vector and a second crossover event of homologous recombination between direct repeats within the target locus. The interrupted version of the target gene in the transfer vector contains the insertion DNA flanked on each side by DNA corresponding to the left portion of the target gene and right portion of the target gene, respectively. The transfer vector also contains a dominant selection marker, e.g., the E. coli guanine phosphoribosyltransferase (gpt) gene, under the control of a vaccinia virus early promoter (e.g., P7.5kE). Including such a marker in the vector enables a transient dominant selection process to identify recombinant virus grown under selective pressure that has incorporated the transfer vector into its genome. Because the marker gene is not stably integrated into the genome, it is deleted from the genome in a second crossover event that occurs when selection is removed. Thus, the final recombinant virus contains the interrupted version of the target gene as a disruption of the target loci, but does not retain the selectable marker from the transfer vector.

[0728] Modified vaccinia viruses described herein were generated by replacing nucleic acid or inserting nucleic acid in the F14.5L (also referred to as F3; see U.S. Pat. No. 7,588,767), thymidine kinase (TK), and hemagglutinin (HA) gene loci in the vaccinia virus genome. The heterologous DNA inserted was an expression cassette containing one or two genes of interest, or a reporter protein-encoding DNA, operably linked to a promoter, in the correct or reverse orientation to a vaccinia virus promoter.

[0729] Exemplary modified viruses are set forth in Table 14 below. Details of the experimental procedures to generate the modified viruses are provided in the sections that follow. These methods can be adapted to modify any of the viruses described herein to express tyrosinase and/or tyrosinase related protein-1 for production of melanin in infected cells. Also, the tyrosinase and/or tyrosinase related protein-1 encoding nucleic acid can be inserted into loci other than those exemplified, particularly into any non-essential locus.

TABLE 14
Summary of modified vaccinia viruses

| | SEQ | | | | |
|---|---|---|---|---|---|
| virus | ID | parent | F14.5L | TK | HA |
| name | NO: | strain | locus | locus | locus |
| GLV- | 2 | LIVP | (P_{SEL})Ruc- | (P_{SEL})rTrfR- | (P₁₁ₖ)gusA |
| 1h68 | | | GFP | (P_{7.5k})LacZ | |
| GLV- | | GLV- | (knock-out) | (P_{SEL})rTrfR- | (P₁₁ₖ)gusA |
| 1h71 | | 1h68 | | (P_{7.5k})LacZ | |
| GLV- | 3 | GLV- | (knock-out) | (P_{SEL})rTrfR- | (P_{SL})TurboFP635 |
| 1h254 | | 1h71 | | (P_{7.5k})LacZ | |
| GLV- | 64 | GLV- | (knock-out) | (P_{SEL})Tyrp1- | (P_{SL})TurboFP635 |
| 1h310 | | 1h254 | | (P_{SEL})mTyr | |
| GLV- | 65 | GLV- | (P_{SEL})Ruc- | (P_{SL})tetO- | (P₁₁ₖ)gusA |
| 1h311 | | 1h68 | CFP | CBG99- | |
| | | | | mRFP | |
| GLV- | 66 | GLV- | (P_{7.5k})-TetR | (P_{SL})tetO- | (P₁₁ₖ)gusA |
| 1h312 | | 1h311 | | CBG99- | |
| | | | | mRFP | |
| GLV- | 67 | GLV- | (P_{SEL})Ruc- | (P_{SE})Tyrp1- | (P₁₁ₖ)gusA |
| 1h322 | | 1h311 | GFP | (P_{SE})mTyr | |
| GLV- | 206 | GLV- | (P_{SEL})Ruc- | (P_{SEL})Tyrp1- | (P₁₁ₖ)gusA |
| 1h323 | | 1h311 | GFP | (P_{SEL})mTyr | |
| GLV- | 68 | GLV- | (P_{SEL})Ruc- | (P_{SE})Tyrp1- | (P₁₁ₖ)gusA |
| 1h324 | | 1h311 | GFP | (P_{SEL})mTyr | |
| GLV- | | GLV- | (P_{SEL})Ruc- | (P_{SEL})Tyrp1- | (P₁₁ₖ)gusA |
| 1h325 | | 1h311 | GFP | (P_{SE})mTyr | |
| GLV- | 69 | GLV- | (P_{SEL})Ruc- | (P_{SE})mTyr | (P₁₁ₖ)gusA |
| 1h326 | | 1h311 | GFP | | |
| GLV- | 70 | GLV- | (P_{SEL})Ruc- | (P_{SEL})mTyr | (P₁₁ₖ)gusA |
| 1h327 | | 1h311 | GFP | | |
| GLV- | | GLV- | (P_{SEL})Ruc- | (P_{SE})Tyrp1 | (P₁₁ₖ)gusA |
| 1h328 | | 1h311 | GFP | | |
| GLV- | | GLV- | (P_{SEL})Ruc- | (P_{SEL})Tyrp1 | (P₁₁ₖ)gusA |
| 1h329 | | 1h311 | GFP | | |
| GLV- | 210 | GLV- | (P_{7.5})tetR | (P_{SEL})rTrfR- | (P₁₁ₖ)gusA |
| 1h330 | | 1h68 | | (P_{7.5k})LacZ | |
| GLV- | 211 | GLV- | (P_{SEL})tetR | (P_{SL})tetO- | (P₁₁ₖ)gusA |
| 1h354 | | 1h311 | | CBG99- | |
| | | | | mRFP1 | |
| GLV- | 212 | GLV- | (P_{SE})hNISa | (P_{SE})Tyrp1- | (P₁₁ₖ)gusA |
| 1h458 | | 1h324 | | (P_{SEL})mTyr | |
| GLV- | 213 | GLV- | (P_{SE})hNISa | (P_{SEL})mTyr | (P₁₁ₖ)gusA |
| 1h459 | | 1h327 | | | |
| GLV- | 214 | GLV- | (P_{SEL})Ruc- | (P_{SL})tetO- | (P₁₁ₖ)gusA |
| 1h460 | | 1h311 | GFP | mTyr | |
| GLV- | 215 | GLV- | (P_{7.5})tetR | (P_{SL})tetO- | (P₁₁ₖ)gusA |
| 1h461 | | 1h330 | | mTyr | |
| GLV- | 216 | GLV- | (P_{SEL})tetR | (P_{SL})tetO- | (P₁₁ₖ)gusA |
| 1h462 | | 1h354 | | mTyr | |

### A. Generation of the GLV-1h68 Starting/Parental Strain

[0730] Modified vaccinia viruses were generated from the starting vaccinia virus (VV) strain GLV-1h68 (also named RVGL21 and GL-ONC1, SEQ ID NO: 2). This genetically engineered strain, which has been described in U.S. Pat. No. 7,588,767, was prepared from the vaccinia virus strain designated LIVP (a vaccinia virus strain, originally derived by adapting the Lister strain (ATCC Catalog No. VR-1549) to calf skin (Research Institute of Viral Preparations, Moscow, Russia, Al'tshtein et al. (1983) Dokl. Akad. Nauk USSR 285:696-699)). The LIVP strain (having a genome containing the sequence set forth in SEQ ID NO: 1), from which GLV-1h68 was generated, contains a mutation in the coding sequence of the TK gene, whereby a substitution of a guanine nucleotide with a thymidine nucleotide (nucleotide position 80207 of SEQ ID NO: 1) introduces a premature STOP codon within the coding sequence. The genome of LIVP also is set forth in SEQ ID NO:188, which represents the de novo parental sequence of GLV-1h68 without the insertions as described in Zhang et al. (2009) Mol. Genet. Genomics, 282:417-435.

[0731] As described in U.S. Pat. No. 7,588,767 (see Example 1), GLV-1h68 was generated by inserting expression cassettes encoding detectable marker proteins into the F14.5L (also designated in LIVP as F3), thymidine kinase (TK), and hemagglutinin (HA) gene loci of the vaccinia virus LIVP strain. Specifically, an expression cassette, containing a Ruc-GFP cDNA, a fusion of DNA encoding Renilla luciferase and DNA encoding GFP, under the control of a vaccinia synthetic early/late promoter (P_{SEL}) was inserted into the F14.5L gene; an expression cassette containing DNA encoding beta-galactosidase (β-gal) under the control of the vaccinia early/late promoter, P7.5k, and DNA encoding a rat transferrin receptor positioned in reverse orientation relative to an SEL promoter (and therefore not expressed), was inserted into the TK gene; and an expression cassette containing DNA encoding β-glucuronidase (gusA) under the control of the vaccinia late promoter, P11k, was inserted into the HA gene.

[0732] GLV-1h68 contains an expression cassette containing a Ruc-GFP cDNA molecule (a fusion of DNA encoding Renilla luciferase and DNA encoding GFP; SEQ ID NO: 78 (cDNA); SEQ ID NO: 79 (protein)) under the control of a vaccinia synthetic early/late promoter P_{SEL} ((P_{SEL})Ruc-GFP) inserted into the F14.5L gene locus; an expression cassette containing a DNA molecule encoding beta-galactosidase under the control of the vaccinia early/late promoter P_{7.5k} ((P_{7.5k})LacZ), DNA encoding a rat transferrin receptor positioned in the reverse orientation for transcription relative to the vaccinia synthetic early/late promoter P_{SEL} ((P_{SEL})rTrfR) inserted into the TK gene locus (the resulting virus does not express transferrin receptor protein since the DNA molecule encoding the protein is positioned in the reverse orientation for transcription relative to the promoter in the cassette); and an expression cassette containing a DNA molecule encoding β-glucuronidase under the control of the vaccinia late promoter P₁₁ₖ ((P₁₁ₖ)gusA) inserted into the HA gene locus. The genome of GLV-1h68 has the sequence of nucleotides set forth in SEQ ID NO:2. GLV-1h68 was used as a parental strain for the generation of additional modified viruses, described in the following sections.

### B. Generation of Other Starting Strains

[0733] i. GLV-1h71

[0734] GLV-1h71 was generated by insertion of a short non-coding DNA fragment containing BamHI and HindIII sites (SEQ ID NO: 41) into the F14.5L locus of starting strain GLV-1h68 (SEQ ID NO: 2) thereby deleting the Ruc-GFP fusion gene expression cassette at the F14.5L locus of GLV-1h68. Thus, in strain GLV-1h71, the vaccinia F14.5L gene is interrupted within the coding sequence by a short non-coding DNA fragment. GLV-1h71 was used as a starting strain to generate GLV-1h254.

[0735] ii. GLV-1h254

[0736] GLV-1h254 (SEQ ID NO: 3) was generated by insertion of an expression cassette encoding a TurboFP635 polypeptide (SEQ ID NO: 49 (cDNA); SEQ ID NO: 50 (protein)), a far-red mutant of the red fluorescent protein also known as “Katushka” from sea anemone Entacmaea quadricolor, under the control of the vaccinia P_{SL} promoter into the HA locus of starting strain GLV-1h71 thereby deleting the gusA expression cassette at the HA locus of starting GLV-1h71. Thus, in strain GLV-1h254 (SEQ ID NO: 3), the vaccinia HA gene is interrupted within the coding sequence by (P_{SL})TurboFP635. GLV-1h254 was used as the starting strain for the generation of GLV-1h310.

[0737] iii. GLV-1h330

[0738] The cDNA encoding tetR (Tetracycline repressor, codon optimized for expression in mammalian system), was PCR amplified from the lentiviral vector system designated FH1tUTG (Herold et al., (2008) PNAS 105(47):18507-18512) as the template with primers tetR-5 (5′-CTCGAG(Xho I) ATGTCCAGACTGGACAAGAGCAA-3′; SEQ ID NO:53) and tetR-3 (5′-GGATCC(BamH I) TCAAGAGCCAGACTCACATTTCAGCTGC-3′; SEQ ID NO:54). The PCR product was gel-purified, and cloned into the pCR-Blunt II-TOPO vector (SEQ ID NO: 52) using Zero Blunt TOPO PCR Cloning Kit (Invitrogen). The resulting construct pCRII-tetR1 was sequence confirmed. The tetR cDNA was then released from pCRII-tetR1 with Xho I and BamH I, and subcloned into vaccinia shuttle vector pSC65 (Earl et al., “Preparation of cell cultures and vaccinia virus stocks. In: Ausubel et al, editors. Current protocols in molecular biology. Vol 2. New York (N.Y.): Greene Publishing Associates and Wiley Interscience; 1991. p. 16.16.1-16.16.7) with the same cuts, replacing lacZ cDNA with tetR and thus placing tetR under the control of vaccinia virus promoter p7.5. The p7.5-tetR cDNA was then released from the pSC65-tetR construct with Hind III and BamH I, and subcloned into the transfer vector for the F14.5 locus (pNCVVf14.51T) with the same cuts. The resulting construct F14.5L-p7.5-tetR1 (SEQ ID NO: 77) was sequence confirmed, and used for homologous recombination at the F14.5L locus of GLV-1h68 (SEQ ID NO: 2) to generate GLV-1h330 (SEQ ID NO: 210).

[0739] iv. Generation of Vaccinia Viruses Carrying Inducible Tetracycline (TetO) System

[0740] Modified viruses, expressing a tetracycline-inducible reporter construct or a reporter construct repressed by tetracycline or a derivative thereof, were generated by homologous recombination with the GLV-1h68 parental strain generated in part A above. These viruses, designated GLV-1h311 (SEQ ID NO: 65) and GLV-1h312 (SEQ ID NO: 66), respectively, were used as control constructs in the Examples below. GLV-1h311 (SEQ ID NO: 65) was also used as a parental strain for the construction of additional modified viruses.

[0741] a. GLV-1h311

[0742] GLV-1h311 (SEQ ID NO: 65) was generated by replacing the (P_{SEL})rTrfR-(P_{7.5k})Lacz insertion in the TK locus of GLV-1h68 with an expression cassette containing (CBG99)-2A-mRFP1 (SEQ ID NO: 44), a fusion protein of a green-emitting Chroma-Luc luciferase (CBG99) linked with monomeric red fluorescent protein (mRFP), by a “self-cleaving” 2A peptide under the regulation of a tet operator (tetO) sequence and the vaccinia virus SL promoter. The cDNA encoding (CBG99)-2A-mRFP was PCR amplified using plasmid pCRTK-(P_{SEL})mRFP (SEQ ID NO: 46; described in U.S. Pat. No. 8,052,968) as the template, with primers tetO-mRFP-5 (5′-GTCGAC(SalI) TCCCTATCAGTGATAGAGAATGGTGAAGCGTGAGAAAAATGTCATC-3′; SEQ ID NO: 47) and mRFP-3 (5′-TTAATTAA(PacI) TTAGGCGCCGGTGGAGT-3′; SEQ ID NO: 48). The forward tetO-mRFP-5 primer (SEQ ID NO: 47), introduced a tet operator (tetO) sequence (TCCCTATCAGTGATAGAGA; SEQ ID NO: 51) at the 5′ end of (CBG99)mRFP.

[0743] The PCR product was gel-purified, and cloned into the pCR-Blunt II-TOPO vector (SEQ ID NO: 52) using Zero Blunt TOPO PCR Cloning Kit (Invitrogen). The resulting construct, pCRII-tetO-(CBG99)mRFP, was sequence confirmed. The tetO-(CBG99)mRFP cDNA (SEQ ID NO: 45) was then released from pCRII-tetO-(CBG99)mRFP with SalI and PacI, and subcloned into SalI/PacI-digested TK-(P_{SL})mLIGHT1 (SEQ ID NO: 207), replacing the mLIGHT cDNA in the vector. The resulting construct, TK-(P_{SL})tetO-(CBG99)mRFP was sequence confirmed and used to make recombinant virus GLV-1h311 (SEQ ID NO: 65), inserting (P_{SL})tetO-(CBG99)mRFP in the TK locus, by homologous recombination with parental virus GLV-1h68 (SEQ ID NO: 2).

[0744] b. GLV-1h312

[0745] GLV-1h312 was generated by replacing the (P_{SEL})Ruc-GFP insert within the F14.5L locus of GLV-1h311 (SEQ ID NO: 65) with an expression cassette expressing tetracycline repressor (tetR) under the control of the vaccinia early/late promoter, P7.5k. F14.5L-p7.5-tetR1 (SEQ ID NO: 77), generated as described in Example 2B(iii) above, was recombined with GLV-1h311 (SEQ ID NO: 65) to insert (P_{7.5k})TetR in the F14.5 locus, thereby generating GLV-1h312 (SEQ ID NO: 66).

[0746] c. GLV-1h354

[0747] The tetR cDNA was released from F14.5L-p7.5-tetR1 (SEQ ID NO:77) with Xho I and Sal I digestion, gel purified, and ligated with the F14.5L-SEL fragment of Sal I-digested F-SEL-CBG99-mRFP2. The resulting construct, FSEL-tetR1 (SEQ ID NO: 223) was sequence confirmed and used for homologous recombination at the F14.5L locus of GLV-1h311 (SEQ ID NO: 65) to generate GLV-1h354 (SEQ ID NO: 211).

C. Generation of Vaccinia Viruses Encoding mTyr (Tyrosinase)

[0748] i. GLV-1h460, GLV-1h461, and GLV-1h462 ((P_{SL})tetO-mTyr)

[0749] A tetO-mTyr fragment was PCR amplified from TK-SE-mTyr-1 (SEQ ID NO: 12) using primers SalI-tetO-mTyr (5′-GTCGAC(SalI) TCCCTATCAGTGATAGAGAATGTTCTTGGCTGTTTTGTATTGCCTTC-3′; SEQ ID NO: 230) and mTyr-3 (5′-TTAATTAA(PacI) TCACAGATGGCTCTGATACAGC-3′; SEQ ID NO: 11). The purified PCR product was then cloned with the pCR Blunt II TOPO kit (Invitrogen). The resulting pCRII-mTyr plasmid was digested with SalI and Pad and ligated with SalI and PacI-digested TK-SL fragment of the TK-(P_{SL})mLIGHT1 transfer vector (SEQ ID NO: 207). The resulting construct, TK-SL-tetO-mTyr (SEQ ID NO: 227), was sequence confirmed and used for homologous recombination at the TK locus of GLV-1h311 (SEQ ID NO: 65), GLV-1h330 (SEQ ID NO: 210) and GLV-1h354 (SEQ ID NO: 211) to generate GLV-1h460 (SEQ ID NO: 214), GLV-1h461 (SEQ ID NO: 215) and GLV-1h462 (SEQ ID NO: 216), respectively.

[0750] ii. GLV-1h326, GLV-1h327, and GLV-1h459

[0751] The insertion within the TK locus of GLV-1h311 was replaced with an expression cassette containing cDNA encoding mouse Tyrosinase (mTyr) under the regulation of a vaccinia virus SE (weaker) or SEL(stronger) promoter to generate GLV-1h326 and GLV-1h327, respectively. The (P_{SEL})Ruc-GFP insert in the F15.5L locus of GLV-1h327 was then replaced with a cassette containing the transgene encoding human sodium iodide symporter (hNIS) under the regulation of the P_{SE} promoter to generate GLV-1h459.

[0752] a. GLV-1h326 and GLV-1h327

[0753] The cDNA encoding mTyr was PCR amplified using the plasmid pLENTI6/V5-mTyr as the template with primers mTyr-5 (5′-GTCGAC(SalI) CACCATGTTCTTGGCTGTTTTGTATTGCCT-3′; SEQ ID NO: 10) and mTyr-3 (5′-TTAATTAA(PacI) TCACAGATGGCTCTGATACAGC-3′; SEQ ID NO: 11). The PCR product was gel-purified, and cloned into the pCR-Blunt II-TOPO vector (Invitrogen; SEQ ID NO: 52) using Zero Blunt TOPO PCR Cloning Kit (Invitrogen). The resulting construct, pCRII-mTyr-1, was confirmed by sequencing. The mTyr encoding DNA was then released from pCRII-mTyr-1 by SalI/PacI digestion and subcloned into TK-(P_{SE})mLIGHT2 (SEQ ID NO: 76) and TK-(P_{SEL})mLIGHT1 (SEQ ID NO: 75), which were likewise digested, replacing the mLIGHT-encoding cDNA in both vectors. The resulting constructs, TK-(P_{SE})mTyr-1 (SEQ ID NO: 12) and TK-(P_{SEL})mTyr-1 (SEQ ID NO: 13), were sequence confirmed and then recombined with parental virus GLV-1h311 (SEQ ID NO: 65), exchanging the expression cassettes in the TK locus, to create recombinant viruses GLV-1h326 (SEQ ID NO: 69) and GLV-1h327 (SEQ ID NO: 70), respectively.

[0754] b. GLV-1h459

[0755] GLV-1h459 was generated by replacing the (P_{SEL})Ruc-GFP expression cassette in the F14.5L locus of GLV-1h327 with a cassette containing the transgene encoding human sodium iodide symporter (hNIS) under the regulation of the P_{SE} promoter. Expression of hNIS facilitates deep tissue imaging without altering the oncolytic or replication capabilities of vaccinia virus (U.S. Patent Publ. No. 2009-0117034; Haddad et al., (2011) J. Transl. Med. 9:36).

[0756] hNIS cDNA was PCR amplified using human cDNA clone TC124097 (SLC5A5) from OriGene as the template with following primers: hNIS-5 (5′-GTCGAC(SalI) CACCATGGAGGCCGTGGAGACCGG-3′, SEQ ID NO: 234) and hNIS-3 (5′-TTAATTAA (PacI)TCAGAGGTTTGTCTCCTGCTGGTCTCGA-3′, SEQ ID NO: 235). The PCR product was gel-purified, and cloned into the pCR-Blunt H-TOPO vector (SEQ ID NO: 52) using Zero Blunt TOPO PCR Cloning Kit (Invitrogen). The resulting construct, pCRII-hNIS-1, was sequenced and found to contain an extra 33-bp segment in the middle of the coding sequence, representing an alternative splicing product for hNIS. To remove this extra 33-bp segment, two additional primers, hNIS-a5 (5′-CCCAGACCAGTACATGCCTCTGCTGGTGCTG-3′; SEQ ID NO: 236) and hNIS-a3 (5′-GAGGCATGTACTGGTCTGGGGCAGAGATGC-3′; SEQ ID NO: 237) were designed to flank the segment.

[0757] The pCRII-hNIS-1 construct was then used as the template for two subsequent PCR amplifications: 1) using hNIS-5 (SEQ ID NO: 234) paired with hNIS-a3 (SEQ ID NO: 237) and 2) using hNIS-a5 (SEQ ID NO: 236) paired with hNIS-3 (SEQ ID NO: 235). The respective PCR products were then mixed and used as the templates in one reaction with the primer pair hNIS-5 (SEQ ID NO: 234) and hNIS-3 (SEQ ID NO: 235). The final PCR product was cloned into the pCR-Blunt II-TOPO vector (SEQ ID NO: 52) and designated pCRIIhNISa-2, Sequencing of pCRIIhNISa-2 confirmed the sequence of the hNISa transgene was identical to the SLC5A5 sequence in GenBank (accession number NM_{—}000453; SEQ ID NO: 226). The sequence-confirmed hNISa cDNA was then released from pCRII-hNISa-2 with Sal I and Pac I and subcloned into HA-SE-RLN-7 with the same cuts, replacing the RLN cDNA. The resulting construct HA-SE-hNISa-2 was confirmed by sequencing.

[0758] HA-SE-hNISa-2 was then used as the template for PCR, using primers FSEin-5 (5′-TCGTGTCTGTAAGCTT(HindIII) AAAAATTGAAAAACTAGCGTCTTTTTTTGC-3′; (SEQ ID NO: 208) and FinhNISa-3 (5′-GGATCC(BamHI) TGCGAAGCTTTCCAGACATTGTTGAATTAGATCGAT-3′; SEQ ID NO: 209) to amplify SE-hNISa cDNA. The SE-hNISa PCR product was gel purified, and cloned, using the In-Fusion PCR Cloning System (Clontech), into the gel-purified F14.5L transfer vector of HindIII/BamHI digested F14.5L-SE-hNET. The resulting construct, FSE-hNISa (SEQ ID NO: 224), was sequence confirmed and used for homologous recombination at the F14.5L locus of GLV-1h327 (SEQ ID NO: 70) to generate GLV-1h459 (SEQ ID NO: 213).

D. Generation of Viruses Encoding Tyrp1 (GLV-1h328, 1h329)

[0759] The insertion within the TK locus of GLV-1h311 was replaced with an expression cassette containing cDNA encoding Tyrosinase Related Protein-1 (Tyrp1) under the regulation of a vaccinia virus SE (weaker) or SEL(stronger) promoter to generate GLV-1h328 and GLV-1h329, respectively.

[0760] To generate the Tyrp expression cassette, Tyrp1 encoding cDNA was PCR amplified using plasmid pLENTI6N5-Tyrp1 as the template with primers Tyrp-5 (5′-GTCGAC(SalI) CACCATGAGTGCTCCTAAACTCCTCTCT-3′; SEQ ID NO: 21) and Tyrp-3 (5′-TTAATTAA(PacI) TTAGACCACAGACTGATTAGGATTCTGG-3′; SEQ ID NO: 22). Following gel purification, the PCR product was cloned into the pCR-Blunt II-TOPO vector (Invitrogen; SEQ ID NO: 52) using Zero Blunt TOPO PCR Cloning Kit (Invitrogen). The resulting construct pCRII-Tyrp1-1 was sequence confirmed. The Tyrp1 cDNA was then released from pCRII-Tyrp1-1 by SalI/PacI digestion, and subcloned into likewise digested TK-(P_{SE})mLIGHT2 (SEQ ID NO: 76) and TK-(P_{SEL})mLIGHT1 (SEQ ID NO: 75) replacing the mLIGHT-encoding cDNA. The resulting constructs TK-(P_{SE})Tyrp1 (SEQ ID NO: 25) and TK-(P_{SEL})Tyrp1 (SEQ ID NO: 26) were sequence confirmed and then recombined with parental virus GLV-1h311 (SEQ ID NO: 65), exchanging the expression cassettes in the TK locus, to create recombinant viruses GLV-1h328 and GLV-1h329, respectively.

E. Generation of Viruses Encoding Melanin-Producing Enzymes, mTyr and Tyrp1

[0761] Recombinant viruses encoding human Tyrosinase-related protein 1 (Tyrp 1) and mTyr were created by ligating an expression cassette containing mTyr encoding cDNA, under the regulation of an SE or SEL vaccinia virus promoter, with an expression cassette containing Tyrp1 encoding cDNA, also under the regulation of an SE or SEL vaccinia virus promoter, and inserting the generated double constructs into the TK locus of GLV-1h311 to generate the recombinant viruses below.

[0762] i. Generation of GLV-1h322 ((P_{SE})Tyrp1/(P_{SE})-mTyr)

[0763] (P_{SE})mTyr and (P_{SE})Tyrp1 expression cassettes were released from TK-(P_{SE}) mTyr-1 (SEQ ID NO: 12; described in part D) and TK-(P_{SE})Tyrp1 (SEQ ID NO: 25; described above), respectively, by SacI digestion. The (P_{SE})mTyr and (P_{SE})Tyrp1 fragments, flanked by cohesive SacI restriction sites, were gel purified and ligated together with Quick Ligation Kit (New England BioLabs). The ligation products were then used as the template for PCR with primers (P_{SE})Sal-Tyrp1 (5′-TTTTTTTGCTCGAAGTCGAC(SalI) CACCATGAGTGCTCC-3′; SEQ ID NO: 27) and Ter-PacI-mTyr (5′-GATCGATAAAAATTAATTAA(PacI) TCACAGATGGCTCTG-3′; SEQ ID NO: 14). The PCR product was then cloned into the gel-purified TK-SE fragment of TK-(P_{SE})mTyr-1, resulting from SalI/PacI digestion, using the In-Fusion PCR Cloning System (Clontech). The resulting construct TK-(P_{SE})Tyrp1-(P_{SE})mTyr (SEQ ID NO: 15) was sequence confirmed, and was recombined with the TK locus of GLV-1h311 (SEQ ID NO: 65) to generate GLV-1h322 (SEQ ID NO: 67).

[0764] ii. Generation of GLV-1h310 and GLV-1h323 ((P_{SEL})Tyrp1/(P_{SEL})mTyr)

[0765] Expression cassettes (P_{SEL})mTyr and (P_{SEL})Tyrp1 were released from TK-(P_{SEL})mTyr-1 (SEQ ID NO: 13) and TK-(P_{SEL})Tyrp1 (SEQ ID NO: 26), respectively by SalI digestion. The (P_{SEL})mTyr and (P_{SEL})Tyrp1 fragments, flanked by cohesive SalI restriction sites were gel-purified, and ligated together with Quick Ligation Kit (New England BioLabs). The ligation products were then used as the template for PCR with primers (P_{SEL})Sal-Tyrp1 (5′-TAAATAAGCTCGAAGTCGAC(SalI) CACCATGAGTGCTCC-3′; SEQ ID NO: 28) and Ter-PacI-mTyr (5′-GATCGATAAAAATTAATTAA(PacI) TCACAGATGGCTCTG-3′; SEQ ID NO: 14). The PCR product was cloned, using the In-Fusion PCR Cloning System (Clontech), into the gel-purified TK-SEL fragment of SalI/PacI digested TK-(P_{SEL})mTyr-1. The resulting construct, TK-(P_{SEL})Tyrp1-(P_{SEL})mTyr (SEQ ID NO: 17) was sequence confirmed, and was recombined with the TK locus of GLV-1h254 (SEQ ID NO: 3) to generate GLV-1h310 (SEQ ID NO: 64). The TK-(P_{SEL})Tyrp1-(P_{SEL})mTyr construct (SEQ ID NO: 17) also was recombined with GLV-1h311 (SEQ ID NO: 65) to generate GLV-1h323 (SEQ ID NO: 206).

[0766] iii. Generation of GLV-1h324 and GLV-1h458((P_{SE})Tyrp1/(P_{SEL})mTYR)

[0767] Expression cassettes (P_{SEL})mTyr and (P_{SE})Tyrp1 were released from TK-(P_{SEL})mTyr-1 and TK-(P_{SE})Tyrp1, respectively, by SacI digestion. The gel-purified (P_{SEL})mTyr and (P_{SE})Tyrp1 fragments were then ligated together using Quick Ligation Kit (New England BioLabs), and the ligation products were used as the template for PCR with primers (P_{SE})Sal-Tyrp1 (5′-TTTTTTTGCTCGAAGTCGAC(SalI) CACCATGAGTGCTCC-3′; SEQ ID NO: 27) and Ter-PacI-mTyr (5′-GATCGATAAAAATTAATTAA(PacI) TCACAGATGGCTCTG-3′; SEQ ID NO: 14). The (P_{SE})Tyrp1-SEL PCR product was then cloned, using the In-Fusion PCR Cloning System (Clontech), into the TK-SE fragment SalI/Pad-digested TK-(P_{SE})mTyr-1. The resulting construct, TK-(P_{SE})Tyrp1-(P_{SEL})mTyr (SEQ ID NO: 18), was sequence confirmed, and used for homologous recombination at the TK locus of GLV-1h311 (SEQ ID NO: 65) to generate GLV-1h324 (SEQ ID NO: 68).

[0768] The F-SE-hNIS (SEQ ID NO: 224) construct, containing the transgene for human sodium iodide symporter under the regulation of the PSE promoter, was generated as described in Example 2C(ii) and recombined with GLV-1h324 (SEQ ID NO: 68) to insert the (P_{SE})hNIS transgene into the F14.5L locus to thereby generate GLV-1h458 (SEQ ID NO: 212).

[0769] iv. Generation of GLV-1h325 ((P_{SEL})Tyrp1/(P_{SE})mTYR)

[0770] (P_{SE}) mTyr and (P_{SEL})Tyrp1 expression cassette were released from TK-(P_{SE})mTyr-1 (SEQ ID NO: 12; described in part D) and TK-(P_{SEL})Tyrp1 (SEQ ID NO: 26; described above), respectively, by SalI digestion. The (P_{SE})mTyr and (P_{SEL})TyrP1 fragments, flanked by cohesive SalI restriction sites, were gel purified and ligated together with Quick Ligation Kit (New England BioLabs). The ligation products were then used as the template for PCR with primers (P_{SEL})Sal-Tyrp1 (5′-TAAATAAGCTCGAAGTCGAC(SalI) CACCATGAGTGCTCC-3′; SEQ ID NO: 28) and Ter-PacI-mTyr (5′-GATCGATAAAAATTAATTAA(PacI) TCACAGATGGCTCTG-3′; SEQ ID NO: 14). The PCR product was cloned into the gel-purified TK-SEL fragment of SalI/PacI digested TK-(P_{SEL})mTyr-1, using the In-Fusion PCR Cloning System (Clontech). The resulting construct TK-(P_{SEL})Tyrp1-(P_{SE})mTyr was sequence confirmed and recombined with the TK locus of GLV-1h311 (SEQ ID NO: 65) to generate GLV-1h325.

[0771] v. Tetracycline-Inducible mTyr and Tyrp1 from Single Promoter

[0772] PCR fragments mTyr-2A and E2A-Tyrp1 were amplified using Phusion High-fidelity DNA polymerase (Finnzymes). For mTyr-2A, the primers attB1-mTyr-for (SEQ ID NO: 33) and mTyr-E2A rev (SEQ ID NO: 228) were used with pENTR221-mTyr (SEQ ID NO: 8) serving as template. For E2A-Tyrp1 the template was pENTR221-TYRP1 (SEQ ID NO: 23) using the primers E2A-Tyrp1 for (SEQ ID NO: 229) and attB2-Tyrp1-rev (SEQ ID NO: 36).

[0773] The PCR fragments were digested with AatII (New England Biolabs) and subsequently ligated using T4-Ligase (New England Biolabs). The ligated fragment was gel purified and used in a BP-Clonase reaction (Invitrogen, Multisite Gateway® system) with pDONR221 (Invitrogen; SEQ ID NO: 5) to generate pENTR221-MTT2 (SEQ ID NO: 232). pENTR221-MTT2 served as template for another PCR using the primers SalI-tetO-mTyr (SEQ ID NO: 230) and Tyrp1-3 (SEQ ID NO: 22) and Accu Prime Pfx Super Mix.

[0774] The resulting PCR fragment was cloned into pCR-BluntII-TOPO (Invitrogen; SEQ ID NO: 52) resulting in pCR-BluntII-TOPO-SalI-tetO-mTyr-E2A-hTyrp1-inverse (SEQ ID NO: 233). The pCR-BluntII-TOPO-SalI-tetO-mTyr-E2A-hTyrp1-inverse vector was sequence confirmed and was digested with SalI and PacI and ligated with the TK-SL fragment of the SalI and PacI-digested TK-(P_{SL})mLIGHT1 transfer vector (SEQ ID NO: 207), resulting in TK-SL-tetO-mTyr-E2A-hTyrp1 (SEQ ID NO: 231).

### Example 3

### Construction of Modified Clonal Isolates of LIVP

[0775] LIVP clonal isolates were isolated and sequenced, as described below. The clonal isolate, LIVP 1.1.1 was then modified by homologous recombination, using the methods described in Example 2 above.

### A. Isolation of Clonal Isolates of LIVP

[0776] Isolation of clonal isolates of LIVP were generated as described in related U.S. Patent Publication No. 2012/0308484. Briefly, African green monkey kidney fibroblast CV-1 cells (ATCC No. CCL-70; American Type Culture Collection (Manassas, Va.)) were plated in a 6-well plate at 5×10⁵ cells per well and grown in Dulbecco's modified Eagle's medium (DMEM, Mediatech, Inc., Herndon, Va.) supplemented with 1% antibiotic-antimycotic solution (Mediatech, Inc., Herndon, Va.) and 10% fetal bovine serum (FBS, Mediatech, Inc., Herndon, Va.) overnight at 37° C. in a humidified incubator supplied with 5% CO₂ until cells reached 90% confluency. CV-1 cells were then infected with 10-fold serial dilutions of the vaccinia virus LIVP (a vaccinia virus strain, originally derived by adapting the Lister strain (ATCC Catalog No. VR-1549) to calf skin (Institute of Viral Preparations, Moscow, Russia, Al′tshtein et al., (1983) Dokl. Akad. Nauk USSR 285:696-699)) in duplicate. Serial dilutions were employed for infection to ensure isolation of well-separated plaques. Two days post infection, eight well-isolated plaques exhibiting a large plaque phenotype relative to the other plaques on the plate were picked. These plaques were subjected to two more rounds of plaque purification in CV-1 cells and designated as LIVP clonal isolates 1.1.1, 2.1.1, 3.1.1, 4.1.1, 5.1.1, 6.1.1, 7.1.1, and 8.1.1, respectively. LIVP 1.1.1 and 4.1.1 formed larger plaques in CV-1 cells than other isolates. The LIVP clonal isolates were then sequenced and analyzed, and the results were compared to known sequences for Vaccinia virus strains GLV-1h68, Western Reserve and Copenhagen, as described in Section B below.

### B. Sequencing Clonal Isolates of LIVP

[0777] LIVP clonal isolates 1.1.1, 2.1.1, 3.1.1, 4.1.1, 5.1.1, 6.1.1, 7.1.1, and 8.1.1 were propagated and titrated in CV-1 cell monolayers. CV-1 cells infected with LIVP clonal isolates 1.1.1, 2.1.1, 3.1.1, 4.1.1, 5.1.1, 6.1.1, 7.1.1 or 8.1.1 were harvested by centrifugation and disrupted by three cycles of freeze and thaw. Cell debris and nucleic were removed from cell lysates by low-speed centrifugation. The recovered viral particles were purified by centrifugation through sucrose cushions and sucrose gradients (20-40%) using standard protocols. Genomic viral DNA was extracted from purified virions after treatment with proteinase K and followed by phenol-chloroform extraction (see, Earl et al., in Ausubel et al., (eds) Current protocols in molecular biology, vol. 3, pages 16.17.1-16.19-7 (1998)).

[0778] The genomic DNA was sequenced by shotgun approach and assembled by AGOWA GmbH. Gap closure was performed by additional sequencing runs on the shotgun clones or by PCR using viral genomic DNA. Inverted terminal repeats were reconstructed by comparing the reverse complement sequence to the sequence, identifying identical sequences and extending the flanking sequence. The ORFs were compared to those of known Vaccinia strains GLV-1h68 (SEQ ID NO:2, GenBank Accession No. EU410304), Western Reserve (SEQ ID NO:62, GenBank Accession No. AY243312) and Copenhagen (SEQ ID NO:63, GenBank Accession No. M35027). Tables comparing the major and minor ORFs in these strains can be found in Zhang et al., Mol Genet Genomics 282:417-438 (2009). The sequence of each individual LIVP clonal isolate was aligned to the parental LIVP isolate of GLV-1h68 without the insertions (SEQ ID NO:188) using a Pairwise Sequence Alignment program available from Iowa State University (deepc2.psi.iastate.edu/aat/align/align.html; Huang, X. (1994) Computer Applications in the Biosciences 10:227-235). The alignment was computed as a “Global Alignment with GAP.” The GAP program computes an optimal global alignment of two sequences without penalizing terminal gaps. A long gap in the shorter sequence is given a constant penalty. The two sequences must be of the same type, that is, both are DNA sequences or both are protein sequences. GAP delivers the alignment in linear space, so long sequences can be aligned. The default parameters were set at “Max Match” score 10, “Min Mismatch,” score −15, “Gap-Open penalty” score 30, and “Gap-Extension penalty” Score 3.

[0779] Table 15 below sets forth the clonal isolates, including the SEQ ID NO, genome size, nucleotides corresponding to the inverted terminal repeats and percent (%) identity to the parental LIVP isolate set forth in SEQ ID NO:188. Sequencing revealed LIVP 1 isolate 3.1.1 was a mixture of at least 2 sequences.

TABLE 15
LIVP clonal isolates

| LIVP | SEQ | | | | % Identity |
|---|---|---|---|---|---|
| iso- | ID | Genome | | | to SEQ |
| late | NO | size | Left ITR | Right ITR | ID NO: 10 |
| LIVP | 188 | 190,217 | 1 . . . 10,072 | 180,096 . . . 190,167 | 100 |
| 1.1.1 | 55 | 183,369 | 1 . . . 2255 | 181,115 . . . 183,369 | 93 |
| 2.1.1 | 56 | 193,964 | 1 . . . 11,242 | 182,722 . . . 193,964 | 97 |
| 4.1.1 | 57 | 187,653 | 1 . . . 6,263 | 181,391 . . . 187,653 | 93 |
| 5.1.1 | 58 | 188,863 | 1 . . . 7,043 | 181,821 . . . 188,863 | 94 |
| 6.1.1 | 59 | 188,082 | 1 . . . 6,673 | 181,410 . . . 188,082 | 94 |
| 7.1.1 | 60 | 188,082 | 1 . . . 6,715 | 181,368 . . . 188,082 | 94 |
| 8.1.1 | 61 | 188,768 | 1 . . . 6,898 | 181,871 . . . 188,768 | 94 |

### C. Modified LIVP 1.1.1 Viruses

[0780] Exemplary recombinant LIVP 1.1.1 vaccinia viruses, set forth in Table 16 below, were generated by insertion of one or more transgenes into the thymidine kinase (TK) locus via homologous recombination, using the methods described above in Example 2. Details of the experimental procedures to generate clonal isolates and modified viruses are provided in the sections that follow. These methods can be adapted to modify any of the clonal isolates described herein to express tyrosinase and/or tyrosinase related protein-1 for production of melanin in infected cells. Also, the tyrosinase and/or tyrosinase related protein-1 encoding nucleic acid(s) can be inserted into loci other than those exemplified, particularly into any non-essential locus.

TABLE 16
Summary of modified LIVP 1.1.1 viruses

| virus | SEQ ID | parent | F14.5L | TK | HA |
|---|---|---|---|---|---|
| name | NO: | strain | locus | locus | locus |
| GLV- | 194 | LIVP | wt | (P_{SEL})FUKW | wt |
| 2b372 | | 1.1.1 | | | |
| GLV- | 198 | GLV- | wt | (P_{SEL})Tyrp1- | wt |
| 2b452 | | 2b372 | | (P_{SEL})mTyr | |
| GLV- | 199 | GLV- | wt | (P_{SE})Tyrp1- | wt |
| 2b453 | | 2b372 | | (P_{SEL})mTyr | |
| GLV- | 200 | GLV- | wt | (P_{SEL})mTyr | wt |
| 2b482 | | 2b372 | | | |

[0781] 1. Generation of GLV-2b372

[0782] GLV-2b372 was generated by modifying LIVP 1.1.1 using homologous recombination, whereby an expression cassette containing TurboFP635 (SEQ ID NO:49), encoding far-red fluorescent protein “katushka” (SEQ ID NO: 50), under the control of the vaccinia synthetic early/late (SEL) promoter was inserted at the TK locus of LIVP 1.1.1 using the methods described in Example 2B above. The genome of GLV-2b372 has the sequence of nucleotides set forth in SEQ ID NO:194. GLV-2b372 was used as the starting strain for the generation of GLV-2b452, GLV-2b453, and GLV-2b482 as described below.

[0783] 2. Generation of GLV-2b452 (SEL-Tyrp1/SEL-mTyr)

[0784] The TK-SEL-Tyrp1-SEL-mTyr (SEQ ID NO: 17) construct, generated as described in Example 2E(ii), was recombined with the TK locus of GLV-2b372 to create GLV-2b452 (SEQ ID NO: 198). GLV-2b452 expresses Tyrp1 and mTyr, each under the control of an SEL promoter.

[0785] 3. Generation of GLV-2b453 (SE-Tyrp1/SEL-mTyr)

[0786] The TK-SE-Tyrp1-SEL-mTyr (SEQ ID NO: 18) construct, generated as described in Example 2E(iii), was recombined with the TK locus of GLV-2b372 to create GLV-2b453 (SEQ ID NO: 199). Thus, GLV-2b453 expresses Tyrp 1 under the control of an SE promoter and mTyr under the control of an SEL promoter.

[0787] 4. Generation of GLV-2b482 (SEL-mTyr)

[0788] The TK-SEL-mTyr (SEQ ID NO: 13) construct, generated as described in Example 2C(ii), was recombined GLV-2b372 to exchange expression cassettes in the TK locus and create GLV-2b482 (SEQ ID NO: 200). Thus the mTyr transgene contained within GLV-2b482 is regulated by the SEL promoter.

### Example 4

### Construction of Modified Western Reserve Vaccinia Viruses

[0789] The Western Reserve (WR) vaccinia virus (ATCC Catalog No. VR-1354; GenBank Accession No.: AY243312.1; SEQ ID NO: 62) also was modified to generate virus strains that contain one or more chromophore producing enzymes. Modified WR vaccinia viruses described herein were generated by replacing nucleic acid or inserting nucleic acid in the thymidine kinase (TIC), and/or hemagglutinin (HA) gene loci in the WR genome via homologous recombination as described in Example 2. The heterologous DNA inserted was an expression cassette containing one or two genes of interest, or a reporter protein-encoding DNA, operably linked to a promoter, in the correct or reverse orientation to a vaccinia virus promoter.

[0790] Exemplary modified WR viruses are set forth in Table 17 below. Details of the experimental procedures to generate the modified viruses are provided in the sections that follow. These methods can be adapted to insert the tyrosinase and/or tyrosinase related protein-1 encoding nucleic acid into loci other than those exemplified, particularly any non-essential locus.

TABLE 17
Summary of modified WR viruses

| virus | SEQ ID | parent | F14.5L | TK | HA |
|---|---|---|---|---|---|
| name | NO: | strain | locus | locus | locus |
| GLV- | 201 | WR | wt | (P_{SL})-tetO- | wt |
| 0b348 | | | | CBG99- | |
| | | | | mRFP1 | |
| GLV- | 202 | GLV- | wt | (P_{SE})EFNA1 | wt |
| 0b358 | | 0b348 | | | |
| GLV- | 203 | GLV- | wt | (P_{SE})EFNA1 | (P_{SEL})FUKW |
| 0e365 | | 0b358 | | | |
| GLV- | 204 | GLV- | wt | (P_{SE})Tyrp1- | (P_{SEL})FUKW |
| 0e406 | | 0e365 | | (P_{SEL})mTyr | |
| GLV- | 205 | GLV- | wt | (P_{SEL})mTyr | (P_{SEL})FUKW |
| 0e407 | | 0e365 | | | |

A. Generation of the GLV-0b348 Parental Strain

[0791] GLV-0b348 was generated by replacing the TK locus of WR strain (SEQ ID NO: 62) with an expression cassette containing CBG99-2A-mRFP1 (SEQ ID NO: 44), encoding a fusion protein of a green-emitting Chroma-Luc luciferase (CBG99) linked with monomeric red fluorescent protein (mRFP) (SEQ ID NO: 43) by a “self-cleaving” 2A peptide, under the regulation of a tet operator (tetO) sequence and the vaccinia virus SL promoter. The TK-SL-tetO-CBG99-mRFP construct was generated as described in Example 2B(iv)(a). SL-tetO-CBG99-mRFP was then inserted into the TK locus of WR (SEQ ID NO: 62) from the construct by homologous recombination to generate GLV-0b348 (SEQ ID NO: 201).

B. Generation of GLV-0b358 (SE-EFNA1)

[0792] The cDNA encoding EFNA1 (Homo sapiens ephrin-A1, transcript variant 1) was PCR amplified using Human Universal QUICK-Clone II (Clontech) as the template with primers EFNA1-5 (5′-GTCGAC(Sal I) CACCATGGAGTTCCTCTGGGCCC-3′; SEQ ID NO: 217) and EFNA1-3 (5′-TTAATTAA(Pac I) TCACGGGGTTTGCAGCAGC-3′; SEQ ID NO: 218). The PCR product was gel-purified, and cloned into the pCR-Blunt H-TOPO vector using Zero Blunt TOPO PCR Cloning Kit (Invitrogen). The resulting construct pCRII-EFNA1-1 was sequence confirmed. The EFNA1 cDNA was then released from pCRII-EFNA1-1 with Sal I and Pac I, and subcloned into SacI and PacI-digested TK-SE-mLIGHT2 (SEQ ID NO: 76), placing the expression of EFNA1 under the control of vaccinia synthetic early promoter (P_{SE}). The resulting construct, TK-SE-EFNA1 (SEQ ID NO: 219) was sequence confirmed and used for homologous recombination at the TK locus of GLV-0b348 (SEQ ID NO: 201) to generate GLV-0b358 (SEQ ID NO: 202).

C. Generation of GLV-0b365 (SEL-FUKW)

[0793] The cDNA encoding TurboFP635 (Far-red fluorescent protein “katushka”) was PCR amplified using pFUKW (Dr. Marco J. Herold, University of Wurzburg) as the template with primers FUKW-5 (5′-GTCGAC(Sal I) CACCATGGTGGGTGAGGATAGCGTGC-3′; SEQ ID NO: 220) and FUKW-3 (5′-TTAATTAA(Pac I) TCAGCTGTGCCCCAGTTTGC-3′; SEQ ID NO: 221). The PCR product was gel-purified, and cloned into the pCR-Blunt II-TOPO vector using Zero Blunt TOPO PCR Cloning Kit (Invitrogen). The resulting construct pCRH-FUKW was sequence confirmed. The TurboFP635 cDNA was then released from pCRH-FUKW with Sal I and Pac I, and subcloned into HA-SL-hNIS-1 (SEQ ID NO: 225) with the same cuts, replacing the hNIS coding sequence. The resulting construct HA-SEL-FUKW4 (SEQ ID NO: 222), was sequence confirmed, and used for homologous recombination at the HA locus of GLV-0b358 (SEQ ID NO: 202) to generate GLV-0e365 (SEQ ID NO: 203).

D. Generation of GLV-0e406 (SE-Tyrp1/SEL-mTyr)

[0794] The TK-SE-Tyrp1-SEL-mTyr (SEQ ID NO: 18) construct, generated as described in Example 2E(iii), was recombined with the TK locus of GLV-0e365 (SEQ ID NO: 203) to create GLV-0e406 (SEQ ID NO: 204). GLV-0e406 expresses Tyrp1 under the control of an SE promoter and mTyr under the control of an SEL promoter.

E. Generation of GLV-0e407 (SEL-mTyr)

[0795] The TK-SEL-mTyr (SEQ ID NO: 13) construct, generated as described in Example 2C(ii), was recombined GLV-0e365 (SEQ ID NO: 203) to exchange the expression cassettes in the TK locus and create GLV-0e407 (SEQ ID NO: 205). Thus GLV-0e407 expresses mTyr under the control of the SEL promoter.

### Example 5

### Generation of PC-3 Cells Constitutively Expressing Red Fluorescent Protein (RFP)

[0796] PC-3 cells, constitutively expressing RFP were generated by stably inserting cDNA encoding monomeric red fluorescent protein (mRFP) (SEQ ID NO: 42 (cDNA); SEQ ID NO: 43 (protein)) into the PC-3 cell genome by lentiviral transduction using the ViraPower™ Lentiviral Expression System Kit (Invitrogen GmbH, Germany) in accordance with the manufacturer's instructions. The RFP gene for cloning into the lentiviral vector was obtained by PCR from the mRFP-encoding plasmid pCR-TK-(P_{SEL})mRFP (SEQ ID NO: 46) using the following primers, which contain attB recombination sites for gateway cloning: forward-attB 1-mRFP (5′-GGGGACAAGTTTGTACAAAAAAGCAGGCTGCCACCATGGCCTCCTCCG AGG-3′; SEQ ID NO: 39) and reverse-attB2-mRFP (5′-GGGGACCACTTTGTACAAGAAAGCTGGGTCAGAATTCGCCCTTTCATT AGG-3; SEQ ID NO: 40).

[0797] The PCR product was cloned into a Gateway entry vector (Invitrogen). Site-specific recombination was then carried out between the Gateway vector and the pLENTI6/V5-DEST retroviral vector (Invitrogen Cat. No. V496-10; SEQ ID NO: 4) according to the manufacturer's instructions to produce pLENTI6N5-DEST-mRFP, which contains the mRFP gene under the control of the human CMV immediate early promoter for constitutive expression. Replication-incompetent mRFP-encoding lentiviruses were produced in 293FT cells via a co-transfection of the Vira Power™ Packaging Mix and the pLENTI6/V5-DEST-mRFP expression plasmid using Lipofectamine™ 2000. After transduction of PC-3 cells with mRFP-coding Lentiviruses, stable RFP-expressing PC-3 clones were selected using 10 μg/mL blasticidin. Approximately 3 months were required for the selection of a stable PC-3-RFP cell line. Expression of RFP in the PC-3 cell line was observed in 100% of the cells as 90 days post-transduction as confirmed by observation using a fluorescent microscope equipped with the appropriate filter. PC-3 RFP cells were cultured at 37° C., 5% CO₂ in DMEM, supplemented with 10% FBS, 1% antibiotic/antimycotic solution an blasticidin (10 μg/mL).

### Example 6

### Visual and Absorbance Detection of Melanin Production in Mammalian Cells Following rVACV Infection

[0798] Tyrosinase (Tyr)- and/or tyrosinase related protein 1 (Tyrp-1)-expressing vaccinia viruses (tyr-rVACV) were used to infect mammalian cells in culture to examine production of melanin by visual inspection and measurement of optical density/absorbance of infected tumor cells in vitro.

### A. Melanin Production in A549 Lung Tumor Cells

[0799] i. In Vitro Melanin Production in A549 Cells

[0800] A549 tumor cells were seeded in T75 flasks at 5.4×10⁶ A549 cells per flask. The following day, recombinant vaccinia viruses (GLV-1h68 (control), GLV-1h322, GLV-1h324, GLV-1h326, and GLV-1h327; see Example 2) were diluted in 10 mL DMEM (without phenol red), supplemented with 2% fetal bovine serum (FBS), and the tumor cells were infected with the diluted virus, using an MOI of 1.0. After 1 h at 37° C., an additional 10 mL DMEM (without phenol red), supplemented with 20% FBS, were added to the cells followed by incubation at 37° C. for 3 days prior to harvesting.

[0801] To harvest the cells, the cell culture medium, containing any floating cells was collected in a 50 mL tube. The cells remaining in the flask were washed with 10 mL PBS which were collected and added to 50 mL tube containing the culture medium. The still remaining cells were trypsinized (using 4 mL of Trypsin/EDTA solution), collected, and then also transferred to the same 50 mL tube. 200 μL of the cell suspension were used for absorption spectra measurements, while the rest was centrifuged (1800×g, 7 min). The resultant cell pellet was resuspended in 100 μL PBS before freezing at −80° C. After thawing, 50 μL Zfix (Anatech Ltd.), a zinc formaldehyde fixative, were added to the sample. Once settled, the cells were photographed with a Panasonic DMC-FH27, or iPhone, camera for visual inspection and comparison.

[0802] The darkest pigmentation was observed in cells infected with the (P_{SE})Tyrp1/(P_{SEL})mTYR (GLV-1h324), and (P_{SEL})mTyr (GLV-1h327) vaccinia viruses. The (P_{SE})Tyrp1/(P_{SE})mTyr (GLV-1h322) virus infected cells exhibited less pigmentation than the GLV-1h324 and GLV-1h327 virus infected cells. This is likely due to the decreased expression of mTyr from the weaker SE promoter. The GLV-1h322 infected cells, however, were darker in pigmentation than the (P_{SE})mTyr alone (GLV-1h326), indicating the additional expression of (P_{SE})Tyrp1 in GLV-1h322 infected cells increased melanin production, or specifically, increased eumelanin production. No pigmentation was observed in the control GLV-1h68 infected cells.

[0803] Absorption spectra measurements were performed as described in Example 1C, in 5 nm increments from 350 to 1000 nm, using a SpectraMax M5 plate reader (Molecular Devices). Relative optical density, compared to GLV-1h68 infected cells, was calculated by dividing the absorbance data from at each wavelength by the absorbance data of GLV-1h68 at the same wavelength.

[0804] Consistent with visual observation, the results from the absorbance measurements demonstrated that infection with (P_{SE})Tyrp1/(P_{SEL})mTYR (GLV-1h324) results in the highest optical density and absorption rates over the whole measured spectrum, compared to the other virus infected samples. The relative optical density compared to GLV-1h68 infected samples also showed a strong increase in absorption for GLV-1h324 infected cells. (P_{SEL})mTyr (GLV-1h327) virus infected cells also exhibited high optical density and absorption rates, corresponding to observations made following visual inspection of the cell pellets.

[0805] ii. Melanin Production in A549 Xenografts

[0806] In a further study, melanin production was tested in A549 tumors (xenografts in live mice) infected with Western Reserve (WR)-derived vaccinia virus strains. A549 tumor xenograft tumors were developed in 6-wk-old male nude mice by implanting 5×10⁶ A549 cells in 100 μL subcutaneously in the posterior thigh of the right and left hind legs (2 tumors per mouse). 21 days after tumor cell implantation, groups of mice were injected with a single retro-orbital injection dose of 5×10⁶ plaque forming units (pfu) GLV-0e406 or GLV-0e407. At 57 days post virus injection, the mice were anesthetized and perfused with 20 or 25 mL (PBS-injected mice) PBS to wash out the blood from all organs and the tumors followed by perfusion with 10 mL Z-fix (Anatech Ltd.) fixative. Visual inspection of the A549 tumors confirmed the production of melanin by WR-derived viruses.

### B. Melanin Production in Other Cell Lines

[0807] Melanin production upon mTyr- and/or Tyrp1-expressing rVACV (i.e., GLV-1h310, GLV-1h322, GLV-1h323, GLV-1h324, GLV-1h326, GLV-1h327, GLV-1h458, GLV-1h459, GLV-2b452, GLV-2b453, GLV-2b482, GLV-0e406, GLV-0e407, GLV-1h461, GLV-1h462 and GLV-1h460) infection of CV-1 cells was assessed. Melanin production was assessed by visual inspection and comparison. Melanin production was detected from all tyrosinase encoding virus. In the case of inducible viruses (GLV-1h461, GLV-1h462 and GLV-1h460), melanin production was detected in the presence of doxycycline. In the absence of doxycycline, melanin could not be detected by the naked eye.

[0808] Melanin production also was assessed upon mTyr- and/or Tyrp1-expressing rVACV infection in sixteen (16) additional tumor cell lines, including cell lines 1858Mel (Dr. Francesco Marincola, NIH), 1936Mel (Dr. Francesco Marincola, NIH), CHAS, DU-145, FaDu, HeLa, HCT-116, HCT-15, HT-29, MCB3901 (ATCC), PC-3-RFP (see Example 5), and Ripley cells. All cells lines infected with an rVACV strain expressing mTyr with or without co-expression of Tyrp 1 produced melanin, even in melanoma cells lines that exhibit reduced, or no, melanin production on their own.

C. Melanin Production in Cells Co-Infected with Viruses that Express mTyr and Tyrp1

[0809] HeLa cells were seeded and infected with GLV-1h311 or GLV-1h354 as previously described. Following infection, the cells were then transfected with pCR-BluntII-TOPO-SalI-tetO-mTyr-E2A-hTyrp1-inverse (SEQ ID NO: 233). The following day, the transfection medium was replaced in each flask with fresh medium that was either untreated or supplemented with 1 μg/mL doxycycline. Following transfection, the cells were harvested and visually inspected for melanin production. Cells transfected with the double construct (pCR-BluntII-TOPO-SalI-tetO-mTyr-E2A-hTyrp1-inverse; SEQ ID NO: 233) expressed melanin in the presence of doxycycline.

### D. Fluorescence and Melanin Production in Cell Culture

[0810] Because several of the recombinant viruses contain the expression cassette, (P_{SEL})Ruc-GFP, within the F14.5L locus (see Example 2), in addition to the melanin producing enzyme expression cassette, GFP fluorescence also was assessed by imaging and analyzing the A549 and PC-3-RFP cell pellets in a Carestream small animal imager (Carestream; excitation 490 nm, emission 530 nm), using Carestream Molecular Imaging Second Edition software (version 5.0.6.20). The background fluorescence was subtracted and data were presented as relative fluorescent units (RFU). Melanin production significantly attenuated the fluorescent signal of GFP in the melanin-rVACV-infected cells.

[0811] In a further experiment, the RFP signal from PC-3-RFP cells, which constitutively express RFP independent of the virus, was assessed and compared to PC-3 cells, which do not express RFP. PC-3 cells were cultured in DMEM with 10% FBS, 1% antibiotic/antimycotic solution, and blasticidin (10 μg/mL). The cells were seeded the day prior to infection so that the day of infection, the cells were about 80-90% confluent. The cells were infected with GLV-1h68 (control), GLV-1h324 and GLV-1h327 viruses (MOI 0.1) and harvested by trypsinization and centrifugation as described above. The cell pellets were then imaged in a small animal imager (Carestream), using an excitation wavelength of 530 nm and an emission wavelength of 600 nm. Fluorescence signal was measured using the Carestream Molecular Imaging software. Data were presented as RFU following subtraction of background fluorescence. The fluorescence signal measured in melanin-expressing infected PC-3-RFP cells was reduced by approximately 30 fold, compared to PC-3-RFP cells infected with the GLV-1h68 control virus. The reduced signal was comparable to the autofluorescence signal of GLV-1h68-infected PC-3 control cells not expressing RFP. Melanin expression also reduced the autofluorescence signal in PC-3 cells by approximately 25 fold.

### Example 7

### Photoacoustic Imaging of Melanin-rVACV Infected Tumor Cells

[0812] Melanin-producing vaccinia viruses (melanin-rVACV), encoding mTyr, or mTyr and Tyrp1, were used to infect tumor cells, and detection of infected tumor cells was assessed, in vitro, ex vivo and in vivo, by photoacoustic imaging.

### A. In Vitro Photoacoustic Imaging of Melanin-rVACV Infected A549 Cells

[0813] A549 cells were seeded, infected with GLV-1h68 (control), GLV-1h322 ((P_{SE})Tyrp¹/(P_{SE})mTyr), GLV-1h324 ((P_{SE})TYrP1/(P_{SEL})mTyr), GLV-1h32 ((P_{SE})mTyr) or GLV-1h327 ((P_{SEL})mTyr) using an MOI of 0.1, and harvested 3 days post-infection as described in Example 6. Cell pellets were resuspended to achieve a final concentration of 1×10⁷ cells/100 μL in polyethylene PCR tubes cross-sections for the samples were imaged at multiple wavelengths, including Spectro mode, using a Vevo 2100/LAZR System (Visualsonics). Spectro mode analysis characterized the photoacoustic signal throughout the 680-970 nm range.

[0814] Spectral analysis of A549 cells infected with GLV-1h322 ((P_{SE})Tyrp1/(P_{SE})mTyr), GLV-1h324 ((P_{SE})TYrP1/(P_{SEL})mTyr), and GLV-1h327 ((P_{SEL})mTyr) showed measurable absorbance across all wavelengths. When the absorbance spectra for the melanin-rVACV infected cells were normalized based on the spectrum of control cells infected with GLV-1h68, the spectral curves of the melanin-rVACV infected cells were almost identical.

### B. Ex Vivo Photoacoustic Imaging of Melanin-rVACV Infected A549 Xenografts

[0815] A549 tumor xenograft tumors were developed in 6-wk-old male nude mice by implanting 5×10⁶ A549 cells in 100 μL subcutaneously in the posterior thigh of the right and left hind legs (2 tumors per mouse). 21 days after tumor cell implantation, groups of mice were injected with a single retro-orbital injection dose of 5×10⁶ plaque forming units (pfu) GLV-1h324 (n=5) in 100 μL PBS, or 100 μL PBS only (n=5). At 30 days post injection (PBS group) or 57 days post virus injection, the mice were anesthetized and perfused with 20 (GLV-1h324 injected mice) or 25 mL (PBS-injected mice) PBS to wash out the blood from all organs and the tumors followed by perfusion with 10 mL Z-fix (Anatech Ltd.) fixative. The tumor tissue samples were dissected and analyzed by multispectral photoacoustic imaging, using a Vevo 2100/LAZR System (Visualsonics). 2-dimensional (2D) and 3-dimensional (3D) images of the tumor tissue samples were generated at all wavelengths between 680-970 nm.

[0816] Intense absorbance was observed in the GLV-1h324-infected tumor tissue, compared with the PBS-injected control tumor at all wavelengths. Multiplexing the images for the GLV-1h324-infected tumor revealed an area with differential absorption to the dominant signal. Spectral analysis revealed that the spectral curve of the dominant signal was indistinguishable from that of GLV-1h324 infected cells from part A, above. In contrast, the region exhibiting differential absorption generated a very different spectral curve than the dominant signal.

### C. Whole Animal Photoacoustic Imaging of Melanin-rVACV Infected PC-3 RFP Xenografts

[0817] 5×10⁶ PC-3-RFP cells were subcutaneously implanted in the posterior thigh of the right hind leg of a 6-wk old male nude mouse. 29 days after tumor cell implantation, the mouse was injected with a single injection of 5×10⁶ pfu GLV-1h327 in 100 μL PBS into the retro-orbital sinus vein. At 58 days post implantation (29 days post injection), the mice were anesthetized and perfused with 20 mL PBS to wash out the blood from all organs and the tumors followed by perfusion with 10 mL Z-fix (Anatech Ltd.) fixative. The internal organs of the mouse were removed exposing the tumor and ventral cavity. While the tumor was the same color as the surrounding tissue, a black lymph node metastasis at the midline, ventral to the spine was apparent within the ventral cavity. 2D and 3D images of the tumor and the black melanin-producing metastasis were analyzed as described above in part B.

[0818] The tumor lacked photoacoustical signal, but the melanin-containing metastasis was clearly visible at all wavelengths measured. Spectral analysis of the black metastasis revealed a spectral curve that had similar absorbance characteristics as the region of the tumor tissue exhibiting differential absorption in part B above.

### Example 8

### Magnetic Resonance Imaging (MRI) of Melanin-rVACV Infected Tumor Cells

[0819] Melanin-producing vaccinia viruses (melanin-rVACV), encoding mTyr, or mTyr and Tyrp1, were used to infect tumor cells, and detection of infected tumor cells was assessed, in vitro, in vivo and ex vivo, by magnetic resonance imaging (MRI).

### A. In Vitro MRI Detection of Melanin-rVACV Infected PC-3-RFP Cells

[0820] PC-3-RFP cells were seeded in T75 flasks. The following day, the cells in two flasks per strain were infected with recombinant vaccinia viruses GLV-1h68 (control), GLV-1h322, GLV-1h324, GLV-1h326 and GLV-1h327 using an MOI of 0.1 and the procedure described in previous examples. Mock-infected cells also were used as a control. For each viral strain, one flask of cells was cultured as described above, and the other flask was supplemented with 150 μM ferric citrate.

[0821] Three (3) days after infection, the cells were harvested as described in part A above, and the concentration of cells was adjusted to 1×10⁷ cells/100 μL in PCR tubes. T1 and T2 relaxation times were measured in the small animal 7 Tesla MRI scanner (Bruker BioSpec; RARE-T1+T2-map saturation recovery TR/TE5000-200/11-99 ms). Images were acquired on a single plane, going through the center of the cell pellet.

[0822] No major difference in T1 or T2 relaxation times could be discerned between any of the unsupplemented cell samples. In marked contrast, iron supplementation significantly decreased the T1-relaxation times for melanin-expressing cells and also decreased T2-relaxation times. Further, in cells supplemented with iron, increased pigment (melanin) was strongly inversely correlated with T1 relaxation times. For example cells transfected with GLV-1h324, which produced the darkest pigment and most absorbance, exhibited the shortest T1 relaxation time. Infection with the control virus, GLV-1h68 had no effect on T1 or T2 relaxation times, compared to uninfected (mock infected) cells. The numerical results are set forth in Table 18 below.

TABLE 18
Effect of melanin production and Fe(III)-citrate supplementation on T1
and T2 relaxation times.

| | T1 tubes | | | | T2 tubes | | | |
|---|---|---|---|---|---|---|---|---|
| | | | 150 μM | | | | 150 μM | |
| | no extra Fe | | Fe(III)-citrate | | no extra Fe | | Fe(III)-citrate | |
| | average | stdev | average | stdev | average | stdev | average | stdev |
| mock | 2356.1 | 79.5 | 2204.9 | 74 | 290.5 | 20.11 | 250.33 | 11.56 |
| GLV-1h68 | 2339.7 | 121.8 | 2202.15 | 78.3 | 349.96 | 33.37 | 259.12 | 11.14 |
| GLV-1h322 | 2240.4 | 129.1 | 1750.11 | 40.7 | 375.74 | 38.99 | 223.28 | 9.63 |
| GLV-1h324 | 2166.5 | 119.5 | 1315.9 | 9.8 | 312.8 | 26.07 | 160.03 | 1.68 |
| GLV-1h326 | 2206 | 106.7 | 1540.18 | 29.5 | 351.8 | 33.43 | 198.51 | 6.29 |
| GLV-1h327 | 2189.3 | 81.6 | 1450.1 | 8.4 | 276.66 | 14.09 | 154.57 | 1.82 |

### B. Sensitivity of MRI Detection of Melanin-rVACV Infected A549 Cells

[0823] The sensitivity of MRI detection of melanin-rVACV (GLV-1h324) infected A549 cells was tested by detection of melanin-rVACV infected A549 cells, diluted among uninfected cells and also, as a function of melanin production.

[0824] i. T1 Relaxation Based on Concentration of GLV-1h324 Infected Cells

[0825] A549 cells were seeded, infected with GLV-1h324, supplemented with ferric citrate, and harvested three days after infection as described above. Serial 2-fold dilutions of infected cells in uninfected A549 cells were made up to a 1:128 dilution. The cell mixtures, containing 1×10⁷ cells in 100 μL supernatant, were placed in PCR tubes for measurement of the T1-relaxation times in a small animal 7 Tesla MRI scanner (Bruker BioSpec).

[0826] No change in T1-relaxation, compared to non-infected cells (T1=1940±11 ms), was observed when cells producing melanin were 1 in 128 (T1=1954±15 ms). However, a significant reduction in T1 relaxation could be discerned in mixtures containing melanin-producing cells diluted 1:64 (T1=1860±16 ms). The T1 relaxation times continued to decrease (correlating with increased contrast) as the proportions of GLV-1h324 infected cells increased.

[0827] ii. MRI Detection Based on Melanin Production

[0828] A549 cells were seeded, infected with GLV-1h68 (control), GLV-1h324 or GLV-1h327 using an MOI of 1.0, supplemented with ferric citrate, harvested at 24 and 48 hpi, and analyzed for T1 relaxation. T1 relaxation of the cell suspension was conducted as described above. A significant reduction in T1 relaxation was evident for all of the melanin-producing cells 24 h post infection, which was further reduced after 48 hpi.

[0829] Samples of GLV-1h68 (control) and GLV-1h324 infected A549 cells were also collected at 12 and 18 hpi. Melanin production, in harvested GLV-1h324-infected cell suspensions, was detected by visual inspection at 18 h, but not 12 h, post-infection. Correlating with visual detection of melanin production, T1 relaxation of the GLV-1h324 infected cells was significantly reduced after 18 hpi, but not at 12 hpi.

### C. In Vivo MRI Detection of Melanin-rVACV Infected A549 Tumor Xenografts

[0830] A549 tumor xenograft tumors were developed in 6-wk-old male nude mice by implanting 5×10⁶ A549 cells in 100 μL subcutaneously in the posterior thigh of the right and left hind legs (2 tumors per mouse). 21 days after tumor cell implantation, groups of mice each were injected with a single retro-orbital injection dose of 5×10⁶ pfu GLV-1h324 (n=3) or control-rVACV (n=12) (GLV-1h311 (n=4) or GLV-1h312 (n=8)) in 100 μL PBS. 38 days after virus injection, 2 live mice per group were imaged on a 7 T small animal imaging system (Bruker BioSpec). For each mouse, T1-weighted (T1W) imaging through the tumor was performed using the MSME sequence: TR=927 ms, TE=10.6 ms, NEX4, matrix 256×256 FOV 2.8 cm, slice thickness=0.5 mm, 35 slices, to obtain 3 dimensional data sets. T1 and T2 relaxation time measurements (RARE-T1+T2-map saturation recovery TR/TE5000-200/11-99 ms) were acquired on a single plane, going through the center of both tumors, with the exception of one animal in which only one tumor was imaged.

[0831] After imaging, the mice were perfused with 20 mL PBS, followed by 10 mL Zfix (AnaTech) and then frozen at −80° C. The samples were then cryosectioned, using a CM 1950 cryotome (Leica Microsystems, Wetzlar, Germany), and each section was photographed, and a z-stack of images was made to generate a 3D-reconstruction of the mouse tissue (Sarantopoulos et al., (2010) Mol Imaging Biol. 13(5):874-885). The volume viewer plug-in function in the open source ImageJ software (NIH) was used to find the slices obtained from the MR imaging results.

[0832] The T1 map results revealed significant (p<0.014, Student's-t-test) T1-relaxation time shortening for the GLV-1h324 infected tumors (1248.3±122.6 ms; n=3 tumors/2 mice) compared to the control-rVACV infected tumors (1828.4±18.5 ms; n=4 tumors/2 mice). T1-relaxation time of muscle tissue in the same mice was indistinguishable between the two groups (1706.1±6.3 ms for the GLV-1h324 group and 1709.0±23.9 ms for the control-rVACV group; n=2 for each group).

[0833] Reconstructed T1-weighted images of a GLV-1h68-infected mouse, and a GLV-1h324-infected mouse, were generated and compared. The 2 tumors were clearly visible in both images. But while tumors of the control-rVACV injected mice appeared evenly grey, the melanin-rVACV colonized A549 tumors were characterized by regions of very high contrast (almost white when using the same contrast settings as for the control mice). Color images of cryosections of the same mice, in roughly the same section imaged by MRI, revealed tumors with regions that were nearly all black in the GLV-1h324 mice, due to melanin deposition. No dark (melanin-containing) regions were observed in the control tumor. The bright regions in the MR image of the GLV-1h324 injected mouse corresponded very well with the black (melanin-rich) regions observed in the cryosections. Tumor regions of the GLV-1h324 injected mouse that appeared to not yet produce melanin at the time of the study, according to the cryosection images, showed a similar grey-level by MRI as the tumors of the control mice. Thus, infection of tumor bearing mice with GLV-1h324 resulted in melanin production, that decreased T1 relaxation time and generated melanin-specific contrast in MRI, resulting in readily visible tumors in live mice.

### D. Ex Vivo MRI Detection of Melanin-rVACV Infected A549 Tumor Xenografts

[0834] A549 tumor xenograft tumors were developed in 6-wk-old male nude mice by implanting 5×10⁶ A549 cells in 100 μL subcutaneously in the posterior thigh of the right and left hind legs (2 tumors per mouse). 21 days after tumor cell implantation, groups of mice each were injected with a single retro-orbital injection dose of 5×10⁶ pfu GLV-1h324 (n=5), GLV-1h327 (n=5), or control-GLV-1h68 (n=5) in 100 μL PBS or 100 μL PBS only (n=5). At 30 days post injection (PBS group) or 57 days post virus injection, the mice were anesthetized and perfused with 20 mL PBS to wash out the blood from all organs and the tumors followed by perfusion with 10 mL Z-fix (Anatech Ltd.) fixative. The tumors were located and analyzed by visual inspection. Melanin production was clearly visible in tumors of GLV-1h324-, and GLV-1h327-infected cells. No pigment was detected in tumors of GLV-1h68-infected cells compared to the PBS injected control tumor.

[0835] One tumor from each group was extracted and embedded into low melting agarose (2% in PBS), and the tumors were imaged together on a 7 Tesla small animal imaging system (Bruker BioSpec), using the T1W Sequence described above, and on a 3 Tesla clinical MRI-scanner (Discovery MR 750, General Electric, Milwaukee, USA) using a T1W Sequence: FRFSE, slice thickness of 1 mm, TE: 14 ms, TR: 120 ms, 3 averages, Matrix 256×256. Relaxation time measurements (RARE-T1+T2-map) were conducted in a single plane going through all tumors as described in section D above. T1 (and T2)-relaxation times were determined in the center of the tumor as well as a region in the rim of tumors. The numerical results are set forth in Table 19.

TABLE 19
T1 and T2 relaxation times for melanin-expressing tumors

| | | | | | T2 Tumors | | | |
|---|---|---|---|---|---|---|---|---|
| | T1 Tumors | | | | center | | | |
| | center | | rim | | av- | | rim | |
| | average | stdev | average | stdev | erage | stdev | average | stdev |
| mock | 1416.6 | 9.04 | 1677.7 | 12.24 | 79.01 | 0.49 | 132.97 | 1.59 |
| GLV- | 1202 | 12.77 | 1403.2 | 11.17 | 53.65 | 2.7 | 53.33 | 0.41 |
| 1h68 | | | | | | | | |
| GLV- | 1017.08 | 11.53 | 1051.36 | 23.83 | 50.8 | 0.49 | 50.97 | 1.24 |
| 1h324 | | | | | | | | |
| GLV- | 1007.6 | 10.39 | 1447.91 | 5.85 | 50.64 | 0.49 | 97.21 | 2.23 |
| 1h327 | | | | | | | | |

[0836] Expression of melanin in the melanin-rVACV-infected tumors resulted in a significant decrease in the T1-relaxation times in the center of the tumors imaged and T1- and T2-relaxation times on the rim, with the exception of the GLV-1h327-infected tumor. Notably, the chosen tumor rim region of the GLV-1h327-infected tumor did not contain visible amounts of melanin which explains the higher T1- and T2-relaxation times.

[0837] The same tumors were also imaged on a 3 Tesla clinical MRI-scanner (3 Tesla, Discovery MR 750—General Electric. Sequence: FRFSE-sequence with a slice thickness of 1 mm, TE: 14 ms, TR: 120 ms, 3 averages, Matrix 256-256; 16 bit data). Again, melanin expression greatly increased the contrast of the image.

### Example 9

### Magnetic Resonance Imaging (MRI) of Melanin-rVACV Infected Metastases

[0838] 5×10⁵ PC-3-RFP cells (described in Example 5) were implanted subcutaneously into the hind legs of athymic nude mice. 29 days after cell implantation, 5×10⁶ pfu GLV-1h68, GLV-1h324, or GLV-1h327 in 100 μL phosphate buffered saline (PBS) or 100 μL (PBS) were administered into the retro-orbital sinus vein. 14 or 20 days after virus injection, live tumor-bearing mice were imaged on a small animal 7 Tesla MRI scanner (Bruker BioSpec) as described above.

[0839] After MR imaging, the mice were perfused with 20 mL PBS, followed by 10 mL Zfix (AnaTech). After perfusion, the internal organs were removed, and pictures were taken of the ventral cavities. The mice were then decalcified (5 days in Z-fix with 10% formic acid at 4° C. with daily changes of the solution), dehydrated, embedded in paraffin and sectioned in 10 μm slices. Paraffin sections, within 100 μm, were transferred to glass slides and stained with a) hematoxylin (Vector Laboratories) and eosin (Carl-Roth GmbH+Co KG), b) hematoxylin and an anti-rVACV staining (rabbit anti-vaccinia A27L primary antibody detected by ImmPRESS™ Reagent (HRP) Anti-Rabbit stained with ImmPACT™ AMEC Red Peroxidase staining solution by Vector Laboratories), c) the anti-rVACV staining only, or d) no staining with the brown melanin providing the only contrast. The specimens were then examined with a stereo-fluorescence microscope (MZ16 FA; Leica) equipped with a digital CCD camera (DC500, Leica) and the Leica IM1000 4.0 software (1300×1030 pixel RGB-color images). Higher magnification images were obtained using an Axiovert 200M microscope equipped with a digital AxioCam MRc5 (Zeiss) and Axiovision 4.5 software (1293×968 fast bin 2×2 color, RGB-color imaged). All stainings were visualized using white light. Digital images were processed with Photoshop 7.0 (Adobe Systems).

[0840] The MR images revealed large tumors and lymph node (LN) metastases. The metastases were preferentially infected by the rVACV. The lymph node metastases of PBS or control-rVACV injected mice had similar grey levels as the primary tumor. The mouse injected with melanin-rVACV, GLV-1h324, had one LN metastasis (LN1) that was similar in color to the primary tumor and another LN metastasis (LN2) in same region that was much brighter than the tumor (and LN1). Following perfusion and dissection of the melanin-rVACV injected mouse, melanin production in LN2 was clearly visible. Lymph vessels, filled with melanin-containing cancer cells, were also apparent. An overlay of images from paraffin-embedded sections and MR images demonstrated that the bright regions in the lymph node metastases co-localized with melanin expression. Results from the animals injected with the other melanin-rVACVs were similar to those observed for GLV-1h324. Immunohistochemical analysis confirmed the presence of rVACV in the lymph node metastases, demonstrating that melanin was actually produced intracellularly in the metastasized lymph nodes and vessels and not transported into these structures from the primary tumor. Stained images also revealed a higher amount of necrotic and dead cells in the virus-infected LN metastases compared to those of the PBS control LNs.

### Example 10

### Multispectral Optoacoustic Tomography (MSOT) of Melanin-rVACV Infected Tumor Cells

[0841] Given the optical absorption of melanin in the near infrared, optoacoustic imaging, was used to assess detection and visualization of melanin-producing cells. Multispectral optoacoustic tomographic (MSOT) imaging was used to detect melanin-containing tumors and metastases in live mice, using a melanin-specific algorithm developed for this purpose.

### A. Analysis of Optoacoustic Signal

[0842] Optoacoustic images of melanin-rVACV infected cells were analyzed in cell culture to evaluate the relative optoacoustic signal of the different melanin-rVACV strains, the time course of signal detection following melanin-rVACV infection, and the sensitivity of the optoacoustic signal.

[0843] i. Quantitative Optoacoustic Signals for Melanin-rVACV Infected cells

[0844] PC-3-RFP and A549 cells were mock infected or infected with GLV-1h68 (control), GLV-1h322, GLV-1h324, GLV-1h326, or GLV-1h327 as described in previous Examples. Three days after infection, harvested cell suspensions containing approximately 10⁷ cells in 100 μL PBS were added to 0.2 mL PCR-tubes and pelleted by centrifugation. The cell pellet-containing vials were placed in the center of the field of view of the MSOT imaging system in a Vision128 small animal imaging system (iThera Medical GmbH, Neuherberg, Germany) with a resolution of 150 μm in the imaging plane. Short laser pulses in the nanosecond range with variable wavelengths in the near infrared optical window were generated by a wavelength-tunable Nd:YAG pumped optical parametric oscillator (OPO) laser for illumination, while an arc shape tomographic ultrasound detector array with 128 elements (coverage: 270°, central frequency: 5 MHz, bandwidth: 55%) acquired acoustic signals in the μV range that were converted to digital values with 12 bit accuracy. The transducers were focused cylindrically to collect signals only from a selected imaging plane. The subject was translated perpendicular to the imaging plane to acquire images from multiple positions.

[0845] A vial containing black India ink solution was placed adjacent to the experimental samples within the MSOT imaging system. The known optical properties (μₐ=0.5 and 1 cm⁻¹, μ′ₛ=10 cm⁻¹) of the black India ink solution were used for normalization and absolute quantification of the absorption by cells. The vials were imaged in the 690-900 nm range averaging 30 acquisitions and the absorption of the cells was determined by normalizing the pixel intensities of the reconstructed images to the ink solution and subtracting background signals.

[0846] Mock and GLV-1h68 (control)-infected cells registered no optoacoustic signal. GLV-1h324 and GLV-1h327 exhibited the highest optoacoustic signal and GLV-1h322 and GLV-1h326 exhibited intermediate signal levels. The optoacoustic signals produced by Melanin-rVACV infected cells were in the near infrared range and were equivalent to the optical absorption of up to 2 cm⁻¹, which were an order of magnitude above the 0.3-0.5 cm⁻¹ tissue optical absorption in near infrared and are comparable with the 2 cm⁻¹ absorption of whole blood. These resulted confirmed there was a sufficient signal to background ratio for detection of melanin-producing cells.

[0847] ii. Time Course of Optoacoustic Signal Following Infection

[0848] A549 cells were seeded, infected with GLV-1h68 (control) or GLV-1h324 using an MOI of 1.0 as described above. The infected cells were harvested at 7.5, 12, 18, and 24 hours post infection (hpi) and analyzed by MSOT, as described in part A(i) above. Almost no optoacoustic signal was detected for GLV-1h68 (control)-infected cells at any time point. Minimal melanin-specific optoacoustic signal was detected in GLV-1h324-infected cells until 18 hpi, when a significant increase in signal was observed. By 24 hpi, the optoacoustic signal for GLV-1h324-infected cells increased, relative to the signal at 18 hpi, by approximately 3-fold.

[0849] iii. Sensitivity of Optoacoustic Signal

[0850] A549 cells were seeded, infected with GLV-1h324, and harvested three days after infection as described above. Serial 2-fold dilutions of infected cells in uninfected A549 cells were made up to a 1:128 dilution. The cell mixtures, containing 1×10⁷ cells in 100 μL supernatant, were placed in PCR tubes for MSOT analysis, as described in part A(i) above. Even at the lowest concentration of infected cells (1 infected cell in 128 total cells), an optoacoustic signal was detected that was significantly higher than that of control cells. The melanin signal increased asymptotically with increasing percentages of infected cells.

### B. Generation of Melanin-Specific Algorithm

[0851] PC-3-RFP tumors and lymph node metastases were generated in live mice and infected with GLV-1h68 (control) or melanin-producing GLV-1h324 as described in Example 9 above. 14 days after rVACV injection, images of the animals were acquired using the Vision 128 small animal imaging system (iThera Medical GmbH, Neuherberg, Germany) described in part A, above. Inside the imaging system, the animal was mounted in a holder and submerged in a water bath to facilitate acoustic coupling between the tissue and the detector. To prevent drowning, the mouse was wrapped with a thin polyethylene membrane while gas anesthesia using isoflurane was supplied through a breathing mask. Images were acquired at 11 wavelengths in 15 nm intervals from 700 nm to 850 nm. For each position and wavelength, 25 acquisitions were averaged, resulting in a total acquisition time of 2.5 seconds per individual image. Tomographic reconstruction algorithms that modeled detector geometry (see Rosenthal et al., (2010) IEEE Trans Med Imaging. 29(6), 1275-1285) were used to produce an accurate image of the acoustic pressure distribution map inside the animal.

[0852] After image reconstruction, linear spectral unmixing was applied to resolve melanin-specific signals. The melanin-specific signal was determined by multispectral processing by way of independent component analysis (Glatz et al., (2011) Opt Express 19(4): 3175-3184). For each pixel in the image, the total measured optoacoustic spectrum was fit to the known absorption spectra profiles of melanin and oxy- and deoxyhemoglobin, which were assumed to be the greatest absorbers in the tissue. The melanin-specific signal distribution was determined by subtracting the background signals of deoxygenated and oxygenated hemoglobin from the melanin signal. In order to retrieve reproducible results, the method was calibrated on a positive cross-section image using literature values for the absorption profiles of melanin and hemoglobin. The resulting optimized unmixing matrix was then saved and re-applied for all other datasets to create reproducible results. Cryosections, as described above, were obtained from approximately the same plane as was imaged to validate the results.

### C. Detection of Melanin Production in Tumors by Multispectral Optoacoustic Imaging In Vivo

[0853] The algorithm developed in part B above was used to specifically visualize the presence and distribution of melanin, produced from melanin-rVACV, in live mice using MSOT.

[0854] i. Imaging Superficial A549 Tumors

[0855] A549 cells were cultured and injected into the hind legs of 6-wk old male nude mice as described in Example 7B. 21 days after tumor cell implantation, groups of mice each were injected with a single retro-orbital injection dose of 5×10⁶ pfu GLV-1h324 (n=2) or control-rVACV, GLV-1h68 (n=1), in 100 μL PBS. Approximately 4 weeks post virus injection, live mice from control and melanin-rVACV groups were imaged by MSOT, using the melanin-specific algorithm and parameters described in part B.

[0856] As expected, control-rVACV injected mice did not produce a melanin signal. In contrast, the melanin-expressing tumor was easily detected above the background signal. Although melanin was produced throughout the tumor in the melanin-rVACV injected mouse, the optoacoustic melanin signal was only detected at the rim of the tumor mass. This is probably due to the strong absorption of the excitation and emission light, preventing deeper penetration into the tumor. Cryosections (procedure described above) taken from approximately the same plane as were imaged by MSOT were inspected to confirm the localization of the melanin.

[0857] ii. Imaging PC-3-RFP Lymph Node Metastases

[0858] PC-3-RFP tumors and metastases were generated in athymic nude mice, and infected with control rVACV (GLV-1h68; n=2) or melanin-rVACV (GLV-1h324; n=3) as described in Example 9. The live mice were subjected to MSOT, as described in part C(i) above, 2 or 3 weeks after virus infection, and the images were processed using the melanin-specific algorithm, described in part B.

[0859] The average signal intensity was calculated for each tumor or lymph node metastasis (LN) emitting a melanin-specific signal >1. The mean melanin signal intensities were significantly greater in the melanin-rVACV injected animals than in controls. In addition to increased mean intensities, the area containing signals with melanin signature was much greater in the melanin-rVACV injected mice than in controls, and regions of high intensity were only detected in the melanin-rVACV injected mice.

[0860] Cryosections of the regions corresponding to the images taken were inspected and compared to the MSOT images. Large tumors and lymph node metastases were observed in the cryosections. Consistent with previous observations, the cryosections of the melanin-rVACV injected animals revealed strong melanin expression throughout the lymph node metastases generated by the PC-3-RFP cells and puncta of melanin expression within the tumors, indicating preferential viral colonization of the metastases over the primary tumor. The regions of high intensity in the MSOT images correlated with the distribution of melanin in the lymph node metastases and the tumor in corresponding cryosections. The melanin-specific signals detected in tumors and lymph node metastases (LN1 and LN2) in the melanin-rVACV injected mice indicated that MSOT was capable of detecting the presence and distribution of deeply internal melanin-expressing entities, in addition to superficial tumors containing melanin, as observed in part C(i) above.

### Example 11

### Effect of Melanin Production on Vaccinia Virus Replication and Cell Toxicity

[0861] The influence of melanin production on viral replication and virus-mediated cell lysis was determined by measuring the activity of the virus-encoded beta glucuronidase activity in cell lysates and the cell culture supernatant, respectively (Hess et al., J. Transl Med. 2011; 9:172). Cell-associated glucuronidase reflects virus-mediated protein expression which correlates with virus replication. Glucuronidase is not secreted by the cells, and therefore, glucuronidase in the cell culture supernatant is reflective of cell toxicity as a result of virus mediated lysis of the tumor cells. Cell toxicity was also measured by MTT assay.

[0862] 1×10⁵ PC-3-RFP cells were seeded in 24-well plates and infected the following day with recombinant vaccinia viruses (GLV-1h68 (control), GLV-1h322, GLV-1h324, GLV-1h326, and GLV-1h327), as described in Example 6, using an MOI of 0.005. Media and infected cells were harvested from the wells at 10, 24, 48 and 72 hours post virus infection (hpi). The samples of cells and medium were frozen at −80° C. The cell samples were thawed and resuspended in 1 mL PBS with 1% FBS and 0.1% Triton X-100: 5 μL of each sample were analyzed for glucuronidase activity by detecting cleavage of the 4-MUG substrate to generate the fluorescent compound 4-MU, as described in Hess et al., J. Transl Med. 2011; 9:172.

[0863] Up to 24 hpi, all cell samples exhibited similar levels of glucuronidase activity. At 48 and 72 hpi, a decrease in glucuronidase activity was observed in cells infected with strong melanin producing rVACV (i.e., (P_{SE})Tyrp1/(P_{SEL})mTYR (GLV-1h324), and (P_{SEL})mTyr (GLV-1h327)), indicating decreased viral replication. The viral replication was not affected in PC-3-RFP infected with rVACV which expressed no or low levels of melanin. In contrast, the amount of released glucuronidase in the supernatant of rVACV-infected cells increased at each time point measured and the toxicities observed were similar at all time points among all viruses tested.

[0864] Similar results were observed when cell viability was measured by an MTT assay (Sigma Aldrich), using 2.5 mg MTT (3-(4,5-Dimethylthiazol-2-yl)-2,5-diphenyltetrazolium bromide)/mL DMEM, without phenol red, according to the manufacturer's instructions. Virus-infected cells exhibited decreased cell viability over time, but the rate of cell toxicity was independent of melanin expression levels.

### Example 12

### Oncolytic Activity of Melanin-rVACV

[0865] Tumor regression was measured to assess the oncolytic activity of melanin-rVACV. 5×10⁶ A549 cells were implanted subcutaneously into athymic nude mice (n=5). When the tumors reached approximately 300 mm³, 5×10⁶ pfu GLV-1h68 (control), GLV-1h324, or GLV-1h327 resuspended in 100 μL PBS, or 100 μL PBS only, were injected into the retro-orbital sinus vein. Tumor growth was monitored weekly. At the end of the experiment (5 weeks for PBS control mice, 8 weeks for rVACV-injected mice), the tumors were isolated form perfused mice and cut open to confirm the production of melanin in the melanin-rVACV-colonized tumors. Net body weight (i.e., tumor weight subtracted from the whole body weight) at the end of the study also was measured as a marker for “well being.”

[0866] Melanin-rVACV injected mice exhibited oncolytic activity, but the tumor regression was decelerated compared to the control rVACV strain, GLV-1h68. Net body weight of the melanin-rVACV injected animals was somewhat higher than those injected with the control strain, although the variability was high. Analyses of isolated tumor tissues from perfused mice at the end of the experiments clearly demonstrated that melanin-rVACV colonized tumors, in contrast to controls, produced so much melanin that they appeared coal-black.

### Example 13

### Laser-Induced Heat Therapy of Melanin-rVACV Infected Cells

[0867] A549 cells, approximately 50% confluent in T225-flasks, were infected with 5×10⁶ pfu (MOI 0.1) of GLV-1h68, GLV-1h324, or GLV-1h327. Three days later, cells were harvested by trypsinization and centrifugation at 1800×g for 5 min. The cell pellets were resuspended in 350 μL PBS and frozen at −80° C. before further use. After thawing, 250 μL of the cell suspension were transferred to a 1.5 mL reagent tube and placed in front of a 808 nm laser (MDL-III-808 with PSU-III-LED power supply; 2.00 Watt; Opto Engine LLC). The temperature of the cell suspension was measured by placing an AllTemp™ Infrared digital thermometer (Franmara) at the top of the tube, approximately 26 mm from the cell suspension surface before exposure (0 s), every 10 seconds (from 10 to 180 s), and at 300 s after placing the tube in front of the laser. The temperature was measured in ° F., which was converted to ° C. The results are set forth in Table 20.

TABLE 20
Temperature of rVACV infected cell suspensions were exposed to 808 nm
laser light

Temperature

| | | | | | |
|---|---|---|---|---|---|
| ° F. | ° C. | ° F. | ° C. | ° F. | ° C. |

| | | | |
|---|---|---|---|
| time (s) | GLV-1h68 | GLV-1h324 | GLV-1h327 |

| | | | | | | |
|---|---|---|---|---|---|---|
| 0 | 80.4 | 26.9 | 77.6 | 25.3 | 78.7 | 25.9 |
| 10 | 87.9 | 31.1 | 79.3 | 26.3 | 81.6 | 27.6 |
| 20 | 87.3 | 30.7 | 81 | 27.2 | 83.4 | 28.6 |
| 30 | 87.2 | 30.7 | 83.3 | 28.5 | 85.3 | 29.6 |
| 40 | 87.6 | 30.9 | 86.2 | 30.1 | 87.6 | 30.9 |
| 50 | 87.7 | 30.9 | 89.4 | 31.9 | 90.3 | 32.4 |
| 60 | 88 | 31.1 | 92.5 | 33.6 | 92.8 | 33.8 |
| 70 | 88 | 31.1 | 96 | 35.6 | 95.6 | 35.3 |
| 80 | 88 | 31.1 | 99.6 | 37.6 | 98.3 | 36.8 |
| 90 | 88.3 | 31.3 | 103.2 | 39.6 | 100.7 | 38.2 |
| 100 | 88.3 | 31.3 | 106.4 | 41.3 | 103.5 | 39.7 |
| 110 | 88.3 | 31.3 | 111.3 | 44.1 | 106.3 | 41.3 |
| 120 | 88.8 | 31.6 | 116.1 | 46.7 | 109.3 | 42.9 |
| 130 | 88.8 | 31.6 | 118.8 | 48.2 | 111.9 | 44.4 |
| 140 | 89.1 | 31.7 | 121.9 | 49.9 | 114.6 | 45.9 |
| 150 | 89 | 31.7 | 126.5 | 52.5 | 116.8 | 47.1 |
| 160 | 89.1 | 31.7 | 129.4 | 54.1 | 122.4 | 50.2 |
| 170 | 89.3 | 31.8 | 130.6 | 54.8 | 122.4 | 50.2 |
| 180 | 89.4 | 31.9 | 132.7 | 55.9 | 128.9 | 53.8 |
| 300 | 89 | 31.7 | 150.2 | 65.7 | 143.1 | 61.7 |

[0868] The temperature of the GLV-1h68 infected cells increased by a few degrees, which may have in part been due to handling of the tube with warm fingers. In contrast, the temperature of the melanin producing cell suspension increased dramatically. For example, the GLV-1h324 injected cells increased by 40.3° C. by 300 s of exposure, resulting in a temperature higher than 65° C.

### Example 14

### Toxicity Caused by Laser-Induced Heat Therapy of Melanin-rVACV Infected Cells

[0869] Frozen cell pellets of mock, GLV-1h68, GLV-1h324, or GLV-1h327 infected A549 cells were generated as described in Example 13. After thawing, the cell pellets were resuspended in 350 μL DMEM medium, without phenol red. From each cell suspension, three aliquots of 100 μL were transferred to 1.5 mL reaction tubes. The tubes were exposed to the 808 nm laser light (MDL-III-808 with PSU-III-LED power supply; 2.00 Watt; Opto Engine LLC) for 60 s, 120 s, or not exposed, but otherwise handled exactly as the other tubes. The temperature of the cell suspensions was measured immediately after treatment by touching the thermometer to the tube next to the cell suspension. Following the temperature measurement 100 μL DMEM medium (without phenol red) and 2-fold serial dilutions in DMEM, in final volumes of 100 μL, were assayed for cell viability using an XTT Cell Proliferation Kit II (Roche; Cat. #11 465 015 001). 50 μL of the pre-mixed cell proliferation kit solution (98% solution 1, 2% solution 2) were added to each dilution, and mixed. After 4 hours incubation at 37° C. in a humidified 5% CO₂ atmosphere, the samples were centrifuged at 13,000 rpm for 1 min, and 100 μL supernatant were transferred to a 96-well plate to determine the optical density at 450 nm and 700 nm. A blank, containing 100 L from a mix of 100 μL DMEM and 50 μL pre-mixed cell proliferation kit solution, that was co-incubated with the other samples, was subtracted from all measurements. The relative survival was calculated as the average of the first 4 dilutions having an optical density (O.D. at 450 nm minus O.D. at 700 nm) >0.4, divided by the average optical density of the non-laser exposed samples.

[0870] Exposure to the 808 nm laser light had little effect on the temperature of mock or GLV-1h68 infected cells, raising the temperature about 3° C. after 2 minutes of exposure. In contrast, suspensions of cells infected with melanin-rVACVs exhibited an increase in temperature that correlated exposure time. The temperature of GLV-1h327 infected cells increased by 35° C., and GLV-1h324 infected cells increased by 41° C., following 2 minutes of laser treatment, resulting in a final temperature that was greater than 65° C.

[0871] Elevated temperatures correlated with reduced viability in the melanin-rVACV infected cells. After 120 s exposure to the 808 nm laser, survival of GLV-1h327 infected cells was reduced to approximately 60% (p<0.05 by statistical T-test) and survival of GLV-1h324-infected cells was approximately 5% (p<0.0001). Thus exposure to a near infrared laser results in specific hyperthermia, resulting in the death, of melanin-producing cells.

### Example 15

### Laser-Induced Heat Therapy of Melanin-rVACV Infected Tumors

[0872] Laser induced hyperthermia treatment was tested in mice that had GLV-1h68 or GLV-1h324 colonized A549 tumors. GLV-1h68 or GLV-1h324 colonized A549 tumors were generated in 6 wk old male nude mice as described in Example 7C. 50 days post tumor cell implantation and 36 days post virus injection, the tumors were exposed to external laser light (MDL-III-808 with PSU-III-LED power supply; 2.00 Watt; Opto Engine LLC; n=4 animals for each virus strain group) for 120 s or not exposed to laser light (n=5 for each virus strain group). The tumor volume was measured immediately before laser treatment and on days 1 and 5 following laser treatment. Observations were also recorded immediately following laser treatment and on days 1 and 5 post laser treatment.

[0873] The control group of mice, containing GLV-1h68-colonized tumors, were unaffected by laser treatment, with the exception of 1 mouse which experienced some minor skin damage 1 day after laser treatment. Immediately after treatment, the skin above the laser-exposed section of the tumor became discolored in all mice within the group containing GLV-1h324-colonized tumors. The day after the laser treatment, the discolored skin became necrotic. There was no difference in tumor volume between the laser-treated and untreated animals of the GLV-1h68 control group at any time point. A highly variable, but slightly reduced tumor volume, compared to the tumor volume immediately before GLV-1h68 infection was measured in both laser-treated and untreated animals.

[0874] The tumor volumes of the GLV-1h324-infected animals, measured 1 and 5 days after laser treatment, demonstrated that laser treatment of melanin-producing tumors significantly reduced tumor size. The tumor volume of laser-treated GLV-1h324-infected animals decreased by approximately 20% by day 1 which was slightly further reduced by day 5, compared to the tumor volume measured immediately prior to infection. In the absence of laser treatment, the tumor volume of the GLV-1h324-infected animals increased by slightly less than 25% by day 1 and by about 25% by day 5. The difference between laser-treated and untreated GLV-1h324-infected animals was significant on day 1 (p<0.05) and even more so by day 5 (p<0.005).

[0875] In a further study, 1×10⁵ B16F10 melanoma cells, which express melanin, were implanted subcutaneously into athymic nude mice. Three days post tumor cell implantation, the tumor diameter was approximately 2-3 mm, and the implanted tumors were subjected to laser treatment (MDL-III-808 with PSU-III-LED power supply; 2.00 Watt; Opto Engine LLC). Five days later, the volume of the laser treated and untreated B16F10 tumors was determined (n=5 for each group). Results from this study were consistent with the previous study in that the laser treated melanin-producing tumors decreased in size following laser treatment. These results demonstrate that near-infrared lasers can be used for hyperthermia therapy to reduce the size of tumors expressing melanin “naturally” or by way of melanin-rVACV infection.

[0876] Since modifications will be apparent to those of skill in this art, it is intended that this invention be limited only by the scope of the appended claims.

1. A method of killing or inhibiting growth or proliferation of cells, which are involved in a disease, by an energy-absorbing therapy, comprising:
a) administering a nucleic acid molecule encoding a chromophore-producing enzyme(s) to a subject, wherein:
the nucleic acid molecule is directed to or localized to cells in the subject that are involved in the disease process, whereby the chromophore is expressed in the cells in the subject; and
expression of the encoded chromophore-producing enzyme produces a chromophore product in the cell in the subject into which cell the nucleic acid molecule is delivered; and
b) exposing the subject or cells in the subject to an energy source that is absorbed by the chromophore product to effect local production of heat and/or toxic chemicals in the cells that express the chromophore, thereby killing the cells or inhibiting the proliferation of the cells, thereby effecting treatment of the disease.

2. The method of claim 1, wherein the nucleic acid molecule is heterologous to the cell to which the nucleic acid is directed or localized.

3. The method of claim 1, wherein the cell involved in the disease to which the nucleic acid is directed or localized is a not a melanoma cell.

4. The method of claim 1, wherein the disease is one or more of a proliferative disease or disorder, an inflammatory disease or an immune-mediated disease.

5. The method of claim 1, wherein the disease is a myeloproliferative disease, a lymphoproliferative disease, or a solid tumor disease.

6. The method of claim 4, wherein the disease is a proliferative disorder that is a tumor or a metastasis.

7. The method of claim 1, wherein the cell is a tumor cell that is a solid tumor cell, a circulating tumor cell or a metastatic cell.

8. The method of claim 1, wherein the nucleic acid encoding the chromophore-producing enzyme(s) is operatively inserted into a vector for expression in the cell.

9. The method of claim 8, wherein the vector is a viral vector or a non-viral vector.

10. The method of claim 9 wherein the vector is a viral vector that is an oncolytic virus that accumulates in tumor cells.

11. The method of claim 10, wherein the oncolytic virus is selected from among a Newcastle Disease virus, parvovirus, vaccinia virus, measles virus, reovirus, vesicular stomatitis virus (VSV), oncolytic adenoviruses, poliovirus and herpes viruses, or a derivative thereof that is modified to contain nucleic acid encoding a heterologous gene product.

12. The method of claim 11, wherein the virus is a vaccinia virus selected from among Lister, Western Reserve (WR), Copenhagen (Cop), Bern, Paris, Tashkent, Tian Tan, Wyeth (DRYVAX), IHD-J, IHD-W, Brighton, Ankara, CVA382, Modified Vaccinia Ankara (MVA), Dairen I, LC16m8, LC16M0, LIVP, ACAM2000, WR 65-16, Connaught, New York City Board of Health (NYCBH), EM-63 and NYVAC strains.

13. The method of claim 12, wherein the vaccinia virus is a Lister strain virus.

14. The method of any of claim 13, wherein the vaccinia virus is an LIVP virus or derivative thereof.

15. The method of claim 14, wherein the LIVP virus or derivative thereof comprises a sequence of nucleotides set forth in SEQ ID NO:1 or 188, or a sequence of nucleotides that has at least 85% sequence identity to SEQ ID NO:1 or 188.

16. The method of claim 10, wherein the oncolytic virus comprises nucleic acid encoding an additional heterologous gene product.

17. The method of claim 16, wherein the heterologous gene product is a therapeutic and/or a reporter gene product.

18. The method of claim 1, wherein the nucleic acid molecule is operatively inserted for expression in a cell into a non-viral vector.

19. The method of claim 18, wherein the non-viral vector is selected from among a plasmid, cosmid, minicircle and artificial chromosome.

20. The method of claim 1, wherein expression of the encoded chromophore-producing enzyme produces melanin and/or precursors of melanin.

21. The method of claim 20, wherein the melanin comprises eumelanin and/or pheomelanin.

22. The method of claim 1, wherein the nucleic acid molecule encodes a chromophore-producing enzyme that is a tyrosinase, enzymatically active portion thereof or an enzymatically active variant thereof that catalyzes production of a melanin.

23. The method of claim 22, wherein the nucleic acid molecule encodes a tyrosinase enzyme having the sequence of amino acids set forth in any of SEQ ID NOS: 7, 81, 82, 84, 85, 87, 89, 91, 93, 95, 97, 99, 101, 103, 105, 107, 109, 111, 113, 115, or 117, or a mature form thereof lacking the signal sequence or a sequence of amino acids that exhibits at least 75% sequence identity to any of SEQ ID NOS: 7, 81, 82, 84, 85, 87, 89, 91, 93, 95, 97, 99, 101, 103, 105, 107, 109, 111, 113, 115, or 117, or a mature form thereof lacking the signal sequence.

24. The method of claim 1, wherein:
the nucleic acid molecule encodes a tyrosinase having the sequence of amino acids set forth in SEQ ID NO: 7, 81, 82 or 84, or a sequence of amino acids that exhibits at least 75% sequence identity to any of SEQ ID NO: 7, 81, 82 or 84; or
the nucleic acid molecule comprises the sequence of nucleotides set forth in SEQ ID NO: 6, 80 or 83, or a sequence of nucleotides that exhibits at least 75% sequence identity to any of SEQ ID NOS: 6, 80 or 83.

25. The method of claim 22, wherein the nucleic acid molecule encoding the tyrosinase also encodes a chromophore-producing enzyme that is a tyrosinase-related protein 1 (TRP-1) and/or a dopachrome tautomerase (DCT), or an enzymatically active portion thereof or an enzymatically active variant thereof.

26. The method of claim 1, wherein the nucleic acid encodes a chromophore-producing enzyme that is a tyrosinase or enzymatically active portion thereof or enzymatically active variant thereof and a tyrosinase-related protein 1 or enzymatically active portion thereof or enzymatically active variant thereof.

27. The method of claim 26, wherein the nucleic acid molecule encodes a TRP-1 enzyme having the sequence of amino acids set forth in any of SEQ ID NOS: 20, 120, 121, 123, 124, 126, 127, 129, 131, 133, 135, 137, 139, 141, 142 or 144, or a mature form thereof lacking the signal sequence, or a sequence of amino acids that exhibits at least 75% or more sequence identity to any of SEQ ID NOS: 20, 120, 121, 123, 124, 126, 127, 129, 131, 133, 135, 137, 139, 141, 142 or 144 or the mature form thereof lacking the signal sequence

28. The method of claim 1, wherein:
the subject is exposed to the energy source a predetermined time for expression of the nucleic acid in the cell after administration of the nucleic acid molecule encoding the chromophore-producing enzyme(s); and
the predetermined time is sufficient for the nucleic acid molecule to express the chromophore-producing enzyme(s) in a cell in the subject and produce the chromophore product in the cell.

29. The method of claim 1, wherein the energy source is selected from among chemical energy, electric energy, radiant energy, electromagnetic energy, microwave energy, nuclear energy, magnetic energy, elastic energy, sound energy, mechanical energy and luminous energy.

30. The method of claim 1, wherein the energy is applied externally to an area of the subject to be treated.

31. The method of claim 1, wherein the energy source is applied internally directly to a tissue or cell or organ in the subject.

32. The method of claim 31, wherein the energy source is applied directly to an internal tumor or metastasis.

33. The method of claim 1, wherein the energy source is electromagnetic energy applied to effect photothermal therapy or photodynamic therapy.

34. The method of claim 1, wherein the nucleic acid molecule is administered intravenously, intraarterially, intratumorally, endoscopically, intralesionally, intramuscularly, intradermally, intraperitoneally, intravesicularly, intraarticularly, intrapleurally, percutaneously, subcutaneously, orally, parenterally, intranasally, intratracheally, by inhalation, intracranially, intraprostaticaly, intravitreally, topically, ocularly, vaginally, or rectally.

35. The method of claim 1, wherein the nucleic acid molecule is administered intravenously.

36. The method of claim 1, wherein the nucleic acid molecule is administered locally inside a body cavity.

37. The method of claim 1, wherein the subject is a human or is a non-human animal.

38. The method of claim 1, that comprises a method of diagnosis, wherein the nucleic acid molecule encoding a chromophore-producing enzyme is administered to the subject and the method of diagnosing the subject comprises detecting the chromophore-product in the subject to diagnose a tumor and/or a metastasis.

39. A vaccina virus, comprising a sequence of nucleotides encoding a tyrosinase or an enzymatically active portion, or an enzymatically active variant, of the enzyme operatively linked to a strong promoter.

40. The vaccinia virus of claim 39 that is selected from among Lister, Western Reserve (WR), Copenhagen (Cop), Bern, Paris, Tashkent, Tian Tan, Wyeth (DRYVAX), IHD-J, IHD-W, Brighton, Ankara, CVA382, Modified Vaccinia Ankara (MVA), Dairen I, LC16m8, LC16M0, LIVP, ACAM2000, WR 65-16, Connaught, New York City Board of Health (NYCBH), EM-63 and NYVAC strain.

41. The vaccinia virus of claim 39, wherein the vaccinia virus is a Lister strain virus.

42. The vaccinia virus of claim 39 that is an LIVP virus or a clonal strain thereof.

43. The vaccinia virus of claim 39, wherein the promoter is selected from among adenoviral major late promoter, vaccinia synthetic early-late promoter (P_{SEL}), vaccinia synthetic late promoter (P_{SL}), simian virus 40 (SV40) promoter, cytomegalovirus (CMV) promoter, respiratory syncytial virus (RSV) promoter, human elongation factor 1α-subunit (EF1-1α) promoter, a ubiquitin C promoter (Ubc), a phosphoglycerate kinase-1 (PGK) promoter, small nuclear RNA U1b promoter and glucose 6-phosphate dehydrogenase promoter.

44. A vaccina virus, comprising a sequence of nucleotides encoding a tyrosinase or an enzymatically active portion, or an enzymatically active variant, comprising an inducible expression system for expression of the tyrosinase enzyme.

45. The Lister strain virus or vaccinia virus of claim 44, wherein the inducible expression system is a tetracycline-inducible gene expression system.

46. A Lister strain virus, comprising:
a first sequence of nucleotides encoding a tyrosinase or an enzymatically active portion or an enzymatically active variant of the enzyme, that catalyzes the production of melanin, operatively linked to a promoter; and
a second sequence of nucleotides encoding an accessory melanin-producing enzyme operatively linked to a promoter, wherein the accessory melanin-producing enzyme is a tyrosinase-related protein 1 (TRP-1) and/or a dopachrome tautomerase (DCT), or an enzymatically active portion thereof or an enzymatically active variant thereof.

47. The Lister strain virus or vaccinia virus of claim 46, wherein the accessory melanin-producing enzyme is a tyrosinase-related protein 1 (TRP-1) or an enzymatically active portion thereof or an enzymatically active variant thereof.

48. A Lister strain virus, comprising a sequence of nucleotides encoding a tyrosinase or an enzymatically active portion, or an enzymatically active variant, of the enzyme that catalyzes production of a melanin, that is selected from among viruses designated GLV-1h326, GLV-1h327, GLV-1h459, GLV-1h460, GLV-1h461, GLV-2b482, GLV-0e407, GLV-1h310, GLV-1h322, GLV-1h323, GLV-1h324, GLV-1h325, GLV-1h458, GLV-2b452, GLV-2b453 and GLV-0e406.

49. A pharmaceutical composition, comprising the vaccinia virus of claim 39 in a pharmaceutically acceptable carrier.

50. The pharmaceutical composition of claim 49 that is formulated for local or systemic administration.

51. A pharmaceutical composition, comprising the Lister strain virus of claim 46 in a pharmaceutically acceptable carrier.

52. The pharmaceutical composition of claim 51 that is formulated for local or systemic administration.

53. A pharmaceutical composition, comprising the Lister strain virus of claim 48 in a pharmaceutically acceptable carrier.

54. The pharmaceutical composition of claim 53 that is formulated for local or systemic administration.

The application's sequence listing, which the Patent Office published only in electronic form, follows.

SEQUENCE LISTING (242 sequences)

SEQ ID NO: 1 - DNA, 186854 bp, Vaccinia virus
  LIVP complete genome
ttccactatctgtggtacgaacggtttcatcttctttgatgccatcacccagatgttctataaacttggtatcctcgtccgatttcatatcctttgccaaccaatacatatagctaaactcaggcatatgttccacacatcctgaacaatgaaattctccagaagatgttacaatgtctagatttggacatttggtttcaaccgcgttaacatatgagtgaacacacccatacatgaaagcgatgagaaataggattctcatcttgccaaaatatcactagaaaaaatttatttatcaattttaaaggtataaaaaatacttattgttgctcgaatattttgtatttgatggtatacggaagattagaaatgtaggtattatcatcaactgattctatggttttatgtattctatcatgtttcactattgcgttggaaataatatcatatgcttccacatatattttattttgttttaactcataatactcacgtaattctggattattggcatatctatgaataattttagctccatgatcagtaaatattaatgagaacatagtattaccacctaccattatttttttcatctcattcaattcttaattgcaaagatctatataatcattatagcgttgacttatggactctggaatcttagacgatgtacagtcatctataatcatggcatatttaatacattgttttatagcatagtcgttatctacgatgttagatatttctctcaatgaatcaatcacacaatctaatgtaggtttatgacataatagcattttcagcagttcaatgtttttagattcgttgatggcaatggctatacatgtatatccgttatttgatctaatgttgacatctgaaccggattctagcagtaaagatactagagattgtttattatatctaacagccttgtgaagaagtgtttctcctcgtttgtcaatcatgttaatgtctttaagataaggtaggcaaatgtttatagtactaagaattgggcaagcataagacatgtcacaaagacccttttttgtatgtataagtgtaaaaattataacatccatagttggatttacataggtgtccaatcgggatctctccatcatcgagataattgatggcatctcccttccttttttagtagatatttcatcgtgtaagaatcaatattaatatttctaaagtatccgtgtatagcctctttatttaccacagctccatattccactagagggatatcgccgaatgtcatatactcaattagtatatgttggaggacatccgagttcattgttttcaatatcaaagagatggtttccttatcatttctccatagtggtacaatactacacattattccgtgcggctttccattttccaaaaacaatttgaccaaatctaaatctacatctttattgtatctataatcactatttagataatcagccataattcctcgagtgcaacatgttagatcgtctatatatgaataagcagtgttatctattcctttcattaacaatttaacgatgtctatatctatatgagatgacttaatataatattgaagagctgtacaatagtttttatctataaaagacggcttgattccgtgattaattagacatttaacaacttccggacgcacatatgctctcgtatccgactctgaatacagatgagagatgatatacagatgcaatacggtaccgcaatttcgtagttgataatcatcatacgcgtatcagtactcgtcctcataaagaacactgcagccattttctatgaacaaatcaataattttagaaacaggatcattgtcattacataattttctataactgaacgatggttttcacatttaacactcaagtcaaatccatgttctaccaacacctttatcaagtcaacgtctacatttttggatttcatatagctgaatatattaaagttatttatgttgctaaatccagtggcttctagtagagccatcgctatatccttattaactttaacatgtctactatttgtgtattcttctaatggggtaagctgtctccaatttttgcgtaatggattagtgccactgtctagtagtagtttgacgacctcgacattattacaatgctcattaaaaaggtatgcgtgtaaagcattattcttgaattggttcctggtatcattaggatctctgtctttcaacatctgtttaagttcatcaagagccacctcctcattttccaaatagtcaaacattttgactgaatgagctactgtgaactctatacacccacacaactaatgtcattaaatatcatgtcaaaaacttgtacaattattaataaaaataatttagtgtttaaattttaccagttccagattttacacctccgttaatacctccattaaccccactggacgatcctcctccccacattccaccgccaccagatgtataagttttagatcctttattactaccatcatgtccatggataaagacactccacatgccgccactaccccctttagaagacatattaataagacttaaggacaagtttaacaataaaattaatcacgagtaccctactaccaacctacactattatatgattatagtttctatttttacagtaccttgactaaagtttctagtcacaagagcaatactaccaacctacactattatatgattatagtttctatttttataggaacgcgtacgagaaaatcaaatgtctaatttctaacggtagtgttgataaacgattgttatccgcggatacctcctctatcatgtcgtctattttcttactttgttctattaacttattagcattatatattatttgattataaaacttatattgcttattagcccaatctgtaaatatcggattattaacatatcgtttctttgtaggtttatttaacatgtacatcactgtaagcatgtccttaccatttattttaatttgacgcatatccgcaatttctttttcgcagtcggttataaattctatatatgatggatacatgctacatgtgtacttataatcgactaatatgaagtacttgatacatattttcagtaacgatttattattaccacctatgaataagtacctgtgatcgtctaggtaatcaactgttttcttaatacattcgatggttggtaatttactcagaataatttccaatatcttaatatataattctgctatttctgggatatatttatctgccagtataacacaaatagtaatacatgtaaacccatattttgttattatattaatgtctgcgccattatctattaaccattctactaggctgacactatgcgactcaatacaatgataaagtatactacatccatgtttatctattttgtttatatcatcaatatacggcttacaaagttttagtatcgataacacatccaactcacgcatagagaaggtagggaataatggcataatatttattaggttatcatcattgtcattatctacaactaagtttccattttttaaaatatactcgacaactttaggatctctattgccaaatttttgaaaatatttatttatatgcttaaatctatataatgtagctccttcatcaatcatacatttaataacattgatgtatactgtatgataagatacatattctaacaatagatcttgtatagaatctgtatatcttttaagaattgtggatattaggatattattacataaactattacacaattctaaaatataaaacgtatcacggtcgaataatagttgatcaactatataattatcgattttgtgatttttcttcctaaactgtttacgtaaatagttagatagaatattcattagttcatgaccactatagttactatcgaataacgcgtcaaatatttcccgtttaatatcgcatttgtcaagataataatagagtgtggtatgttcacgataagtataataacgcatctctttttcgtgtgaaattaaatagtttattacgtccaaagatgtagcataaccatcttgtgacctagtaataatataataatagagaactgttttacccattctatcatcataatcagtggtgtagtcgtaatcgtaatcgtctaattcatcatcccaattataatattcaccagcacgtctaatctgttctattttgatcttgtatccatactgtatgttgctacatgtaggtattcctttatccaataatagtttaaacacatctacattgggatttgatgttgtagcgtatttttctacaatattaataccatttttgatactatttatttctatacctttcgaaattagtaatttcaataagtctatattgatgttatcagaacatagatattcgaatatatcaaaatcattgatatttttatagtcgactgacgacaataacaaaatcacaacatcgtttttgatattattatttttcttggtaacgtatgcctttaatggagtttcaccatcatactcatataatggatttgcaccactttctatcaatgattgtgcactgctggcatcgatgttaaatgttttacaactatcatagagtatcttatcgttaaccatgattggttgttgatgctatcgcattttttggtttctttcatttcagttatgtatggatttagcacgtttgggaagcatgagctcatatgatttcagtactgtagtgtcagtactattagtttcaataagatcaatctctagatctatagaatcaaaacacgataggtcagaagataatgaatatctgtaggcttcttgttgtactgtaacttctggttttgttagatggttgcatcgtgctttaacgtcaatggtacaaattttatcctcgctttgtgtatcatattcgtccctactataaaattgtatattcagattatcatgcgatgtgtatacgctaacggtatcaataaacggagcacaccatttagtcataaccgtaatccaaaaatttttaaagtatatcttaacgaaagaagttgtgtcattgtctacggtgtatggtactagatcctcataagtgtatatatctagagtaatgtttaatttattaaatggttgataatatggatcctcgtgacaatttccgaagatggaaataagacataaacacgcaataaatctaattgcggacatggttactccttaaaaaaatacgaataatcaccttggctatttagtaagtgtcatttaacactatactcatattaatccatggactcataatctctatacgggattaacggatgttctatatacggggatgagtagttctcttctttaactttatactttttactaatcatatttagactgatgtatgggtaatagtgtttgaagagctcgttctcatcatcagaataaatcaatatctctgtttttttgttatacagatgtattacagcctcatatattacgtaatagaacgtgtcatctaccttattaactttcaccgcatagttgtttgcaaatacggttaatcctttgacctcgtcgatttccgaccaatctgggcgtataatgaatctaaactttaattgcttgtaatcattcgaaataatttttagtttgcatccgtagttatcccctttatgtaactgtaaatttctcaacgcgatatctccattaataatgatgtcgaattcgtgctgtatacccatactgaatggatgaacgaataccgacggcgttaatagtaatttactttttcatctttacatattgggtactagttttactatcataagtttataaattccacaagctactatggaataagccaaccatcttagtataccacacatgtcttaaagtttattaattaattacatgttgttttatatatatcgctacgaatttaaagagaaattagtttaggaagaaaaattatctatctacatcatcacgtctctgtattctacgatagagtgctactttaagatgcgacagatccgtgtcatcaaatatatactccattaaaatgattattccggcagcgaacttgatattggatatatcacaacctttgttaatatctacgacaatagacagcagtcccatggttccataaacagtgagtttatctttctttgaagagatattttgtagagatcttataaaactgtcgaatgacatcgcatttatatctttagctaaatcgtatatgttaccatcgtaatatctaaccgcgtctatcttaaacgtttccatcgctttaaagacgtttccgatagatggtctcatttcatcagtcatactgagccaacaaatataatcgtgtataacatctttgatagaatcagactctaaagaaaacgaatcggctttattatacgcattcatgataaacttaatgaaaaatgtttttcgttgtttaagttggatgaatagtatgtcttaataattgttattatttcattaattaatatttagtaacgagtacactctataaaaacgagaatgacataactaatcataactagttatcaaagtgtctaggacgcgtaattttcatatggtatagatcctgtaagcattgtctgtattctggagctattttctctatcgcattagtgagttcagaatatgttataaatttaaatcgaataacgaacataactttagtaaagtcgtctatattaactcttttattttctagccatcgtaataccatgtttaagatagtatattctctagttactacgatctcatcgttgtctagaatatcacatactgaatctacatccaattttagaaattggtctgtgttacatatctcttctatattattgttgatgtattgtcgtagaaaactattacgtagaccattttctttataaaacgaatatatagtactccaattatctttaccgatatatttgcacacataatccattctctcaatcactacatctttaagattttcgttgttaagatatttggctaaactatataattctattagatcatcaacagaatcagtatatatttttctagatccaaagacgaactctttggcgtcctctataatattcccagaaaagatattttcgtgttttagtttatcgagatctgatctgttcatatacgccatgattgtacggtacgttatgataaccgcataaaataaaaatccattttcatttttaaccaatactattcataattgagattgatgtaatactttgttactttgaacgtaaagacagtacacggatccgtatctccaacaagcacgtagtaatcaaatttggtgttgttaaacttcgcaatattcatcaatttagatagaaacttatactcatcatctgttttaggaatccatgtattattaccactttccaacttatcattatcccaggctatgtttcgtccatcatcgttgcgcagagtgaataattcttttgtattcggtagttcaaatatatgatccatgcatagatcggcaaagctattgtagatgtgatttttcctaaatctaatataaaactcgtttactagcaaacactttcctgatttatcgaccaagacacatatggtttctaaatctatcaagtggtggggatccatagttatgacgcagtaacatatattattacattcttgactgtcgctaatatctaaatatttattgttatcgtattggattctgcatatagatggcttgtatgtcaaagatatagaacacataaccaatttatagtcgcgctttacattctcgaatctaaagttaagagatttagaaaacattatatcctcggatgatgttatcactgtttctggagtaggatatattaaagtctttacagatttcgtccgattcaaataaatcactaaataatatcccacattatcatctgttagagtagtatcattaaatctattatattttatgaaagatatatcactgctcacctctatatttcgtacatttttaaactgtttgtataatatctctctgatacaatcagatatatctattgtgtcggtagacgataccgttacatttgaattaatggtgttccattttacaacttttaacaagttgaccaattcatttctaatagtatcaaactctccatgattaaatattttaatagtatccattttatatcactacggacacaaagtagctgacataaaccattgtataatttttatgttttatgtttattagcgtacacattttggaagttccggcttccatgtatttcctggagagcaagtagatgatgaggaaccagatagtttatatccgtacttgcacttaaagtctacattgtcgttgtatgagtatgatcttttaaacccgctagacaagtatccgtttgatattgtaggatgtggacatttaacaatctgacacgtgggtggatcggaccattctcctcctgaacacaggacactagagttaccaatcaacgaatatccactattgcaactataagttacaacgctcccatcggtataaaaatcctcgtatccgttatgtcttccgttggatatagatggaggggattggcatttaacagattcacaaataggtgcctcgggattccataccatagatccagtagatcctaattcacaatacgatttagattcaccgatcaactgatatccgctattacaagagtacgttatactagagccaaagtctactccaccaatatcaagttggccattatcgatatctcgaggcgatgggcatctccgtttaatacattgattaaagagtgtccatccagtacctgtacatttagcatatataggtcccattttttgctttctgtatccaggtagacatagatattctatagtgtctcctatgttgtaattagcattagcatcagtctccacactattcttaaatttcatattaatgggtcgtgacggaatagtacagcatgatagaacgcatcctattcccaacaatgtcaggaacgtcacgctctccaccttcatatttatttatccgtaaaaatgttatcctggacatcgtacaaataataaaaagcccatatatgttcgctattgtagaaattgtttttcacagttgctcaaaaacgatggcagtgacttatgagttacgttacactttggagtctcatctttagtaaacatatcataatattcgatattacgagttgacatatcgaacaaattccaagtatttgattttggataatattcgtattttgcatctgctataattaagatataatcaccgcaagaacacacgaacatctttcctacatggttaaagtacatgtacaattctatccatttgtcttccttaactatatatttgtatagataattacgagtctcgtgagtaattccagtaattacatagatgtcgccgtcgtactctacagcataaactatactatgatgtctaggcatgggagacttttttatccaacgatttttagtgaaacattccacatcgtttaatactacatatttctcatacgtggtataaactccacccattacatatatatcatcgtttacgaataccgacgcgcctgaatatctaggagtaattaagtttggaagtcttatccatttcgaagtgccgtgtttcaaatattctgccacacccgttgaaatagaaaattctaatcctcctattacatataactttccatcgttaacacaagtactaacttctgattttaacgacgacatattagtaaccgttttccattttttcgttttaagatctacccgcgatacggaataaacatgtctattgttaatcatgccgccaataatgtatagacaattatgtaaaacatttgcattatagaattgtctatctgtattaccgactatcgtccaatattctgttctaggagagtaatgggttattgtggatatataatcagagtttttaatgactactatattatgttttataccatttcgtgtcactggctttgtagatttggatatagttaatcccaacaatgatatagcattgcgcatagtattagtcataaacttgggatgtaaaatgttgatgatatctacatcgtttggatttttatgtatccactttaataatatcatagctgtaacatcctcatgatttacgttaacgtcttcgtgggataagatagttgtcagttcatcctttgataattttccaaattctggatcggatgtcaccgcagtaatattgttgattatttctgacatcgacgcattatatagttttttaattccatatcttttagaaaagttaaacatccttatacaatttgtgaaattaatattatgaatcatagtttttacacatagatctactacaggcggaacatcaattattatggcagcaactagtatcatttctacattgtttatggtgatgtttatcttcttccagcgcatatagtctaatagcgattcaaacgcgtgatagtttataccattcaatataatcgcttcatcctttagatggtgatcctgaatgcgtttaaaaaaattatacggagacgccgtaataatttccttattcacttgtataatttccccattgatagaaaatattacgctttccattcttaaagtactataagtaattatagtataatgtaaacgtttatatattcaatatttttataaaaatcattttgacattaattcctttttaaatttccgtctatcatctatagaaacgtattctatgaatttataaaatgcttttacgtgtcctatcgtaggcgatagaaccgctaaaaagcctatcgaatttctacaaaagaatctgttatatggtatagggagagtataaaacattaaatgtccgtacttattaaagtattcagtagccaatcctaactctttcgaatacttattaatggctcttgttctgtacgaatctatttttttgaacaacggacctagtggtatatcttgttctatgtatctaaaataatgtctgactagatccgttagtttaatatccgcagtcatcttgtctagaatggcaaatctaactgcgggtttaggctttagtttagtttctatatctacatctatgtctttatctaacaccaaaaatataatagctaatattttattacaatcatccggatattcttctacgatctcactaactaatgtttctttggttatactagtatagtcactatcggacaaataaagaaaatcagatgatcgatgaataatacatttaaattcatcatctgtaagatttttgagatgtctcattagaatattattagggttagtactcattatcattcggcagctattacttattttattatttttcaccatatagatcaatcattagatcatcaaaatatgtttcaatcatcctaaagagtatggtaaatgactcttcccatctaatttctgaacgttcaccaatgtctctagccactttggcactaatagcgatcattcgcttagcgtcttctatattattaactggttgattcaatctatctagcaatggaccgtcggacagcgtcattctcatgttcttaatcaatgtacatacatcgccgtcatctaccaattcatccaacaacataagctttttaaaatcatcattataataggtttgatcgttgtcatttctccaaagaatatatctaataagtagagtcctcatgcttagttaacaactattttttatgttaaatcaattagtacaccgctatgtttaatacttattcatattttagtttttaggattgagaatcaatacaaaaattaatgcatcattaattttagaaatacttagtttccacgtagtcaatgaaacatttgaactcatcgtacaggacgttctcgtacaggacgtaactataaaccggtttatatttgttcaagatagatacaaatccgataactttttttacgaattctacgggatccactttaaaagtgtcataccgggttctttttatttttttaaacagatcaatggtgtgatgttgattaggtcttttacgaatttgatatagaatagcgtttacatatcctccataatggtcaatcgccatttgttcgtatgtcataaattctttaattatatgacactgtgtattatttagttcatccttgttcattgttaggaatctatccaaaatggcaattatactagaactataggtgcgttgtatacacatattgatgtgtctgtttatacaatcaatgctactaccttcgggtaaaattgtagcatcatataccatttctagtactttaggttcattattatccattgcagaggacgtcatgatcgaatcataaaaaaatatattatttttatgttattttgttaaaaataatcatcgaatacttcgtaagatactccttcatgaacataatcagttacaaaacgtttatatgaagtaaagtatctacgatttttacaaaagtccggatgcataagtacaaagtacgcgataaacggaataataatagatttatctagtctatctttttctatagctttcatagttagatacatggtctcagaagtaggattatgtaacatcagcttcgataaaatgactgggttatttagtcttacacattcgctcatacatgtatgaccgttaactacagagtctacactaaaatgattgaacaatagatagtctaccattgtttcgtattcagatagtacagcgtagtacatggcatcttcacaaattatatcattgtctaatagatatttgacgcatcttatggatcccacttcaacagccatcttaaaatcggtagaatcatattgctttcctttatcattaataatttctagaacatcatctctatcataaaagatacaaatattaactgtttgatccgtaataacattgctagtcgatagcaatttgttaataagatgcgctgggctcaatgtcttaataagaagtgtaagaggactatctccgaatttgttttgtttattaacatccgttgatggaagtaaaagatctataatgtctacattcttgactgttttagagcatacaatatggagaggtgtatttccatcatgatctggttttgagggactaattcctagtttcatcatccatgagattgtagaagcttttggattgtctgacataagatgtctatgaatatgatttttgccaaatttatccactatcctggcttcgaatccgatggacattatttttttaaacactctttctgaaggatctgtacacgccaacaacggaccacatccttcttcatcaaccgagttgttaatcttggctccatactgtaccaataaatttattctctctatgacttcatcatctgttcccgagagataatatagaggcgttttatgctgtttatcacacgcgtttggatctgcgccgtgcgtcagcagcatcgcgactattctattattattaattttagaagctatatgcaatggataatttccatcatcatccgtctcatttggagagtatcctctatgaagaagttcttcgacaaatcgttcatctagtcctttaattccacaatacgcatgtagaatgtgataattatttccagaaggttcgatagcttgtagcatattcctaaatacatctaaatttttactattatatttggcataaagagatagataatactcggccgacataatgttgtccattgtagtataaaaattaatatttctatttctgtatatttgcaacaatttactctctataacaaatatcataacttagttcttttatgtcaagaaggcactggtttagttcatctataaatgtcacgccataactaccacgcatgccatactcagaattatgataaagatatttatccttggggtgtaggtaatggggattaatctttgttggatcagtctctaagttaacacatgtcacacatgatccatttatagttatatcacacgatgatgatttatgaattgattccggaagatcgctatcgtattttgtggttccacaattcatttccatacatgttattgtcacactaatattatgatgaactttatctagccgctgagtggtaaacaacagaacagatagtttattatctttaccaacaccctcagccgctgccacaaatctctgatccgtatccatgatggtcatgtttatttctagtccgtatccagtcaacactatgttagcatttctgtcgatatagctttcactcatatgacactcaccaataatagtagaattaatgtcgtaatttacaccaatagtgagttcggcggcaaagtaccaataccggtaatcttgtcgaggaggacatatagtattcttgtattctaccgaatacccgagagatgcgatacaaaagagcaagactaatttgtaaaccatcttactcaaaatatgtaacaatagtacgatgcaatgagtaagacaataggaaatctatcttatatacacataattattctatcaattttaccaattagttagtgtaatgttaacaaaaatgtgggagaatctaattagtttttctttacacaattgacgtacatgagtctgagttccttgtttttgctaattatttcatccaatttattattcttgacgatatcgagatcttttgtataggagtcaaacttgtattcaacatgcttttctataatcattttagctatttcggcatcatccaatagtacattttccagattagcagaatagatattaatgtcgtatttgaacagagcctgtaacatctcaatgtctttattatctatagccaatttaatgtccggaatgaagagaagggaattattggtgtttgtcgacgtcatatagtcgagcaagagaatcatcatatccacgtgtccattttttatagtgatgtgaatacaactaaggagaatagccagatcaaaagtagatggtatctctgaaagaaagtaggaaacaatacttacatcattaagcatgacggcatgataaaatgaagttttccatccagttttcccatagaacatcagtctccaatttttcttaacaaacagttttaccgtttgcatgttaccactatcaaccgcataatacaatgcggtgtttcccttgtcatcaaattgtgaatcatccagtccactgaatagcaaaatctttactattttggtatcttccaatgtggctgcctgatgtaatggaaattcattctctagaagatttttcaatgctccagcgttcaacaacgtacatactagacgcacgttattatcagctattgcataatacaaggcactatgtccatggacatccgccttaaatgtatctttactagagagaaagcttttcagctgcttagacttccaagtattaattcgtgacagatccatgtctgaaacgagacgctaattagtgtatattttttcattttttataattttgtcatattgcaccagaattaataatatctttaatagatctgattagtagatacatggctatcgcaaaacaacatatacacatttaataaaaataatatttattaagaaaattcagatttcacgtacccatcaatataaataaaataatgattccttacaccgtacccatattaaggagattccaccttacccataaacaatataaatccagtaatatcatgtctgatgatgaacacaaatggtgtattaaattccagtttttcaggagatgatctcgccgtagctaccataatagtagatgcctctgctacagttccttgttcgtcgacatctatctttgcattctgaaacattttataaatatataatgggtccctagtcatatgtttaaacgacgcattatctggattaaacatactaggagccatcatttcggctatcgacttaatatccctcttattttcgatagaaaatttagggagtttaagattgtacactttattccctaattgagacgaccaatagtctaattttgcagccgtgatagaatctgtgaaatgggtcatattatcacctattgccaggtacatactaatattagcatccttatacggaaggcgtaccatgtcatattctttgtcatcgattgtgattgtatttccttgcaatttagtaactacgttcatcatgggaaccgttttcgtaccgtacttattagtaaaactagcattgcgtgttttagtgatatcaaacggatattgccatatacctttaaaatatatagtattaatgattgcccatagagtattattgtcgagcatattagaatctactacattagacataccggatctacgttctactatagaattaattttattaaccgcatctcgtctaaagtttaatctatataggccgaatctatgatattgttgataatacgacggtttaatgcacacagtattatctacgaaactttgataagttagatcagtgtacgtatatttagatgttttcagcttagctaatcctgatattaattctgtaaatgctggacccagatctctttttctcaaatccatagtcttcaataattctattctagtattacctgatgcaggcaatagcgacataaacatagaaaacgaataaccaaacggtgagaagacaatattatcatcttgaatatttttatacgctactataccggcattggtaaatccttgtagacgataggcggacgctgaacacgctaacgatagtatcaataacgcaatcatgattttatggtattaataattaaccttatttttatgttcggtataaaaaaattattgatgtctacacatccttttgtaattgacatctatatatccttttgtataatcaactctaatcactttaacttttacagttttccctaccagtttatccctatattcaacatatctatccatatgcatcttaacactctctgccaagatagcttcagagtgaggatagtcaaaaagataaatatatagagcataatcattctcgtatactctgccctttattacatcacccgcattgggcaacgaataacaaaatgcaagcatcttgttaacgggctcgtaaattgggataaaaattatgtttttattgtcttatatctattttattcaagagaatattcaggaatttctttttccggttgtatctcgtcgcagtatatatcatttgtacattgtttcatattttttaatagtttacaccttttagtaggactagtatcgtacaattcatagctgtattttgaattccaatcacgcataaaaatatcttccaattgttgacgaagacctaatccatcatccggtgtaatattaatagatgctccacatgtatccgtaaagtaatttcctgtccaatttgaggtacctatataggccgttttatcggttaccatatatttggcatggtttaccctagaatacggaatgggaggatcagcatctggtacaataaatagctttacttctatatttatgtttttagattttagcatagcgatagatcttaaaaagtttctcatgataaacgaagatcgttgccagcaactaatcaatagcttaacggatacttgtctgtctatagcggatcttcttaattcatcttctatataaggccaaaacaaaattttacccgccttcgaataaataatagggataaagttcataacagatacataaacgaatttactcgcatttctaatacatgacaataaagcggttaaatcattggttctttccatagtacatagttgttgcggtgcagaagcaataaatacagagtgtggaacgccgcttacgttaatactaagaggatgatctgtattataatacgacggataaaagtttttccaattatatggtagattgttaactccaagataccagtatacctcaaaaatttgagtgagatccgctgccaagttcctattattgaagatcgcaatacccaattccttgacctgagttagtgatctccaatccatgttagcgcttcctaaataaatatgtgtattatcagatatccaaaattttgtatgaagaactcctcctaggatatttgtaatatctatgtatcgtacttcaactccggccatttgtagtctttcaacatcctttaatggtttgttagatttattaacggctactctaactcgtactcctcttttgggtaattgtacaatctcgtttaatattatcgtgccgaaattcgtacccacttcatccgataaactccaataaaaagatgatatatctagtgtttttgtggtattggatagaatttccctccacatgttaaatgtagacaaatatactttatcaaattgcatacctataggaatagtttctgtaatcactgcgattgtattatccggattcattttatttgttaaaagaataatcctatatcacttcactctattaaaaatccaagtttctatttctttcatgactgattttttaacttcatccgtttccttatgaagatgatgtttggcaccttcataaatttttatttctctattacaatttgcatgttgcatgaaataatatgcacctaaaacatcgctaatcttattgtttgttccctggagtatgagagtcgggggggtgttaatcttggaaattatttttctaaccttgttggtagccttcaagacctgactagcaaatccagccttaattttttcatgattgactaatgggtcgtattggtatttataaactttatccatatctctagatactgattctggacatagctttccgactggcgcatttggtgtgatggttcccataagtttggcagctagcagattcagtcttgaaacagcatctgcattaactagaggagacattagaatcattgctgtaaacaagtttggattatcgtaagaggctagctcccatggaatgacccaataagtagatttaatagttaccacgtgctgtaccaaagtcatcaatcatcattttttcaccattacttcttccatgtccaatatgatcatgtgagaatactaaaattcctaacgatgatatgttttcagctagttcgtcataacgtccagaatgtttaccagctccatgacttatgaatactaatgccttaggatatgtaataggtttccaatatttacaatatatgtaatcattgtccagattgaacatacagtttgcactcatgattcacgttatataactatcaatattaacagttcgtttgatgatcatattatttttatgttttattgataattgtaaaaacatacaattaaatcaatatagaggaaggagacggctactgtcttttgtaagatagtcatggcgactaaattagattatgaggatgctgttttttactttgtggatgatgataaaatatgtagtcgcgactccatcatcgatctaatagatgaatatattacgtggagaaatcatgttatagtgtttaacaaagatattaccagttgtggaagactgtacaaggaattgatgaagttcgatgatgtcgctatacggtactatggtattgataaaattaatgagattgtcgaagctatgagcgaaggagaccactacatcaattttacaaaagtccatgatcaggaaagtttattcgctaccataggaatatgtgctaaaatcactgaacattggggatacaaaaagatttcagaatctagattccaatcattgggaaacattacagatttgatgaccgacgataatataaacatcttgatactttttctagaaaaaaaattgaattgatgatataggggtcttcataacgcataattattacgttagcattctatatccgtgttaaaaaaaattatcctatcatgtatttgagagttttatatgtagcaaacatgatagctgtgatgccaataagctttagatattcacgcgtgctagtgttagggatggtattatctggtggtgaaatgtccgttatataatctacaaaacaatcatcgcatatagtatgcgatagtagagtaaacatttttatagtttttactggattcatacatcgtctacccaattcggttataaatgaaattgtcgccaatcttacacccaaccccttgttatccattagcatagtattaacttcgttatttatgtcataaactgtaaatgattttgtagatgccatatcatacatgatattcatgtccctattataatcattactaactttatcacaatatatgttgataatatctatatatgatctagtctttgtgggcaactgtctatacaagtcgtctaaacgttgtttactcatatagtatcgaacagccatcattacatggtcccgttccgttgatagataatcgagtatgttagtggacttgtcaaatctatataccatattttctggaagtggatatacatagtcgtgatcaacattattgctagcctcatcttctatatcctgtactataccattatctatatcatctacataatctatgatattattacacataaacatcgacaacatactattgtttattatctaagtcctgttgatccaaacccttgatctcctctatttgtactatctagagattgtacttcttccagttctggataatatatacgttgatagattagctgagctattctatctccagtatttacattaaacgtacattttccattattaataagaatgactcctatgtttcccctataatcttcgtctattacaccacctcctatatcaatgccttttagtgacagaccagacctaggagctattctaccatagcagaacttaggcatggacatactaatatctgtcttaattaactgtctttctcctggagggatagtataatcgtaagcgctatacaaatcatatccggcagcacccggcgattgcctagtaggagatttagctctgttagtttccttaacaaatctaactggtgagttaatattcatgttgaacataaaactaatattttatttcaaaattatttaccatcccatatattccatgaataagtgtgatgattgtacacttctatagtatctatatacgatccacgataaaatcctcctatcaatagcagtttattatccactatgatcaattctggattatccctcggataaataggatcatctatcagagtccatgtattgctggattcacaataaaattccgcatttctaccaaccaagaataaccttctaccgaacactaacgcgcatgatttataatgaggataataagtggatggtccaaactgccactgatcatgattgggtagcaaatattctgtagttgtatcagtttcagaatgtcctcccattacgtatataacattgtttatggatgccactgctggattacatctaggtttcagaagactcggcatattaacccaagcagcatccccgtggaaccaacgctcaacagatgtgggatttggtagacctcctactacgtataatttattgttagcgggtatcccgctagcatacagtctggggctattcatcggaggaattggaatccaattgtttgatatataatttaccgctatagcattgttatgtatttcattgttcatccatccaccgatgagatatactacttctccaacatgagtacttgtacacatatggaatatatctataatttgatccatgttcataggatactctatgaatggatacttgtatgatttgcgtggttgtttatcacaatgaaatattttggtacagtctagtatccattttacattatttatacctctgggagaaagataatttgacctgattacatttttgataaggagtagcagatttcctaatttatttcttcgctttatataccacttaatgacaaaatcaactacataatcctcatctggaacatttagttcatcgctttctagaataagtttcatagatagataatcaaaattgtctatgatgtcatcttccagttccaaaaagtgtttggcaataaagtttttagtatgacataagagattggatagtccgtattctatacccatcatgtaacactcgacacaatattcctttctaaaatctcgtaagataaagtttatacaagtgtagatgataaattctacagaggttaatatagaagcacgtaataaattgacgacgttatgactatctatatatacctttccagtatacgagtaaataactatagaagttaaactgtgaatgtcaaggtctagacaaaccctcgtaactggatctttatttttcgtgtatttttgacgtaaatgtgtgcgaaagtaaggagataactttttcaatatcgtagaattgactattatattgcctcctatggcatcaataattgttttgaatttcttagtcatagacaatgctaatatattcttacagtacacagtattgacaaatatcggcatttatgtttctttaaaagtcaacatctagagaaaaatgattatctttttgagacataactcccattttttggtattcacccacacgtttttcgaaaaaattagtttttccttccaatgatatattttccatgaaatcaaacggattggtaacattataaatttttttaaatcccaattcagaaatcaatctatccgcgacgaattctatatatgttttcatcatttcacaattcattcctataagtttaactggaagagccgcagtaagaaattcttgttcaatggatactgcatctgttataatagatctaacggtttcttcactcggtggatgcaataaatgtttaaacatcaaacatgcgaaatcgcagtgcagaccctcgtctctactaattagttcgttggaaaacgtgagtccgggcattaggccacgctttttaagccaaaatatggaagcgaatgatccggaaaagaagattccttctactgcagcaaaggcaataagtctctctccataaccggcgctgtcatgtatccacttttgagcccaatcggccttcttttttacacaaggcatcgtttctatggcattaaagagatagtttttttcattactatctttaacataagtatcgatcaaaagactatacatttccgaatgaatgttttcaatggccatctgaaatccgtagaaacatctagcctcggtaatctgtacttctgtacaaaatcgttccgccaaattttcattcactattccgtcactggctgcaaaaaacgccaatacatgttttataaaatatttttcgtctggtgttagtttattccaatcattgatatctttagatatatctacttcttccactgtccaaaatgatgcctctgcctttttatacatgttccagatgtcatgatattggattgggaaaataacaaatctatttggatttggtgcaaggatgggttccataactaaattaacaataacaataaattttttttcagttatctatatgcctgtacttggattttttgtacatcgatatcgccgcaatcactacaataattacaagtattattgatagcattgttattagtactatcataattaaattatctacattcatgggtgctgaataatcgttattatcatcattatcattttgtaattgtgacatcatactagataaatcgtttgcgagattgttgtgggaagcgggcatggaggatgcattatcattattatttaacgccttccatttggattcacaaatgttacgcacattcaacattttatggaaactataattttgtgaaaacaaataacaagaaaactcgtcatcgttcaaatttttaacgatagtaaaccgattaaacgtcgagctaatttctaacgctagcgactctgttggatatgggtttccagatatatatcttttcagttcccctacgtatctataatcatctgtaggaaatggaagatatttccatttatctactgttcctaatatcatatgtggtggtgtagtagaaccattaagcgcgaaagatgttatttcgcatcgtattttaacttcgcaataatttctggttagataacgcactctaccagtcaagtcaatgatattagcctttacagatatattcatagtagtcgtaacgatgactccatcttttagatgcgatactcctttgtatgtaccagaatcttcgtacctcaaactcgatatatttaaacaagttaatgagatattaacgcgttttatgaatgatgatatataaccagaagttttatcctcggtggctagcgctataaccttatcattataataccaactagtgtgattaatatgtgacacgtcagtgtgggtacaaatatgtacattatcgtctacgtcgtattcgatacatccgcatacagccaacaaatataaaatgacaaatactctaacgccgttcgtacccatcttgatgcggtttaataaatgttttgatttcaatttattgtaaaaaaagattcggttttatactgttcgatattctcattgcttatattttcatctatcatctccacacagtcaaatccgtggttagcatgcacctcatcaaccggtaaaagactatcggactcttctatcattataactctagaatatttaatttggtcattattaatcaagtcaattatcttatttttaacaaacgtgagtattttactcattttttataaaaacttttagaaatatacagactctatcgtgtgtctatatcttctttttatatccaatgtatttatgtctgatttttcttcatttatcatatataatggtccaaattctacacgtgcttcggattcatccagatcattaaggttcttataattgtaacatccttctcttccctcttctacatcttccttcttattcttattcttagcgtcacagaatctaccacagcaggatcccatgacgagcgtcatattaaactaatccattttcaattataatatatgattagtaatgaccattaaaataaaaaatattcttcataaccggcaagaaagtgaaaagttcacattgaaactatgtcagtagtatacatcatgaaatgatgatatatatatactctattttggtggaggattatatgatataattcgtggataatcatttttaagacacatttctttattcgtaaatcttttcacgttaaatgagtgtccatattttgcaatttcttcatatgatggcggtgtacgtggacgaggctgctcctgttcttgttgtggtcgccgactgtcgtgtctgcgtttagatccctccattatcgcgattgcgtagatggagtactattttataccttgtaattaaatttttttattaattaaacgtataaaaacgttccgtatctgtatttaagagccagatttcgtctaatagaacaaatagctacagtaaaaataactagaataattgctacacccactagaaaccacggatcgtaatacggcaatcggttttcgataataggtggaacgtatattttatttaaggacttaacaattgtctgtaaaccacaatttgcttccgcggatcctgtattaactatctgtaaaagcatatgttgaccgggcggagccgaacattctccgatatctaatttctgtatatctataatattattaacctccgcatacgcattacagttcttttctagcttggataccgcactaggtacatcgtctagatctattcctatttcctcagcgatagctcttctatccttttccggaagcaatgaaatcacttcaataaatgattcaaccatgagtgtgaaactaagtcgagaattactcatgcatttgttagttattcggagcgcgcaatttttaaactgtcctataacctctcctatatgaatagcacaagtgacattagtagggatagaatgttgagctaatttttgtaaataactatctataaaaagattatacaaagttttaaactctttagtttccgccatttatccagtctgagaaaatgtctctcataataaatttttccaagaaactaattgggtgaagaatggaaacctttaatctatatttatcacagtctgttttggtacacatgatgaattcttccaatgccgtactaaattcgatatctttttcgatttctggatatgtttttaataaagtatgaacaaagaaatggaaatcgtaataccagttatgtttaactttgaaattgttttttattttcttgttaatgattccagccacttgggaaaagtcaaagtcgtttaatgccgatttaatacgttcattaaaaacaaactttttatcctttagatgaattattattggttcattggaatcaaaaagtaagatattatcgggtttaagatctgcgtgtaaaaagttgtcgcaacagggtagttcgtagattttaatgtataacagagccatctgtaaaaagataaactttatgtattgtaccaaagatttaaatcctaatttgatagctaactcggtatctactttatctgccgaatacagtgctaggggaaaaattataatgtttcctctttcatattcgtagttagttctcttttcatgttcgaaaaagtgaaacatgcggttaaaatagtttataacattaatattactgttaataactgccggataaaagtgggatagtaatttcacgaatttgatactgtcctttctctcgttaaacgcctttaaaaaaactttagaagaatatctcaatgagagttcctgaccatccatagtttgtatcaataatagcaacatatgaagaacacgtttatacagagtatgtaaaaatgttaatttatagtttaatcccatggcccacgcacacacgattaattttttttcatctccctttagattgttgtatagaaatttgggtactgtgaactccgccgtagtttccatgggactatataattttgtggcctcgaatacaaattttactacatagttatctatcttaaagactataccatatcctcctgtagatatgtgataaaaatcgtcgtttataggataaaatcgtttatccttttgttggaaaaaggatgaattaatgtaatcattctcttctatctttagtagtgtttccttattaaaattcttaaaataatttaacaatctaactgacggagcccaattttggtgtaaatctaattgggacattatattgttaaaatacaaacagtctcctaatataacagtatctgataatctatggggagacatccattgatattcaggggatgaatcattggcaacacccatttattgtacaaaaagccccaatttacaaacgaaagtccaggtttgatagagacaaacaattaactattttgtctctgtttttaacacctccacagtttttaatttctttagtaatgaaattattcacaatatcagtatcttctttatctaccagagattttactaacttgataaccttggctgtctcattcaatagggtagtaatatttgtatgtgtgatattgatatctttttgaattgtttcttttagaagtgattctttgatggtgccagcatacgaattacaataatgcagaaactcggttaacatgcaggaattatagtaagccaattccaattgttgcctgtgttgtattagagtgtcaatatgagcaatggtgtccttgcgtttctctgatagaatgcgagcagcgattttggcgttatcatttgacgatatttctggaatgacgaatcctgtttctactaactttttggtaggacaaagtgaaacaatcaagaagatagcttctcctcctatttgtggaagaaattgaactcctctagatgatctactgacgatagtatctccttgacagatattggaccgaattacagaagtacctggaatgtaaagccctgaaaccccctcattttttaagcagattgttgccgtaaatcctgcactatgcccaagatagagagctcctttggtgaatccatctctatgtttcagtttaaccaagaaacagtcagctggtctaaaatttccatctctatctaatacagcatctaacttgatgtcaggaactatgaccggtttaatgttatatgtaacattgagtaaatccttaagttcataatcatcactgtcatcagttatgtacgatccaaacaatgtttctaccggcatagtggatacgaagatgctatccatcagaatgtttccctgattagtattttctatatagctattcttctttaaacgattttccaaatcagtaactatgttcatttttttaggagtaggacgcctagccagtatggaagaggattttctagatcctctcttcaacatctttgatctcgatggaatgcaaaaccccatagtgaaacaaccaacgataaaaataatattgtttttcactttttataattttaccatctgactcatggattcattaatatctttataagagctactaacgtataattctttataactgaactgagatatatacaccggatctatggtttccataattgagtaaatgaatgctcggcaataactaatggcaaatgtatagaacaacgaaattatactagagttgttaaagttaatattttctatgagctgttccaataaattatttgttgtgactgcgttcaagtcataaatcatcttgatactatccagtaaaccgtttttaagttctggaatattatcatcccattgtaaagcccctaattcgactatcgaatatcctgctctgatagcagtttcaatatcgacggacgtcaatactgtaataaaggtggtagtattgtcatcatcgtgataaactacgggaatatggtcgttagtaggtacggtaactttacacaacgcgatatataactttccttttgtaccatttttaacgtagttgggacgtcctgcagggtattgttttgaagaaatgatatcgagaacagatttgatacgatatttgttggattcctgattattcactataatataatctagacagatagatgattcgataaatagagaaggtatatcgttggtaggataatacatccccattccagtattctcggatactctattgatgacactagttaagaacatgtcttctattctagaaaacgaaaacatcctacatggactcattaaaacttctaacgctcctgattgtgtctcgaatgcctcgtacaaggatttcaaggatgccatagattctttgaccaacgatttagaattgcgtttagcatctgatttttttattaaatcgaatggtcggctctctggtttgctaccccaatgataacaatagtcttgtaaagataaaccgcaagaaaatttatacgcatccatccaaataaccctagcaccatcggatgatattaatgtattattatagattttccatccacaattattgggccagtatactgttagcaacggtatatcgaatagattactcatgtaacctactagaatgatagttcgtgtactagtcataatatctttaatccaatctaaaaaatttaaaattagattttttacactgttaaagttaacaaaagtattacccgggtacgtggatatcatatatggcattggtccattatcagtaatagctccataaactgatacggcgatggtttttatatgtgtttgatctaacgaggaagaaattcgcgcccacaattcatctctagatatgtatttaatatcaaacggtaacacatcaatttcgggacgcgtatatgtttctaaatttttaatccaaatataatgatgacctatatgccctattatcatactgtcaactatagtacacctagggaacttacgatacatctgtttcctataatcgttaaattttacaaatctataacatgctaaaccttttgacgacagccattcattaatttctgatatggaatctgtattctcgataccgtatcgttctaaagccagtgctatatctccctgttcgtgggaacgctttcgtataatatcgatcaacggataatctgaagtttttggagaataatatgactcatgatctatttcgtccataaacaatctagacataggaattggaggcgatgatcttaattttgtgcaatgagtcgtcaatcctataacttctaatcttgtaatattcatcatcgacataatactatctatgttatcatcgtatattagtataccatgaccttcttcatttcgtgccaaaatgatatacagtcttaaatagttacgcaatatctcaatagtttcataattgttagctgttttcatcaaggtttgtatcctgtttaacatgatggcgttctataacgtctctattttctatttttaattttttaaatttttaacgatttactgtggctagatacccaatctctctcaaatatttttttagcctcgcttacaagctgtttatctatactattaaaactgacgaatccgtgattttggtaatgggttccgtcgaaatttgccgaagtgatatgaacatattcgtcgtcgactatcaacaattttgtattattctgaatagtgaaaaccttcacagatagatcattttgaacacacaacgcatctagacttttggcggttgccatagaatatacgtcgttcttatcccaattaccaactagaagtctgatcttaactcctctattaatggctgcttctataatggagttgtaaatgtcgggccaatagtagctattaccgtcgacacgtgtagtgggaactatggccaaatgttcaatatctatactagtcttagctgacctgagtttatcaataactacatcggtatctagatctctagaatatcccaataggtgttccggagaatcagtaaagaacactccacctataggattcttaatatgatacgcagtgctaactggcaaacaacaagccgcagagcataaattcaaccatgaattttttgcgctattaaaggctttaaaagtatcaaatcttctacgaagatctgtggccagcgggggataatcagaatatacacctaacgttttaatcgtatgtatagatcctccagtaaatgacgcgtttcctacataacatctttcatcatctgacacccaaaaacaaccgagtagtagtcccacattattttttttatctatattaacggttataaaatttatatccgggcagtgactttgtagctctcccagatttcttttccctcgttcatctagcaaaactattattttaatccctttttcagatgcctcttttagtttatcaaaaataagcgctcccctagtcgtactcagaggattacaacaaaaagatgctatgtatatatatttcttagctagagtgataatttcgttaaaacattcaaatgttgttaaatgatcggatctaaaatccatattttctggtagtgtttctaccagcctacattttgctcccgcaggtaccgatgcaaatggccacatttagttaacataaaaacttatacatcctgttctatcaacgattctagaatatcatcggctatatcgctaaaattttcatcaaagtcgacatcacaacctaactcagtcaatatattaagaagttccatgatgtcatcttcgtctatttctatatccgtatccattgtagattgttgaccgattatcgagtttaaatcattactaatactcaatccttcagaatacaatctgtgtttcattgtaaatttataggcggtgtatttaagttggtagattttcaattatgtattaatatagcaacagtagttcttgctcctccttgattctagcatcctcttcattattttcttctacgtacataaacatgtccaatacgttagacaacacaccgacgatggcggccgctacagacacgaatatgactaaaccgatgaccatttaaaaacccctctctagctttcacttaaactgtatcgatcattcttttagcacatgtataatataaaaacattattctatttcgaatttaggcttccaaaaatttttcatccgtaaaccgataataatatatatagacttgttaatagtcggaataaatagattaatgcttaaactatcatcatctccacgattagagatacaatatttacattctttttgctgtttcgaaactttatcaatacacgttaatacaaacccaggaaggagatattgaaactgaggctgttgaaaatgaaacggtgaatacaataattcagataatgtaaaatcatgattccgtattctgatgatattagaactgctaatggatgtcgatggtatgtatctaggagtatctattttaacaaagcatcgatttgctaatatacaattatccttttgattaattgttattttattcatattcttaaaaggtttcatatttatcaattcttctacattaaaaatttccatttttaatttatgtagccccgcaatactcctcattacgtttcattttttgtctataatatccattttgttcatctcggtacatagattatccaattgagaagcgcatttagtagttttgtacattttaagtttattgacgaatcgtcgaaaactagttatagttaacattttattatttgataccctgatattaatacccctgccgttactattatttataactgatgtaatccacgtaacattggaattaactatcgatagtaatgcatcgacgcttccaaaattgtctattataaactcaccgataatttttttattgcatgttttcatattcattaggattatcaaatctttaatcttattacgattgtatgcgttgatattacaagacgtcattctaaaagacggaggatctccatcaaatgccagacaatcacgtacaaagtacatggaaataggttttgttctattgcgcatcatagatttatatagaacacccgtagaaatactaatttgttttactctataaaatactaatgcatctatttcatcgttttgtataacgtctttccaagtgtcaaattccaaatttttttcattgatagtaccaaattcttctatctctttaactacttgcatagataggtaattacagtgatgcctacatgccgttttttgaaactgaatagatgcgtctagaagcgatgctacgctagtcacaatcaccactttcatatttagaatatatatatgtaaaaatatagtagaatttcattttgtttttttctatgctataaatgaattctcattttgcatctgctcatactccgttttatattaataccaaagaaggaagatatctggttctaaaagccgttaaagtatgcgatgttagaactgtagaatgcgaaggaagtaaagcttcctgcgtactcaaagtagataaaccctcatcgcccgcgtgtgagagaagaccttcgtccccgtccagatgcgagagaatgaataaccctggaaaacaagttccgtttatgaggacggacatgctacaaaatatgttcgcggctaatcgcgataatgtagcttctagacttttgtcctaaaatactattatatccttttcgatattaataaatccgtgtcgtccaggttttttatctctttcagtatgtgaatagataggtattttatctctattcatcatcgaatttaagagatccgataaacattgtttgtattctccagatgtcagcatctgatacaacaatatatgtgcacataaacctctggcacttatttcatgtaccttccccttatcactaaggagaatagtatttgagaaatatgtatacatgatattatcatgaattagatatacagaatttgtaacactctcgaaatcacacgatgtgtcggcgttaagatctaatatatcactcgataacacattttcatctagatacactagacattttttaaagctaaaatagtctttagtagtaacagtaactatgcgattattttcatcgatgatacatttcatcggcatattattacgcttaccatcaaagactataccatgtgtatatctaacgtattctagcatggttgccatacgcgcattaaacttttcaggatctttggatagatcttccaatctatctatttgagaaaacatttttatcatgttcaatagttgaaacgtcggatccactatatagatattatctataaagattttaggaactacgttcatggtatcctggcgaatattaaaactatcaatgatatgattatcgttttcatcttttatcaccatatagtttctaagatatgggattttacttaatataatattatttcccgtgataaattttattagaaaggccaaatctataagaaaagtcctagaattagtctgaagaatatctatatcgccgtatagtatatttggattaattagatatagagaatatgatccgtaacatatacaacttttattatggcgtctaagatattcttccatcaacttattaacatttttgactagggaagatacattatgacgtcccattacttttgccttgtctattactgcgacgttcatagaatttagcatatctcttgccaattcttccattgatgttacattataagaaattttagatgaaattacatttggagctttaatagtaagaactcctaatatgtccgtgtatgtggtcactaatacagattgtagttctataatcgtaaataatttacctatattatatgtttgagtctgtttagaaaagtagctaagtatacgatcttttatttctgatgcagatgtattaacatcggaaaaaaatctttttttattcttttttactaaagatacaaatatgtctttgttaaaaacagttattttctgaatatttctagcttgtaattttaacatatgatattcgttcacactaggtactctgcctaaataggtttctataatctttaatgtaatattaggaaaagtattctgatcaggattcctattcattttgaggatttaaaactctgattattgtctaatatggtctctacgcaaactttttcacagagcgatagagtttttgataactcgtttttcttaagaaatataaaactactgtctccagagctcgctctatcttttattttatctaattcgatacaaactcctgatactggttcagaaagtaattcattaattttcagtcctttatagaagatatttaatatagataatacaaaatcttcagtttttgatatcgatctgattgatcctagaactagatatattaataacgtgctcattaggcagtttatggcagcttgataattagatatagtatattccagttcatatttattagataccgcattgcccagattttgatattctatgaattcctctgaaaataaatccaaaataactagacattctattttttgtggattagtgtactctcttccctctatcatgttcactactggtgtccacgatgataaatatctagagggaatataatatagtccataggatgccaatctagcaatgtcgaataactgtaattttattcttcgctcttcattatgaattgattcttgaggtataaacctaacacaaattatattattagacttttcgtatgtaatgtctttcatgttataagtttttaatcctggaatagaatctattttaatgaggcttttaaacgcagagttctccaacgagtcaaagcataatactctgttgtttttcttatatacgatgttacgattttcttctttgaatggaataggtttttgaattagtttataattacaacataatagataaggaagtgtgcaaatagtacgcggaaaaaacataatagctcccctgttttcatccatggttttaagtaaatgatcactggcttctttagtcaatggatattcgaacattaaccgtttcatcatcattggacagaatccatatttcttaatgtaaagagtgatcaaatcattgtgtttattgtaccatcttgttgtaaatgtgtattcggttatcggatctgctcctttttctattaaagtatcgatgtcaatctcgtctaagaattcaactatatcgacatatttcatttgtatacacataaccattactaacgtagaatgtataggaagagatgtaacgggaacagggtttgttgattcgcaaactattctaatacataattcttctgttaatacgtcttgcacgtaatctattatagatgccaagatatctatataattattttgtaagatgatgttaactatgtgatctatataagtagtgtaataattcatgtattttgatatatgttccaactctgtctttgtgatgtctagtttcgtaatatctatagcatcctcaaaaaatatattcgcatatattcccaagtcttcagttctatcttctaaaaaatcttcaacgtatggaatataataatctattttacctcttctgatatcattaatgatatagtttttgacactatcttctgtcaattgattcttattcactatatctaagaaacggatagcgtccctaggacgaactactgccattaatatctctattatagcttctggacataattcatctattataccagaattaatgggaactattccgtatctatctaacatagttttaagaaagtcagaatctaagacttgatgttcatatattggttcatacatgaaatgatctctattgatgatagtgactatttcattctctgaaaattggtaactcattctatatatgctttccttgttgatgaaggatagaatatactcaatagaatttgtaccaacaaactgttctcttatgaatcgtatatcatcatctgaaataatcatgtaaggcatacatttaacaattagagacttgtctcctgttatcaatatactattcttgtgataatttatgtgtgaggcaaatttgtccacgttctttaattttgttatagtagatatcaaatccaatggagctacagttcttggcttaaacagatatagtttttctggaacaaattctacaacattattataaaggactttgggtaaataagtgggatgaaatcctattttaattaatgcgatagccttgtcctcgtgcagatatccaaacgcttttgtgatagtatggcattcattgtctagaaacgctctacgaatatctgtgacagatatcatctttagagaatatactagtcgcgttaatagtactacaatttgtattttttaatctatctcaataaaaaaattaatatgtatgattcaatgtataactaaactactaactgttattgataactagaatcagaatctaatgatgacgtacccaagaagtttatctactgccaatttagctgcattatttttagcatctcgtttagattttccatctgccttatcgaatactcttccgtcgatatctacacaggcataaaatgtaggagagttactaggcccaactgattcaatacgaaaagaccaatctctcttagttatttggcagtactcattaataacggtgacagggttagcatctttccaatcaataatttttttagccggaataacatcatcaaaagacttatgatcctctctcattgatttttcgcgggatacatcatctattatgacgtcagccataacatcagcatccggcttatccgcctccgttgtcataaaccaacgaggaggaatatcgtcggagctgtacaccatagcactacgttgaagatcgtacagagctttattaacttctcgcttctccatattaagttgtctagttagttgtgcagcagtagctccttcgattccaatggttttaatagcctcacacacaatctctgcgttagaacgttcgtcgatatagattttagacatttttagagagaactaacacaaccagcaataaaactgaacctactttatcatttttttattcatcatcctctggtggttcgtcgttcctatcaaatgtagctctgattaacccgtcatctataggtgatgctggttctggagattctggaggagatggattattatctggaagaatctctgttatttccttgttttcatgtatcgattgcgttgtaacattaagattgcgaaatgctctaaatttgggaggcttaaagtgttgtttgcaatctctacacgcgtgtctaactagtggaggttcgtcagctgctctagtttgaatcatcatcggcgtagtattcctacttttacagttaggacacggtgtattgtatttctcgtcgagaacgttaaaataatcgttgtaactcacatcctttattttatctatattgtattctactcctttcttaatgcattttataccgaataagagatagcgaaggaattctttttcggtgccgctagtacccttaatcatatcacatagtgttttatattccaaatttgtggcaatagacggtttatttctatacgatagtttgtttctggaatcctttgagtattctataccaatattattctttgattcgaatttagtttcttcgatattagattttgtattacctatattcttgatgtagtactttgatgatttttccatggcccattctattaagtcttccaagttggcatcatccacatattgtgatagtaattctcggatatcagtagcggctaccgccattgatgtttgttcattggatgagtaactactaatgtatacattttccatttataacacttatgtattaactttgttcatttatattttttcattattatgttgatattaacaaaagtgaatatatatatatgttaataattgtattgtggttatacggctacaattttataatgagtgaaagtcagtgtccgatgatcaatgacgatagctttactctgaaaagaaagtatcaaatcgatagtgcggagtcaacaataaaaatggataagaagaggataaagtttcagaatagagccaaaatggtaaaagaaataaatcagacaataagagcagcacaaactcattacgagacattgaaactaggatacataaaatttaagagaatgattaggactactactctagaagatatagcaccatctattccaaataatcagaaaacttataaactattctcggacatttcagccatcggcaaagcatcacagaatccgagtaagatggtatatgctctgctgctttacatgtttcccaatttgtttggagatgatcatagattcattcgttatagaatgcatccaatgagtaaaatcaaacacaagatcttctctcctttcaaacttaatcttattagaatattagtggaagaaagattctataataatgaatgcagatctaataaatggaaaataattggaacacaagttgataaaatgttgatagctgaatctgataaatatacaatagatgcaaggtataacctaaaacccatgtatagaatcaagggagaatctgaagaagataccctcttcatcaaacagatggtagaacaatgtgtgacatcccaggaattggtggaaaaagtgttgaagatactgtttagagatttgttcaagagtggagaatacaaagcgtacagatacgatgatgatgtagaaaatggatttattggattggatacactaaaattaaacattgttcatgatatagttgaaccatgtatgcctgttcgtaggccagtggctaagatactgtgtaaagaaatggtaaataaatactttgagaatccgctacatattattggtaagaatcttcaagagtgcattgactttgttagtgaataggcatttcatctttctccaatactaattcaaattgttaaattaataatggatagtataaatagtaaaaataattattagaataagagtgtagtatcatagataactctcttctataaaaatggattttattcgtagaaagtatcttatatacacagtagaaaataatatagattttttaaaggatgatacattaagtaaagtaaacaattttaccctcaatcatgtactagctctcaagtatctagttagcaattttcctcaacacgttattactaaggatgtattagctaataccaatttttttgttttcatacatatggtacgatgttgtaaagtgtacgaagcggttttacgacacgcatttgatgcacccacgttgtacgttaaagcattgactaagaattatttatcgtttagtaacgcaatacaatcgtacaaggaaaccgtgcataaactaacacaagatgaaaaatttttagaggttgccgaatacatggacgaattaggagaacttataggcgtaaattatgacttagttcttaatccattatttcacggaggggaacccatcaaagatatggaaatcatttttttaaaactgtttaagaaaacagacttcaaagttgttaaaaaattaagtgttataagattacttatttgggcatacctaagcaagaaagatacaggcatagagtttgcggataatgatagacaagatatatatactctatttcaacaaactggtagaatcgtccatagcaatctaacagaaacgtttagagattatatctttcccggagataagactagctattgggtgtggttaaacgaaagtatagctaatgatgcggatatcgttcttaatagacccgccattaccatgtatgataaaattcttagttatatatactctgagataaaacaaggacgcgttaataaaaacatgcttaagttagtttatatctttgagcctgaaaaagatatcagagaacttctgctagaaatcatatatgatattcctggagatatcctatctattattgatgcaaaaaacgacgattggaaaaaatattttattagtttttataaagctaattttattaacggtaatacatttattagtgatagaacgtttaacgaggacttattcagagttgttgttcaaatagatcccgaatatttcgataatgaacgaattatgtctttattctctacgagtgctgcggacattaaacgatttgatgagttagatattaataacagttatatatctaatataatttatgaggtgaacgatatcacattagatacaatggatgatatgaagaagtgtcaaatctttaacgaggatacgtcgtattatgttaaggaatacaatacatacctgtttttgcacgagtcggatcccatggtcatagagaacggaatactaaagaaactgtcatctataaaatccaagagtagacggctgaacttgtttagcaaaaacattttaaaatattatttagacggacaattggctcgtctaggtcttgtgttagatgattataaaggagacttgttagttaaaatgataaaccatcttaagtctgtggaggatgtatccgcattcgttcgattttctacagataaaaaccctagtattcttccatcgctaatcaaaactattttagctagttataatatttccatcatcgtcttatttcaaaggtttttgagagataatctatatcatgtagaagaattcttggataaaagcatccatctaaccaagacggataagaaatatatacttcaattgataagacacggtagatcatagaacagaccaaatatattattaataatttgtatatacatagatataattatcacacatttttgataaatgggaactgctgcaacaattcagactcccaccaaattaatgaataaagaaaatgcagaaatgattttggaaaaaattgttgatcatatagttatgtatattagtgacgaatcaagtgattcagaaaataatcctgaatatattgattttcgtaacagatacgaagactatagatctctcattataaaaagtgatcacgagtttgtaaagctatgtaaaaatcatgcggagaaaagttctccagaaacgcaacaaatgattatcaaacacatatacgaacaatatcttattccagtatctgaagtactattaaaacctataatgtccatgggtgacataattacatataacggatgtaaagacaatgaatggatgctagaacaactctctaccctaaactttaacaatctccgcacatggaactcatgtagcataggcaatgtaacgcgtctgttttatacattttttagttatctgatgaaagataaactaaatatataagtataatcccattctaatactttaacctgatgtattagcatcttattagaatattaacctaactaaaagacataacataaaaactcattacatagttgataaaaagcggtaggatataaatattatggctgccaccgttccgcgttttgacgacgtgtacaaaaatgcacaaagaagaattctagatcaagaaacattttttagtagaggtctaagtagaccgttaatgaaaaacacatatctatttgataattacgcgtatggatggataccagaaactgcaatttggagtagtagatacgcaaacttagatgcaagtgactattatcccatttcgttgggattacttaaaaagttcgagtttctcatgtctctatataaaggtcctattccagtatacgaagaaaaagtaaatactgaattcattgctaatggatctttctccggtagatacgtatcatatcttagaaagttttctgctcttccaacaaacgagtttattagttttttgttactgacttccattccaatctataatatcttgttctggtttaaaaatactcagtttgatattactaaacacacattattcagatacgtctatacagataatgccaaacacctggcgttggctaggtatatgtatcaaacaggagactataagcctttgtttagtcgtctcaaagagaattatatatttaccggtcccgttccaatatgtatcaaagatatagatcaccctaatcttagtagagcaagaagtccatccgattatgagacattagctaatattagtactatattgtactttaccaagtatgatccggtattaatgtttttattgttttacgtacctgggtattcaattactacaaaaattactccagccgtagaatatctaatggataaactgaatctaacaaagagcgacgtacaactgttgtaaattattttatgcttcgtaaaatgtaggttttgaaccaaacattctttcaaagaatgagatgcataaaactttattatccaatagattgactatttcggacgtcaatcgtttaaagtaaacttcgtaaaatattctttgatcactgccgagtttaaaacttctatcgataattgtttcatatgttttaatatttacaagttttttggtccatggtccattaggacaaatatatgcaaaataatatcgttctccaagttctatagtctctggattatttttattatattcagtaaccaaatacatattagggttatctgcggatttataatttgagtgatgcattcgactcaacataaataattctagaggagacgatctactatcaaattcggatcgtaaatctgtttctaaagaacggagaatatctatacatacctgattagaattcatccgtccttcagacaacatctcagacagtctggttttgtacatcttaatcatattcttatgaaacttggaaacatctcttctagtttcactagtacctttattaattctctcaggtacagattttgaattcgacgatgctgagtatttcatcgttgtatatttcttcttcgattgcataatcagattcttatataccgcctcaaactctattttaaaattattaaacaatactctattattaatcagtcgttctaactctttcgctatttctatagacttatctacatcttgactgtctatctctgtaaacacggagtcggtatctccatacacgctacgaaaacgaaatctgtaatctataggcaacgatgttttcacaatcggattaatatctctatcgtccatataaaatggattacttaatggattggcaaaccgtaacataccgttagataactctgctccatttagtaccgattctagatacaagatcattctacgtcctatggatgtgcaactcttagccgaagcgtatgagtatagagcactatttctaaatcccatcagaccatatactgagttggctactatcttgtacgtatattgcatggaatcatagatggccttttcagttgaactggtagcctgttttagcatctttttatatctggctctctctgccaaaaatgttcttaatagtctaggaatggttccttctatcgatctatcgaaaattgctatttcagagatgaggttcggtagtctaggttcacaatgaaccgtaatatatctaggaggtggatatttctgaagcaatagctgattatttatttcttcttccaatctattggtactaacaacgacaccgactaatgtttccggagatagatttccaaagatacacacattaggatacagactgttataatcaaagattaatacattattactaaacattttttgttttggagcaaataccttaccgccttcataaggaaacttttgttttgtttctgatctaactaagatagttttagtttccaacaatagctttaacagtggacccttgatgactgtactcgctctatattcgaataccatggattgaggaagcacatatgttgacgcacccgcgtctgtttttgtttctactccataatactcccacaaatactgacacaaacaagcatcatgaatacagtatctagccatatctaaagctatgtttagattataatccttatacatctgagctaaatcaacgtcatcctttccgaaagataatttatatgtatcattaggtaaagtaggacataatagtacgactttaaatccattttcccaaatatctttacgaattactttacatataatatcctcatcaacagtcacataattacctgtggttaaaacctttgcaaatgcagcggctttgcctttcgcgtctgtagtatcgtcaccgatgaacgtcatttctctaactcctctatttaatactttacccatgcaactgaacgcgttcttggatatagaatccaatttgtacgaatccaatttttcaaatttttgaatgaatgaatatagatcgaaaaatatagttccattattgttattaacgtgaaacgtagtattggccatgccgcctactcccttatgactagactgatttctctcataaatacagagatgtacagcttcctttttgtccggagatctaaagataattttctctcctgttaataactctagacgattagtaatatatctcagatcaaagttatgtccgttaaaggtaacgacgtagtcgaacgttagttccaacaattgtttagctattcgtaacaaaactatttcagaacatagaactagttctcgttcgtaatccatttccattagtgactgtatcctcaaacatcctctatcgacggcttcttgtatttcctgttccgttaacatctcttcattaatgagcgtaaacaataatcgtttaccacttaaatcgatataacagtaacttgtatgcgagattgggttaataaatacagaaggaaacttcttatcgaagtgacactctatatctagaaataagtacgatcttgggatatcgaatctaggtatttttttagcgaaacagttacgtggatcgtcacaatgataacatccattgttaatctttgtcaaatattgctcgtccaacgagtaacatccgtctggagatatcccgttagaaatataaaaccaactaatattgagaaattcatccatggtggcattttgtatgctgcgtttctttggctcttctatcaaccacatatctgcgacggagcattttctatctttaatatctagattataacttattgtctcgtcaatgtctatagttctcatctttcccaacggcctcgcattaaatggaggaggagacaatgactgatatatttcgtccgtcactacgtaataaaagtaatgaggaaatcgtataaatacggtctcaccatttcgacatctggatttcagatataaaaatctgttttcaccgtgactttcaaaccaattaatgcaccgaacatccatttatagaatttagaaatatattttcatttaaatgaatcccaaacattggggaagagccgtatggaccattatttttatagtactttcgcaagcgggtttagacggcaacatagaagcgtgtaaacgaaaactatatactatagttagcactcttccatgtcctgcatgtagacggcacgcgactatcgctatagaggacaataatgtcatgtctagcgatgatctgaattatatttattattttttcatcagattatttaacaatttggcatctgatcccaaatacgcgatcgatgtgacaaaggttaaccctttataaacttaacccattataaaacttatgattagtcacaactgaaataaccgcgtgattattttttggtataattctacacggcatggtttctgtgactatgaattcaacccccgttacattagtgaaatctttaacaaacagcaagggttcgtcaaagacataaaactcattgtttacaatcgaaatagaccccctatcacacttaaaataaaaaatatccttatcctttaccaccaaataaaattctgattggtcaatgtgaatgtattcacttaacagttccacaaatttatttattaactccgaggcacatacatcgtcggtattttttatggcaaactttactcttccagcatccgtttctaaaaaaatattaacgagttccatttatatcatccaatattattgaaatgacgttgatggacagatgatacaaataagaaggtacggtacctttgtccaccatctcctccaattcatgctctattttgtcattaactttaatgtatgaaaacagtacgccacatgcttccatgacagtgtgtaacactttggatacaaaatgtttgacattagtataattgttcaagactgtcaatctataatagatagtagctataatatattctatgatggtattgaagaagatgacaaccttggcatattgatcatttaacacagacatggtatcaacagatagcttgaatgaaagagaatcagtaattggaataagcgtcttctcgatagagtgtccgtataccaacatgtctgatattttgatgtattccattaaattatttagttttttctttttattctcgttaaacagcatttctgtcaacggaccccaacatcgttgaccgattaagttttgattgatttttccgtgtaaggcgtatctagtcagatcgtatagcctatccaataatccatcatctgtgcgtagatcacatcgtacactttttaattctctatagaagagcgacagacatctggagcaattacagacagcaatttctttattctctacagatgtaagatacttgaagacattcctatgatgatgcagaattttggataacacggtattgatggtatctgttaccataattcctttgatggctgatagtgtcagagcacaagatttccaatctttgacaatttttagcaccattatctttgttttgatatctatatcagacagcatggtgcgtctgacaacacagggattaagacggaaagatgaaatgattctctcaacatcttcaatagataccttgctattttttctggcattatctatatgtgcgagaatatcctctagagaatcagtatcctttttgatgatagtggatctcaatgacatgggacgtttaaaccttcttattctatcaccagattgcatggtgatttgtcttctttcttttatcataatgtaatctctaaattcatcggcaaattgtctatatctaaaatcataatatgagatgtttacctctacaaatatctgttcgtccaatgttagagtatttacatcagttttgtattccaaattaaacatggcaacggatttaattttatattcctctattaagtcctcgtcgataataacagaatgtagataatcatttaatccatcgtacatggttggaagatgcttgttgacaaaatctttaattgtcttgatgaaggtgggactatatctaacatcttgattaataaaatttataacattgtccataggatactttgtaactagttttatacacatctcttcatcggtaagtttagacagaatatcgtgaacaggtggtatattatattcatcagatatacgaagaacaatgtccaaatctatattgtttaatatattatatagatgtagcgtagctcctacaggaatatctttaactaagtcaatgatttcatcaaccgttagatctattttaaagttaatcatataggcattgatttttaaaaggtatgtagccttgactacattctcattaattaaccattccaagtcactgtgtgtaagaagattatattctatcataagcttgactacatttggtcccgataccattaaagaattcttatgatataaggaaacagcttttaggtactcatctactctacaagaattttggagagccttaacgatatcagtgacgtttattatttcaggaggaaaaaacctaacattgagaatatcggaattaatagcttccagatacagtgattttggcaatagtccgtgtaatccataatccagtaacacgagctggtgcttgctagacaccttttcaatgtttaatttttttgaaataagctttgataaagccttcctcgcaaattccggatacatgaacatgtcggcgacatgattaagtattgttttttcattattttctcaataccccaatagatgatagaatatcacccaatgcgtccatgttgtctatttccaacaggtcgctatatccaccaatagaagtttttccaaaaaagattctaggaacagttctaccaccagtaatttgttcaaaatagtcacgcaattcattttcgggtttaaattctttaatatcgacaatttcatacgctcctcttttgaaactaaacttatttagaatatccagtgcatttctacaaaaaggacatgtatacttgacaaaaattgtcactttgttattggccaacctttgttgtacaaattcctcggccattttaatatttaagtgatataaaactatctcgacttatttaactctttagtcgagatatatggacgcagatagctatatgatagccaactacagaaggcaaacgctataaaaaacataattacgacgagcatatttataaatatttttattcagcattacttgatatagtaatattaggcacagtcaaacattcaaccactctcgatacattaactctctcattttctttaacaaattctgcaatatcttcgtaaaaagattcttgaaactttttagaatatctatcgactctagatgaaatagcgttcgtcaacatactatgttttgtatacataaaggcgcccattttaacagtttctagtgacaaaatgctagcgatcctaggatcctttagaatcacatagattgacgattcgtctctcttagtaactctagtaaaataatcatacaatctagtacgcgaaataatattatccttgacttgaggagatctaaacaatctagttttgagaacatcgataagttcatcgggaatgacatacatactatctttaatagaactcttttcatccagttgaatggattcgtccttaaccaactgattaatgagatcttctattttatcattttccagatgatatgtatgtccattaaagttaaattgtgtagcgcttctttttagtctagcagccaatactttaacatcactaatatcgatatacaaaggagatgatttatctatggtattaagaattcgtttttcgacatccgtcaaaaccaattcctttttgcctgtatcatccagttttccatcctttgtaaagaaattattttctactagactattaataagactgataaggattcctccataattgcacaatccaaactttttcacaaaactagactttacaagatctacaggaatgcgtacttcaggttttttagcttgtgattttttcttttgcggacattttcttgtgaccaactcatctaccatttcattgattttagcagtgaaataagctttcaatgcacgggcactgatactattgaaaacgagttgatcttcaaattccgccatttaagttcaccaaacaacttttaaatacaaatatatcaatagtagtagaataagaactataaaaaaaataataattaaccaataccaaccccaacaaccggtattattagttgatgtgactgttttctcatcacttagaacagatttaacaatttctataaagtctgtcaaatcatcttccggagaccccataaatacaccaaatatagcggcgtacaacttatccatttatacattgaatattggcttttctttatcgctatcttcatcatattcatcatcaatatcaacaagtcccagattacgagccagatcttcttctacattttcagtcattgatacacgttcactatctccagagagtccgataacgttagccaccacttctctatcaatgattagtttcttgagcgcgaaagtaatttttgtttccgttccggatctatagaagacgataggtgtgataattgccttggccaattgtctttctcttttactgagtgattctagttcaccttctatagatctgagaatggatgattctccagtcgaaacatattctaccatggatccgtttaatttgttgatgaagatggattcatccttaaatgttttctctgtaatagtttccaccgaaagactatgcaaagaatttggaatgcgttccttgtgcttaatgtttccatagacggcttctagaagttgatacaacataggactagccgcggtaacttttatttttagaaagtatccatcgcttctatcttgtttagatttatttttataaagtttagtctctccttccaacataataaaagtggaagtcatttgactagataaactatcagtaagttttatagagatagacgaacaattagcgtattgagaagcatttagtgtaacgtattcgatacattttgcattagatttactaatcgattttgcatactctataacacccgcacaagtctgtagagaatcgctagatgcagtaggtcttggtgaagtttcaactctcttcttgattaccttactcatgattaaacctaaataattgtactttgtaatataatgatatatattttcactttatctcatttgagaataaaaatgtttttgtttaaccactgcatgatgtacagatttcggaatcgcaaaccaccagtggttttattttatccttgtccaatgtgaattgaatgggagcggatgcgggtttcgtacgtagatagtacattcccgtttttagaccgagactccatccgtaaaaatgcatactcgttagtttggaataactcggatctgctatatggatattcatagattgactttgatcgatgaaggctcccctgtctgcagccatttttatgatcgtcttttgtggaatttcccaaatagttttataaactcgcttaatatcttctggaaggtttgtattctgaatggatccaccatctgccataatcctattcttgatctcatcattccataattttctctcggttaaaactctaaggagatgcggattaactacttgaaattctccagacaatactctccgagtgtaaatattactggtatacggttccaccgactcattatttcccaaaatttgagcagttgatgcagtcggcataggtgccaccaataaactatttctaagaccgtatgttctgattttatcttttagaggttcccaattccaaagatccgacggtacaacattccaaagatcatattgtagaataccgttactggcgtacgatcctacatatgtatcgtatggtccttccttctcagctagttcacaactcgcctctaatgcaccgtaataaatggtttcgaagatcttcttatttagatcttgtgcttccaggctatcaaatggataatttaagagaataaacgcgtccgctaatccttgaacaccaataccgataggtctatgtctcttattagagatttcagcttctggaataggataataattaatatctataattttattgagatttctgacaattactttgaccacatccttcagtttgagaaaatcaaatcgcccatctattacaaacatgttcaaggcaacagatgccagattacaaacggctacctcattagcatccgcatattgtattatctcagtgcaaagattactacacttgatagttcctaaattttgttgattactctttttgttacacgcatccttataaagaatgaatggagtaccagtttcaatctgagattctataatcgctttccagacgactcgagcctttattatagatttgtatctcctttctctttcgtatagtgtatacaatcgttcgaactcgtctccccaaacattgtccaatccaggacattcatccggacacatcaacgaccactctccgtcatccttcactcgtttcataaagagatcaggaatccaaagagctataaatagatctctggttctatgttcctcgtttcctgtattctttttaagatcgaggaacgccataatatcagaatgccacggttccaagtatatggccataactccaggccgtttgtttcctccctgatctatgtatctagcggtgttattataaactctcaacattggaataataccgtttgatataccattggtaccggagatatagcttccactggcacgaatattactaattgatagacctattccccctgccattttagagattaatgcgcatcgttttaacgtgtcatagataccctctatgctatcatcgatcatgttaagtagaaaacagctagacatttggtgacgactagttcccgcattaaataaggtaggagaagcgtgcgtaaaccatttttcagaaagtagattgtacgtctcaatagctgagtctatatcccattgatgaattcctactgcgacacgcattaacatgtgctgaggtctttcaacgatcttgttgtttattttcaacaagtaggatttttccaaagttttaaaaccaaaatagttgtatgaaaagtctcgttcgtaaataataaccgagttgagtttatccttatatttgttaactatatccatggtgatacttgaaataatcggagaatgtttcccatttttaggattaacatagttgaataaatcctccatcacttcactaaatagtttttttgtttccttgtgtagatttgatacggctattctggcggctagaatggcataatccggatgttgtgtagtacaagtggctgctatttcggctgccagagtgtccaattctaccgttgttactccattatatattccttgaataaccttcatagctattttaataggatctatatgatccgtgtttaagccataacataattttctaatacgagacgtgattttatcaaacatgacattttccttgtatccatttcgtttaatgacaaacatttttgttggtgtaataaaaaaattatttaacttttcattaatagggatttgacgtatgtagcgtacaaaatgatcgttcctggtatatagataaagagtcctatatatttgaaaatcgttacggctcgattaaactttaatgattgcatagtgaatatatcattaggatttaactccttgactatcatggcggcgccagaaattaccatcaaaagcattaatacagttatgccgatcgcagttaaaacggttatagcatccaccatttatatctaaaaattagatcaaagaatatgtgacaaagtcctagttgtatactgagaattgacgaaacaatgtttcttacatatttttttcttattagtaactgacttaatagtaggaactggaaagctagacttgattattctataagtatagatacccttccagataatgttctctttgataaaagttccagaaaatgtagaattttttaaaaagttatcttttgctattaccaagattgtgtttagacgcttattattaatatgagtgatgaaatccacaccgcctctagatatcgcctttatttccacattagatggtaaatccaatagtgaaactatctttttaggaatgtatggactcgcgtttagaggagtgaacgtcttgggcgtcggaaaggatgattcgtcaaacgaataaacaatttcacaaatggatgttaatgtattagtaggaaattttttgacgctagtggaattgaagattctaatggatgatgttctacctatttcatccgataacatgttaatttccgacaccaacggttttaatatttcgatgatatacggtagtctctctttcggacttatatagcttattccacaatacgagtcattatatactccaaaaaacaaaataactagtataaaatctgtatcgaatgggaaaaacgaaattatcgacataggtatagaatccggaacattgaacgtattaatacttaattctttttctgtggtaagtaccgataggttattgacattgtatggttttaaatattctataacttgagacttgatagatattagtgatgaattgaaaattatttttatcaccacgtgtgtttcaggatcatcgtcgacgcccgtcaaccaaccgaatggagtaaaataaatatcattaatatatgctctagatattagtatttttattaatcctttgattatcatcttctcgtaggcgaatgattccatgatcaagagtgatttgagaacatcctccggagtattaatgggcttagtaaacagtccatcgttgcaataataaaagttatccaagttaaaggatattatgcattcgtttaaagatatcacctcatctgacggagacaattttttggtaggttttagagactttgaagctacttgtttaacaaagttattcatcgtcgtctactattctatttaattttgtagttaatttatcacatatcacattaattgactttttggtccatttttccatacgtttatattcttttaatcctgcgttatccgtttccgttatatccagggatagatcttgcaagttaaatagaatgctcttaaataatgtcattttcttatccgctaaaaatttaaagaatgtataaacctttttcagagatttgaaactcttaggtggtgtcctagtacacaatatcataaacaaactaataaacattccacattcagattccaacagctgattaacttccacattaatacagcctattttcgctccaaatgtacattcgaaaaatctgaataaaacatcgatgtcacaatttgtattatccaatacagaatgtttgtgattcgtgttaaaaccatcggagaaggaatagaaataaaaattattatagtggtggaattcagttggaatattgcctccggagtcataaaaggatactaaacattgttttttatcataaattacacatttccaatgagacaaataacaaaatccaaacattacaaatctagaggtagaacttttaattttgtctttaagtatatacgataagatatgtttattcataaacgcgtcaaatttttcatgaatcgctaaggagtttaagaatctcatgtcaaattgtcctatataatccacttcggatccataagcaaactgagagactaagttcttaatacttcgattgctcatccaggctcctctctcaggctctattttcatcttgacgacctttggattttcaccagtatgtattcctttacgtgataaatcatcgattttcaaatccatttgtgagaagtctatcgccttagatactttttcccgtagtcgaggtttaaaaaaatacgctaacggtatactagtaggtaactcaaagacatcatatatagaatggtaacgcgtctttaactcgtcggttaactctttcttttgatcgagttcgtcgctactattgggtctgctcaggtgccccgactctactagttccaacatcataccgataggaatacaagacactttgccagcggttgtagatttatcatatttctccactacatatccgttacaatttgttaaaaatttagatacatctatattgctacataatccagctagtgaatatatatgacataataaattggtaaatcctagttctggtattttactaattactaaatctgtatatctttccatttatcatggaaaagaatttaccagatatcttcttttttccaaactgcgttaatgtattctcttacaaatattcacaagatgaattcagtaatatgagtaaaacggaacgtgatagtttctcattggccgtgtttccagttataaaacatagatggcataacgcacacgttgtaaaacataaaggaatatacaaagttagtacagaagcacgtggaaaaaaagtatctcctccatcactaggaaaacccgcacacataaacctaaccgcgaagcaatatatatacagtgaacacacaataagctttgaatgttatagttttctaaaatgtataacaaatacagaaatcaattcgttcgatgagtatatattaagaggactattagaagctggtaatagtttacagatattttccaattccgtaggtaaacgaacagatactataggtgtactagggaataagtatccatttagcaaaattccattggcctcattaactcctaaagcacaacgagagatattttcagcgtggatttctcatagacctgtagttttaactggaggaactggagtgggtaagacgtcacaggtacccaagttattgctttggtttaattatttatttggtggattctctactctagataaaatcactgactttcacgaaagaccagtcattctatctcttcctaggatagctttagttagattgcatagcaataccattttaaaatcattgggatttaaggtactagatggatctcctatttctttacggtacggatctataccggaagaattaataaacaaacaaccaaaaaaatatggaattgtattttctacccataagttatctctaacaaaactatttagttatggcactcttattatagacgaagttcatgagcatgatcaaataggagatattattatagcagtagcgagaaagcatcatacgaaaatagattctatgtttttaatgactgccacgttagaggatgacagggaacggctaaaagtatttttacctaatcccgcatttatacatattcctggagatacactgtttaaaattagcgaggtatttattcataataagataaatccatcttccagaatggcatacatagaagaagaaaagagaaatttagttactgctatacagatgtatactcctcctgatggatcatccggtatagtctttgtggcatccgttgcacagtgtcacgaatataaatcatatttagaaaaaagattaccgtatgatatgtatattattcatggtaaggtcttagatatagacgaaatattagaaaaagtgtattcatcacctaatgtatcgataattatttctactccttatttggaatccagcgttactatacgcaatgttacacacatttatgatatgggtagagtttttgtccccgctccttttggaggatcgcaacaatttatttctaaatctatgagagatcaacgaaaaggaagagtaggaagagttaatcctggtacatacgtctatttctatgatctgtcttatatgaagtctatacagcgaatagattcagaatttctacataattatatattgtacgctaataagtttaatctaacactccccgaagatttgtttataatccctacaaatttggatattctatggcgtacaaaggaatatatagactcgttcgatattagtacagaaacatggaataaattattatccaattattatatgaagatgatagagtatgctaaactttatgtactaagtcctattctcgctgaggagttggataactttgagaggacgggagaattaactagtattgtacgagaagccattttatctctaaatttacaaattaagattttaaattttaaacataaagatgatgatacgtatatacacttttgtaaaatattattcggtgtctataacggaacaaacgctactatatattatcatagacctctaacgggatatatgaatatgatttcagatactatatttgttcctgtagataataactaaaaatcaaactctaatgaccacatctttttttagagatgaaaaattttccacatctccttttgtagacacgactaaacattttgcagaaaaaagtttattagtgtttagataatcgtatacttcatcagtgtagatagtaaatgtgaacagataaaaggtattcttgctcaatagattggtaaattccatagaatatattaatcctttcttcttgagatcccacatcatttcaaccagagacgttttatccaatgatttacctcgtactataccacatacaaaactagattttgcagtgacgtcgtacctggtattcctaccaaacaaaattttacttttagttcttttagaaaattctaaggtagaatctctatttgccaatatgtcatctatggaattaccactagcaaaaaatgatagaaatatatattgatacatcgcagctggttttgatctactatactttaaaaacgaatcagattccataattgcctgtatatcatcagctgaaaaactatgttttacacgtattccttcggcatttctttttaatgatatatcttgtttagacaatgataaagttatcatgtccatgagagacgcgtctccgtatcgtataaatatttcattagatgttagacgcttcattaggggtatacttctataaggtttcttaatcagtccatcattggttgcgtcaagaactactatcggatgttgttgggtatctctagtgttacacatggccttactaaagtttgggtaaataactatgatatctctattaattatagatgcatatatttcattcgtcaaggatattagtatcgacttgctatcgtcattaatacgtgtaatgtaatcatataaatcatgcgatagccaaggaaaatttaaatagatgttcatcatataatcgtcgctataattcatattaatacgttgacattgactaatttgtaatatagcctcgccacgaagaaagctctcgtattcagtttcatcgataaaggataccgttaaatataactggttgccgatagtctcatagtctattaagtggtaagtttcgtacaaatacagaatccctaaaatattatctaatgttggattaatctttaccataactgtataaaatggagacggagtcataactattttaccgtttgtacttactggaatagatgaaggaataatctccggacatgctggtaaagacccaaatgtctgtttgaagaaatccaatgttccaggtcctaatctcttaacaaaaattacgatattcgatcccgatatcctttgcattctatttaccagcatatcacgaactatattaagattatctatcatgtctattctcccaccgttatataaatcgcctccgctaagaaacgttagtatatccatacaatggaatacttcatttctaaaatagtattcgttttctaattctttaatgtgaaatcgtatactagaaagggaaaaattatctttgagttttccgttagaaaagaaccacgaaactaatgttctgattgcgtccgattccgttgctgaattaatggatttacaccaaaaactcatataacttctagatgtagaagcattcgctaaaaaattagtagaatcaaaggatataagtagatgttccaacaagtgagcaattcccaagatttcatctatatcattctcgaatccgaaattagaaattcccaagtagatatcctttttcatccgatcgttgatgaaaatacgaactttattcggtaagacaatcatttactaaggagtaaaataggaagtaatgttcgtatgtcgttatcatcgtataaattaaaggtgtgttttttaccattaagtgacattataattttaccaatattggaattataatataggtgtatttgcgcactcgcgacggttgatgcatcggtaaatatagctgtatctaatgttctagtcggtatttcatcatttcgctgtctaataatagcgttttctctatctgtttccattacagctgcctgaagtttattggtcggataatatgtaaaataataagaaatacatacgaataacaaaaataaaataagatataataaagatgccatttagagatctaattttgtttaacttgtccaaattcctacttacagaagatgaggaatcgttggagatagtgtcttccttatgtagaggatttgaaatatcttataatgacttgataacttactttccagataggaaataccataaatatatttataaagtatttgaacatgtagatttatcggaggaattaagtatggaattccatgatacaactctgagagatttagtctatcttagattgtacaagtattccaagtgtatacggccgtgttataaattaggagataatctaaaaggcatagttgttataaaggacaggaatatttatattagggaagcaaatgatgacttgatagaatatctcctcaaggaatacactcctcagatttatacatattctaatgagcgcgtccccataactggttcaaaattaattctttgtggattttctcaagttacatttatggcgtatacaacgtcgcatataacaacaaataaaaaggtagatgttctcgtttccaaaaaatgtatagatgaactagtcgatccaataaattatcaaatacttcaaaatttatttgataaaggaagcggaacaataaacaaaatactcaggaagatattttattcggtaacaggtggccaaactccataggtagctttttctatttcggattttagaatttccaaattcaccagcgatttatcggttttggtgaaatccaaggatttattaatgtccacaaatgccatttgttttgtctgtggattgtatttgaaaatggaaacgatgtagttagatagatgcgctgcgaagtttcctattagggttccgcgcttcacgtcacccagcatacttgaatcaccatcctttaaaaaaaatgataagatatcaacatggagtatatcatactcggattttaattcttctactgcatcactgacattttcacaaatactacaatacggtttaccgaaaataatcagtacgttcttcatttatgggtatcaaaaacttaaaatcgttactgctggaaaataaatcactgacgatattagatgataatttatacaaagtatacaatggaatatttgtggatacaatgagtatttatatagccgtcgccaattgtgtcagaaacttagaagagttaactacggtattcataaaatacgtaaacggatgggtaaaaaagggagggcatgtaaccctttttatcgatagaggaagtataaaaattaaacaagacgttagagacaagagacgtaaatattctaaattaaccaaggacagaaaaatgttagaattagaaaagtgtacatccgaaatacaaaatgttaccggatttatggaagaagaaataaaggcagaaatgcaattaaaaatcgataaactcacatttcaaatatatttatctgattctgataacataaaaatatcattgaatgagatactaacacatttcaacaataatgagaatgttacattattttattgtgatgaacgagacgcagaattcgttatgtgtctcgaggctaaaacacatttctctaccacaggagaatggccgttgataataagtaccgatcaggatactatgctatttgcatctgctgataatcatcctaagatgataaaaaacttaactcaactgtttaaatttgttccctcggcagaggataactatttagcaaaattaacggcgttagtgaatggatgtgatttctttcctggactctatggggcatctataacacccaccaacttaaacaaaatacaattgtttagtgattttacaatcgataatatagtcactagtttggcaattaaaaattattatagaaagactaactctaccgtagacgtgcgtaatattgttacgtttataaacgattacgctaatttagacgatgtctactcgtatattcctccttgtcaatgcactgttcaagaatttatattttccgcattagatgaaaaatggaatgaatttaaatcatcttatttagaaagcgtgccgttaccctgccaattaatgtacgcgttagaaccacgcaaggagattgatgtttcagaagttaaaactttatcatcttatatagatttcgaaaatactaaatcagatatcgatgttataaaatctatatcctcgatcttcggatattctaacgaaaactgtaacacgatagtattcggcatctataaggataatttactactgagtataaataattcattttactttaacgatagtctgttaataaccaatactaaaagtgataatataataaatataggttactagattaaaaatggtgttccaactcgtgtgctctacatgcggtaaagatatttctcacgaacgatataaattgattatacgaaaaaaatcattaaaggatgtactcgtcagtgtaaagaacgaatgttgtaggttaaaattatctacacaaatagaacctcaacgtaacttaacagtgcaacctctattggatataaactaatatggatccggttaattttatcaagacatatgcgcctagaggttctattatttttattaattataccatgtcattaacaagtcatttgaatccatcgatagaaaaacatgtgggtatttattatggtacgttattatcggaacacttggtagttgaatctacctatagaaaaggagttcgaatagtcccattggatagtttttttgaaggatatcttagtgcaaaagtatacatgttagagaatattcaagttatgaaaatagcagctgatacgtcattaactttattgggtattccgtatggatttggtcataatagaatgtattgttttaaattggtagctgactgttataaaaatgccggtattgatacatcgtctaaacgaatattgggcaaagatatttttctgagccaaaacttcacagacgataatagatggataaagatatatgattctaataatttaacattttggcaaattgattaccttaaagggtgagttaatatgcataactactcctccgttgttttttccctcgttctttttcttaacgttgtttgccatcactctcataatgtaaagatattctaaaatggtaaacttttgcatatcggacgcagaaattggtataaatgttgtaattgtattatttcccgtcaatggactagtcacagctccatcagttttatatcctttagagtatttctcactcgtgtctaacattctagagcattccatgatctgtttatcgttgatattggccggaaagatagattttttattttttattatattactattggcaattgtagatataacttctggtaaatatttttctaccttttcaatctcttctattttcaagccggctatatattctgctatattgttgctagtatcaataccttttctggctaagaagtcatatgtggtattcactatatcagttttaactggtagttccattagcctttccacttctgcagaataatcagaaattggttctttaccagaaaatccagctactataataggctcaccgatgatcattggcaaaatcctatattgtaccagattaatgagagcatatttcatttccaataattctgctagttcttgagacattgatttatttgatgaatctagttggttctctagatactctaccatttctgccgcatacaataacttgttagataaaatcagggttatcaaagtgtttagcgtggctagaatagtgggcttgcatgtattaaagaatgcggtagtatgagtaaaccgttttaacgaattatatagtctccagaaatctgtggcgttacatacatgagccgaatgacatcgaagattgtccaatatttttaatagctgctctttgtccattatttctatatttgactcgcaacaattgtagataccattaatcaccgattcctttttcgatgccggacaatagcacaattgtttagctttggactctatgtattcagaattaatagatatatctctcaatacagattgcactatacattttgaaactatgtcaaaaattgtagaacgacgctgttctgcagccatttaactttaaataatttacaaaaatttaaaatgagcatccgtataaaaatcgataaactgcgccaaattgtggcatatttttcagagttcagtgaagaagtatctataaatgtagactcgacggatgagttaatgtatatttttgccgccttgggcggatctgtaaacatttgggccattatacctctcagtgcatcagtgttttaccgaggagccgaaaatattgtgtttaatcttcctgtgtccaaggtaaaatcgtgtttgtgtagttttcacaatgatgccatcatagatatagaacctgatctggaaaataatctagtaaaactttctagttatcatgtagtaagtgtcgattgtaacaaggaactgatgcctattaggacagatactactatttgtctaagtatagatcaaaagaaatcttacgtgtttaattttcacaagtatgaagaaaaatgttgtggtagaaccgtcattcattaagtgacattataattttaccaatattggaattataatataggtgtatttgcgcacttgcgacggttgatgcatcggtaaatatagctgtatctaatgttctagtcggtatttcatcatttcgctgtctaataatagcgttttctctatctgtttccattacagctgcctgaagtttattggtcggataatatgtaaaataataagaaatacatacgaataacaaaaataaaataagatataataaagatgccatttagagatctaattttgtttaacttgtccaaattcctacttacagaagatgaggaatcgttggagatagtgtcttccttatgtagaggatttgaaatatcttataatgacttgataacttactttccagataggaaataccataaatatatttataaagtatttgaacatgtagatttatcggaggaattaagtatggaattccatgatacaactctgagagatttagtctatcttagattgtacaagtattccaagtgtatacggccgtgttataaattaggagataatctaaaaggcatagttgttataaaggacaggaatatttatattagggaagcaaatgatgacttgatagaatatctcctcaaggaatacactcctcagatttatacatattctaatgagcgcgtccccataactggttcaaaattaattctttgtggattttctcaagttacatttatggcgtatacaacgtcgcatataacaacaaataaaaaggtagatgttctcgtttccaaaaaatgtatagatgaactagtcgatccaataaattatcaaatacttcaaaatttatttgataaaggaagcggaacaataaacaaaatactcaggaagatattttattcggtaacaggtggccaaactccataggtagctttttctatttcggattttagaatttccaaattcaccagcgatttatcggttttggtgaaatccaaggatttattaatgtccacaaatgccatttgttttgtctgtggattgtatttgaaaatggaaacgatgtagttagatagatgcgctgcgaagtttcctattagggttccgcgcttcacgtcacccagcatacttgaatcaccatcctttaaaaaaaatgataagatatcaacatggagtatatcatactcggattttaattcttctactgcatcactgacattttcacaaatactacaatacggtttaccgaaaataatcagtacgttcttcatttatgggtatcaaaaacttaaaatcgttactgctggaaaataaatcactgacgatattagatgataatttatacaaagtatacaatggaatatttgtggatacaatgagtatttatatagccgtcgccaattgtgtcagaaacttagaagagttaactacggtattcataaaatacgtaaacggatgggtaaaaaagggagggcatgtaaccctttttatcgatagaggaagtataaaaattaaacaagacgttagagacaagagacgtaaatattctaaattaaccaaggacagaaaaatgctagaattagaaaagtgtacatccgaaatacaaaatgttaccggatttatggaagaagaaataaaggcagaaatgcaattaaaaatcgataaactcacatttcaaatatatttatctgattctgataacataaaaatatcattgaatgagatactaacacatttcaacaataatgagaatgttacattattttattgtgatgaacgagacgcagaattcgttatgtgtctcgaggctaaaacacatttctctaccacaggagaatggccgttgataataagtaccgatcaggatactatgctatttgcatctgctgataatcatcctaagatgataaaaaacttaactcaactgtttaaatatgttccatctgcagaggataactatttagcaaaattaacggcgttagtgaatggatgtgatttctttcctggactctatggggcatctataacacccaccaacttaaacaaaatacaattgtttagtgattttacaatcgataatatagtcactagtttggcaattaaaaattattatagaaagactaactctaccgtagacgtgcgtaatattgttacgtttataaacgattacgctaatttagacgatgtctactcgtatgttcctccttgtcaatgcactgttcaagaatttatattttccgcattagatgaaaaatggaatgaatttaaatcatcttatttagagaccgtgccgttaccctgtcaattaatgtacgcgttagaaccacgtaaggagattgatgtttcagaagttaaaactttatcatcttatatagatttcgaaaatactaaatcagatatcgatgttataaaatctatatcctcgatcttcggatattctaacgaaaactgtaacacgatagtattcggcatctataaggataatttactactgagtataaataattcattttactttaacgatagtctgttaataaccaatactaaaagtgataatataataaatataggttactagattaaaaatggtgttccaactcgtgtgctctacatgcggtaaagatatttctcacgaacgatataaattgattatacgaaaaaaatcattaaaggatgtactcgtcagtgtaaagaacgaatgttgtaggttaaaattatctacacaaatagaacctcaacgtaacttaacagtgcaacctctattggatataaactaatatggatccggttaattttatcaagacatatgcgcctagaggttctattatttttattaattataccatgtcattaacaagtcatttgaatccatcgatagaaaaacatgtgggtatttattatggtacgttattatcggaacacttggtagttgaatctacctatagaaaaggagttcgaatagtcccattggatagtttttttgaaggatatcttagtgcaaaagtatacatgttagagaatattcaagttatgaaaatagcagctgatacgtcattaactttattgggtattccgtatggatttggtcataatagaatgtattgttttaaattggtagctgactgttataaaaatgccggtattgatacatcgtctaaacgaatattgggcaaagatatttttctgagccaaaacttcacagacgataatagatggataaagatatatgattctaataatttaacattttggcaaattgattaccttaaagggtgagttaatatgcataactactcctccgttgttttttccctcgttctttttcttaacgttgtttgccatcactctcataatgtaaagatattctaaaatggtaaacttttgcatatcggacgcagaaattggtataaatgttgtaattgtattatttccatattattatgaagactcctggtaatactgatggcgttttccagggaatattctatgactgaatgttctcaagaactacaaaagttttctttcaaaatagctatctcgtctctcaacaaactacgaggattcaaaaagagagtcaatgtttttgaaactagaatcgtaatggataatgacgataacattttaggaatgttgttttcggatagagttcaatcctttaagatcaacatctttatggcgtttttagattaatactttcaatgagataaatatgggtggcggagtaagtgttgagctccctaaacgggatccgcacccgggagtacccactgatgagatgttattaaacgtggataaaatgcatgacgtgatagctcccgctaagcttttagaatatgtgcatataggaccactagcaaaagataaagaggataaagtaaagaaaagatatccagagtttagattagtcaacacaggacccggtggtctttcggcattgttaagacaatcgtataatggaaccgcacccaattgctgtcgcacttttaatcgtactcattattggaagaaggatggaaagatatcagataagtatgaagagggtgcagtattagaatcgtgttggccagacgttcacgacactggaaaatgcgatgttgatttattcgactggtgtcagggggatacgttcgatagaaacatatgccatcagtggatcggttcagcctttaataggagtaatagaactgtagagggtcaacaatcgttaataaatctgtataataagatgcaaacattatgtagtaaagatgctagtgtaccaatatgcgaatcatttttgcattatttacgcgcacacaatacagaagatagcaaagagatgatcgattatattctaagacaacagtctgcggactttaaacagaaatatatgagatgtagttatcccactagagataagttagaagagtcattaaaatatgcggaacctcgagaatgttgggatccagagtgttcgaatgccaatgttaatttcttactaacacgtaattataataatttaggactttgcaatattgtacgatgtaataccagcgtgaacaacttacagatggataaaacttcctcattaagattgtcatgtggattaagcaatagtgatagattttctactgttcccgtcaatagagcaaaagtagttcaacataatattaaacactcgttcgacctaaaattgcatttgatcagtttattatctctcttggtaatatggatactaattgtagctatttaaatgggtgccgcggcaagcatacagacgacggtgaatacactcagcgaacgtatctcgtctaaattagaacaagaagcgaacgctagtgctcaaacaaaatgtgatatagaaatcggaaatttttatatccgacaaaaccatggatgtaacctcactgttaaaaatatgtgctctgcggacgcggatgctcagttggatgctgtgttatcagccgctacagaaacatatagtggattaacaccggaacaaaaagcatacgtgccagctatgtttactgctgcgttaaacattcagacgagtgtaaacactgttgttagagattttgaaaattatgtgaaacagacttgtaattctagcgcggtcgtcgataacaaattaaagatacaaaacgtaatcatagatgaatgttacggagccccaggatctccaacaaatttggaatttattaatacaggatctagcaaaggaaattgtgccattaaagcgttgatgcaattgacgactaaggccactactcaaatagcacctagacaagttgctggtacaggagttcagttttatatgattgttatcggtgttataatattggcagcgttgtttatgtactatgccaagcgtatgttgttcacatccaccaatgataaaatcaaacttattttagccaataaggaaaacgtccattggactacttacatggacacattctttagaacttctccgatggttattgctaccacggatatgcaaaactgaaaatatattgataatattttaatagattaacatggaagttatcgctgatcgtctagacgatatagtgaaacaaaatatagcggatgaaaaatttgtagattttgttatacacggtctagagcatcaatgtcctgctatacttcgaccattaattaggttgtttattgatatactattatttgttatagtaatttatatttttacggtacgtctagtaagtagaaattatcaaatgttgttggtggtgctagtcatcacattaactattttttattactttatactataatagtactagactgacttctaacaaacatctcacctgccataaataaatgcttgatattaaagtcttctatttctaacactattccatctgtggaaaataatactctgacattatcgctaattgacacatcggtgagtgatatgcctataaagtaataatcttctttgggcacatataccagtgtaccaggttctaacaacctatttactggtgctcctgtagcatactttttctttaccttgagaatatccatcgtttgcttggtcaatagcgatatgtgattttttatcaaccactcaaaaaagtaattggagtgttcatatcctctacgggctattgtctcatggccgtgtatgaaatttaagtaacacgactgtggtagatttgttctatagagccgattgccgcaaatagatagaactaccaatatgtctgtacaaatgttaaacattaattgattaacagaaaaaacaatgttcgttctgggaatagaaaccagatcaaaacaaaattcgttagaatatatgccacgtttatacatggaatataaaataactacagtttgaaaaataacagtatcatttaaacatttaacttgcggggttaatctcacaactttactgtttttgaactgttcaaaatatagcatcgatccgtgagaaatacgtttagccgcctttaatagaggaaatcccaccgcctttctggatctcaccaacgacgatagttctgaccagcaactcatttcttcatcatccacctgttttaacatataataggcaggagatagatatccgtcattgcaatattccttctcgtaggcacacaatctaatattgataaaatctccattctcttctctgcatttattatcttgtctcggtggctgattaggctgtggtcttggtttaggccttggtctatcgttgttgaatctattttggtcattaaatctttcatttcttcctggtatatttctatcacctcgtttggttggatttttgtctatattatcgtttgtaacatcggtacgggtattcatttatcacaaaaaaaacttctctaaatgagtctactgctagaaaacctcatcgaagaagataccatattttttgcaggaagtatatctgagtatgatgatttacaaatggttattgccggcgcaaaatccaaatttccaagatctatgctttctatttttaatatagtacctagaacgatgtcaaaatatgagttggagttgattcataacgaaaatatcacaggagcaatgtttaccacaatgtataatataagaaacaatttgggtctaggagatgataaactaactattgaagccattgaaaactatttcttggatcctaacaatgaagttatgcctcttattattaataatacggatatgactgccgtcattcctaaaaaaagtggtaggagaaagaataagaacatggttatcttccgtcaaggatcatcacctatcttgtgcattttcgaaactcgtaaaaagattaatatttataaagaaaatatggaatccgcgtcgactgagtatacacctatcggagacaacaaggctttgatatctaaatatgcgggaattaatgtcctgaatgtgtattctccttccacatccataagattgaatgccatttacggattcaccaataaaaataaactagagaaacttagtactaataaggaactagaatcgtatagttctagccctcttcaagaacccattaggttaaatgattttctgggactattggaatgtgttaaaaagaatattcctctaacagatattccgacaaaggattgattactataaatggagaatgttcctaatgtatactttaatcctgtgtttatagagcccacgtttaaacattctttattaagtgtttataaacacagattaatagttttatttgaagtattcgttgtattcattctaatatatgtattttttagatctgaattaaatatgttcttcatgcctaaacgaaaaatacccgatcctattgatagattacgacgtgctaatctagcgtgtgaagacgataaattaatgatctatggattaccatggatgacaactcaaacatctgcgttatcaataaatagtaaaccgatagtgtataaagattgtgcaaagcttttgcgatcaataaatggatcacaaccagtatctcttaacgatgttcttcgcagatgatgattcattttttaagtatttggctagtcaagatgatgaatcttcattatctgatatattgcaaatcactcaatatctagactttctgttattattattgatccaatcaaaaaataaattagaagctgtgggtcattgttatgaatctctttcagaggaatacagacaattgacaaaattcacagactttcaagattttaaaaaactgtttaacaaggtccctattgttacagatggaagggtcaaacttaataaaggatatttgttcgactttgtgattagtttgatgcgattcaaaaaagaatcctctctagctaccaccgcaatagatcctgttagatacatagatcctcgtcgtgatatcgcattttctaacgtgatggatatattaaagtcgaataaagtgaacaataattaattctttattgtcatcatgaacggcggacatattcagttgataatcggccccatgttttcaggtaaaagtacagaattaattagacgagttagacgttatcaaatagctcaatataaatgcgtgactataaaatattctaacgataatagatacggaacgggactatggacgcatgataagaataattttgaagcattggaagcaactaaactatgtgatgtcttggaatcaattacagatttctccgtgataggtatcgatgaaggacagttctttccagacattgtttaattctgtgagcgtatggcaaacgaaggaaaaatagttatagtagccgcactcgatgggacatttcaacgtaaaccgtttaataatattttgaatcttattccattatctgaaatggtggtaaaactaactgctgtgtgtatgaaatgctttaaggaggcttccttttctaaacgattgggtgaggaaaccgagatagagataataggaggtaatgatatgtatcaatcggtgtgtagaaagtgttacgtcggctcataatattatattttttatctaaaaaactaaaaataaacattgattaaattttaatataatacttaaaaatggatgttgtgtcgttagataaaccgtttatgtattttgaggaaattgataatgagttagattacgaaccagaaagtgcaaatgaggtcgcaaaaaaactgccgtatcaaggacagttaaaactattactaggagaattattttttcttagtaagttacagcgacacggtatattagatggtgccaccgtagtgtatataggatcggctcctggtacacatatacgttatttgagagatcatttctataatttaggagtgatcatcaaatggatgctaattgacggccgccatcatgatcctattttaaatggattgcgtgatgtaactctagtgactcggttcgttgatgaggaatatctacgatccatcaaaaaacaactgcatccttctaagattattttaatttctgatgtaagatccaaacgaggaggaaatgaacctagtacggcggatttactaagtaattacgctctacaaaatgtcatgattagtattttaaaccccgtggcatctagtcttaaatggagatgcccgtttccagatcaatggatcaaggacttttatatcccacacggtaataaaatgttacaaccttttgctccttcatattcagctgaaatgagattattaagtatttataccggtgagaacatgagactgactcgagttaccaaattagacgctgtaaattatgaaaaaaagatgtactaccttaataagatcgtccgtaacaaagtagttgttaactttgattatcctaatcaggaatatgactattttcacatgtactttatgctgaggaccgtgtactgcaataaaacatttcctactactaaagcaaaggtactatttctacaacaatctatatttcgtttcttaaatattccaacaacatcaactgaaaaagttagtcatgaaccaatacaacgtaaaatatctagcaaaaattctatgtctaaaaacagaaatagcaagagatccgtacgcggtaataaatagaaacgtactactgagatatactaccgatatagagtataatgatttagttactttaataaccgttagacataaaattgattctatgaaaactgtgtttcaggtatttaacgaatcatccataaattatactccggttgatgatgattatggagaaccaatcattataacatcgtatcttcaaaaaggtcataacaagtttcctgtaaattttctatacatagatgtggtaatatctgacttatttcctagctttgttagactagatactacagaaactaatatagttaatagtgtactacaaacaggcgatggtaaaaagactcttcgtcttcccaaaatgttagagacggaaatagttgtcaagattctctatcgccctaatataccattaaaaattgttagatttttccgcaataacatggtaactggagtagagatagccgatagatctgttatttcagtcgctgattaatcaattagtagagatgagataagaacattataataatcaataatatatcttatatcttatatcttatatcttatatcttgtttagaaaaatgctaatattaaaatagctaacgctagtaatccaatcggaagccatttgatatctataatagggtatctaatttcctgatttaaatagcggacagctatattctcggtagctactcgtttggaatcacaaacattatttacatctaatttactatctgtaatggaaacgtttcccaatgaaatggtacaatccgatacattgcattttgttatatttttttttaaagaggctggtaacaacgcatcgcttcgtttacatggctcgtaccaacaataatagggtaatcttgtatctattcctatccgtactatgcttttatcaggataaatacatttacatcgtatatcgtctttgttagcatcacagaatgcataaatttgttcgtccgtcatgataaaaatttaaagtgtaaatataactattatttttatagttgtaataaaaagggaaatttgattgtatactttcggttctttaaaagaaactgacttgataaaaatggctgtaatctctaaggttacgtatagtctatatgatcaaaaagagattaatgctacagatattatcattagtcatgttaaaaatgacgacgatatcggtaccgttaaagatggtagactaggtgctatggatggggcattatgtaagacttgtgggaaaacggaattggaatgtttcggtcactggggtaaagtaagtatttataaaactcatatagttaagcctgaatttatttcagaaattattcgtttactgaatcatatatgtattcactgcggattattgcgttcacgagaaccgtattccgacgatattaacctaaaagagttatcgggacacgctcttaggagattaaaggataaaatattatccaagaaaaagtcatgttggaacagtgaatgtatgcaaccgtatcaaaaaattactttttcaaagaaaaaggtttgtttcgtcaacaagttggatgatattaacgttcctaattctctcatctatcaaaagttaatttctattcatgaaaagttttggccattattagaaattcatcaatatccagctaacttattttatacagactactttcccatccctccgttgattattagaccggctattagtttttggatagatagtatacccaaagagaccaatgaattaacttacttattaggtatgatcgttaagaattgtaacttgaatgctgatgaacaggttatccagaaggcggtaatagaatacgatgatattaaaattatttctaataacactaccagtatcaatttatcatatattacatccggcaaaaataatatgattagaagttatatcgtcgcccgacgaaaagatcagaccgctagatctgtaattggtcccagtacatctatcaccgttaatgaggtaggaatgcccgcatatattagaaatacacttacagaaaagatatttgttaatgcctttacagtggataaagttaaacaactattagcgtcaaaccaagttaaattttactttaataaacgattaaaccaattaacaagaatacgccaaggaaagtttattaaaaataaaatacatttattgcctggtgattgggtagaagtagctgttcaagaatatacaagtattatttttggaagacagccgtctctacatagatacaacgtcatcgcttcatctatcagagctaccgaaggagatactatcaaaatatctcccggaattgccaactctcaaaatgctgatttcgacggggatgaggaatggatgatattagaacaaaatcctaaagctgtaattgaacaaagtattcttatgtatccgacgacgttactcaaacacgatattcatggagcccccgtttatggatctattcaagatgaaatcgtagcagcgtattcattgtttaggatacaagatctttgtttagatgaagtattgaacatcttggggaaatatggaagagagttcgatcctaaaggtaaatgtaaattcagcggtaaagatatctatacttacttgataggtgaaaagattaattatccgggtctcttaaaggatggtgaaattattgcaaacgacgtagatagtaattttgttgtggctatgaggcatctgtcattggctggactcttatccgatcataagtcgaacgtggaaggtatcaactttattatcaagtcatcttatgtttttaagagatatctatctatttacggttttggggtgacattcaaagatctgagaccaaattcgacgttcactaataaattggaggccatcaacgtagaaaaaatagaacttatcaaagaagcatacgccaaatatctcaacgatgtaagagacgggaaaatagttccattatctaaagctttagaggcggactatgtggaatccatgttatccaacttgacaaatcttaatatccgagagatagaagaacatatgagacaaacgctgatagatgatccagataataacctcctgaaaatggccaaagcgggttataaagtaaatcccacagaactaatgtatattctaggtacgtatggacaacaaaggattgatggtgaaccagcagagactcgagtattgggtagagttttaccttactatcttccagactctaaggatccagaaggaagaggttatattcttaattctttaacaaaaggattaacgggttctcaatattacttttcgatgctggttgcaagatctcaatctactgatatcgtctgtgaaacatcacgtaccggaacactggctagaaaaatcattaaaaagatggaggatatggtggtcgacggatacggacaagtagttataggtaatacgctcatcaagtacgccgccaattataccaaaattctaggctcagtatgtaaacctgtagatcttatctatccagatgagtccatgacttggtatttggaaattagtgctctgtggaataaaataaaacagggattcgtttactctcagaaacagaaacttgcaaagaagacattggcgccgtttaatttcctagtattcgtcaaacccaccactgaggataatgctattaaggttaaggatctgtacgatatgattcataacgtcattgatgatgtgagagagaaatacttctttacggtatctaatatagattttatggagtatatattcttgacgcatcttaatccttctagaattagaattacaaaagaaacggctatcactatctttgaaaagttctatgaaaaactcaattatactctaggtggtggaactcctattggaattatttctgcacaggtattgtctgagaagtttacacaacaagccctgtccagttttcacactactgaaaaaagtggtgccgtcaaacaaaaacttggtttcaacgagtttaataacttgactaatttgagtaagaataagaccgaaattatcactctggtatccgatgatatctctaaacttcaatctgttaagattaatttcgaatttgtatgtttgggagaattaaatccaaacatcactcttcgaaaagaaacagataggtatgtagtagatataatagtcaatagattatacatcaagagagcagaaataaccgaattagtcgtcgaatatatgattgaacgattcatctcctttagcgtcattgtaaaggaatggggtatggagacattcattgaggacgaggataatattagatttactgtctacctaaatttcgttgaaccggaagaattgaatcttagtaagtttatgatggttcttccgggggcagccaacaagggaaagattagtaaattcaagattcctatctctgactatacgggatatgacgacttcaatcaaacaaaaaagctcaataagatgactgtagaactcatgaatctaaaagaattgggttctttcgatttggaaaacgtcaacgtgtatcctggagtatggaatacatacgatatcttcggtatcgaggccgctcgtgaatacttgtgcgaagccatgttaaacacctatggagaagggttcgattatctgtatcagccttgtgatcttctcgctagtttactatgtgctagttacgaaccagaatcagtgaataaattcaagttcggcgcagctagtactcttaagagagctacgttcggagacaataaagcattgttaaacgcggctcttcataaaaagtcagaacctattaacgataatagtagctgccacttttttagcaaggtccctaatataggaactggatattacaaatactttatcgacttgggtcttctcatgagaatggaaaggaaactatctgataagatatcttctcaaaagatcaaggaaatggaagaaacagaagacttttaattcttatcaataacatatttttctatgatctgtcttttaaacgatggattttccacaaatgcgcctctcaagtccctcatagaatgatacacgtataaaaaatatagcataggcaatgactccttatttttagacattagatatgccaaaatcatagccccgcttctatttactcccgcagcacaatgaaccaacacgggctcgtttcgttgatcacatttagataaaaaggcggttacgtcgtcaaaatatttactaatatcggtagttgtatcatctaccaacggtatatgaataatattaatattagagttaggtaatgtatatttatccatcgtcaaatttaaaacatatttgaacttaacttcagatgatggtgcatccatagcatttttataatttcccaaatacacattattggttacccttgtcattatagtgggagatttggctctgtgcatatctccagttgaacgtagtagtaagtatttatacaaacttttcttatccatttataacgtacaaatggataaaactactttatcggtaaacgcgtgtaatttagaatacgttagagaaaaggctatagtaggcgtacaagcagccaaaacatcaacacttatattctttgttattatattggcaattagtgcgctattactctggtttcagacgtctgataatccagtctttaatgaattaacgagatatatgcgaattaaaaatacggttaacgattggaaatcattaacggatagcaaaacaaaattagaaagtgatagaggtagacttctagccgctggtaaggatgatatattcgacttcaaatgtgtggatttcggcgcctattttatagctatgcgattggataagaaaacatatctgccgcaagctattaggcgaggtactggagacgcgtggatggttaaaaaggcggcaaaggtcgatccatctgctcaacaattttgtcagtatttgataaaacacaagtctaataatgttattacttgtggtaatgagatgttaaatgaattaggttatagcggttattttatgtcaccgcattggtgttccgattttagtaatatggaatagtgttagataaatgcggtaacgaatgttcctgtaaggaaccataacagcttagatttaacgttaaagatgagcataaacataataaacaaaattacaatcaaacttataacattaatatcaaacaatccaaaaaatgaaatcagtggagtagtaaacgcgtacataactcctggataacgtttagcagctgccgttcctattctagaccaaaaattcggtttcatgttttcgaaacggtattctgcaacaagtcgaggatcgtgttctacatatttggcggcattatccagtatctgcctattgatcttcatttcgttttcaattctggctatttcaaaataaaatcccgatgatagacctccagactttataatttcatctacgatgttcagcgccgtagtaactctaataatataggctgataagctaacatcataccctcctgtatatgtgaatatggcatgatttttgtccattacaagctcggttttaactttattgcctgtaataatttctctcatctgtaggatatctatttttttgtcatgcattgccttcaagacgggacgaagaaacgtaatatcctcaataacgttatcgttttctacaataactacatattctacctttttattttctaactcggtaaaaaaattagaatcccatagggctaaatgtctagcgatatttcttttcgtttcctctgtacacatagtgttacaaaaccctgaaaagaagtgagtatacttgtcatcatttctaatgtttcctccagtccactgtataaacgcataatccttgtaatgatctggatcatccttgactaccacaacatttcttttttctggcataacttcgttgtcctttacatcatcgaacttctgatcattaatatgctcatgaacattaggaaatgtttctgatggaggtctatcaataactggcacaacaataacaggagttttcaccgccgccatttagttattgaaattaatcatatacaactctttaatacgagttatattttcgtctatccattgtttcacattgacatatttcgacaaaaagatataaaatgcgtattccaatgcttctctgtttaatgaattactaaaatatacaaacacgtcactgtctggcaataaatgatatcttagaatattgtaacaatgtaaggaaccataacagtttagatttaacgttaaagatgagcataaacataataaacaaaattacaatcaaacctataacattaatatcaaacaatccaaaaaatgaaatcagtggagtagtaaacgcgtacataactcctggataacgtttagcagctgccgttcctattctagaccaaaaatttggtttcatgttttcgaaacggtattctgcaacaagtcggggatcgtgttctacatatttggcggcattatccagtatctgcctattgatcttcatttcgttttcgattctggctatttcaaaataaaatcccgatgatagacctccagactttataatttcatctacgatgttcagcgccgtagtaactctaataatataggctgataagctaacatcataccctcctgtatatgtgaatatggcatgatttttgtccattacaagctcggttttaactttattgcctgtaataatttctctcatctgtaggatatctatttttttgtcatgcattgccttcaagacgggacgaagaaacgtaatatcctcaataacgttatcgttttctacaataactacatattctacctttttattttctaactcggtaaaaaaattagaatcccatagggctaaatgtctagcgatatttcttttcgtttcctctgtacacatagtgttacaaaaccctgaaaagaagtgagtatacttgtcatcatttctaatgtttcctccagtccactgtataaacgcataatccttgtaatgatctggatcatccttgactaccacaacatttcttttttctggcataacttcgttgtcctttacatcatcgaacttctgatcattaatatgctcatgaacattaggaaatgtttctgatggaggtctatcaataactggcacaacaataacaggagttttcaccgccgccatttagttattgaaattaatcatatacaactctttaatacgagttatattttcgtctatccattgtttcacatttacatatttcgacaaaaagatataaaatgcgtattccaatgcttctctgtttaatgaattactaaaatatacaaacacgtcactgtctggcaataaatgatatcttagaatattgtaacaatttattttgtattgcacatgttcgtgatctatgagttcttcttcgaatggcataggatctccgaatctgaaaacgtataaataggagttagaataataatatttgagagtattggtaatatataaactctttagcggtataattagtttttttctctcaatttctatttttagatgtgatggaaaaatgactaattttgtagcattagtatcatgaactctaatcaaaatcttaatatcttcgtcacacgttagctctttgaagtttttaagagatgcatcagttggttctacagatggagtaggtgcaacaattttttgttctacacatgtatgtactggagccattgttttaactataatggtgcttgtatcgaaaaactttaatgcagatagcggaagctcttcgccgcgactttctacgtcgtaattgggttctaacgccgatctctgaatggatactagttttctaagttctaatgtgattctctgaaaatgtaaatccaattcctccggcattatagatgtgtatacatcggtaaataaaactatagtatccaacgatcccttctcgcaaattctagtcttaaccaaaaaatcgtatataaccacggagatggcgtatttaagagtggattcttctaccgttttgttcttggatgtcatataggaaactataaagtccgcactactgttaagaatgattactaacgcaactatatagtttaaattaagcattttggaaacataaaataactctgtagacgatacttgactttcgaataagtttgcagacaaacgaagaaagaacagacctctcttaatttcagaagaaaactttttttcgtattcctgacgtctagagtttatatcaataagaaagttaagaattagtcggttaatgttgtatttcattacccaagtttgagatttcataatattatcaaaagacatgataatattaaagataaagcgctgactatgaacgaaatagctatatggttcgctcaagaatatagtcttgttaaacgtggaaacgataactgtatttttaatcacgtcagcggcatctaaattaaatataggtatatttattccacacactctacaatatgccacaccatcttcataataaataaattcgttagcaaaattattaattttagtgaaatagttagcgtcaactttcatagcttccttcaatctaatttgatgctcacacggtgcgaattccactctaacatcccttttccatgcctcaggttcatcgatctctataatatctagttttttgcgtttcacaaacacaggctcgtctctcgcgatgagatctgtatagtaactatgtaaatgataactagatagaaagatgtagctatatagatgacgatcctttaagagaggtataataactttaccccaatcagatagactgttgttatggtcttcggaaaaagaatttttataaatttttccagtattttccaaatatacgtacttaacatctaaaaaatccttaatgataataggaatggataatccgtctattttataaagaaatacatatcgcacattatacttttttttggaaatgggaataccgatgtgtctacataaatatgcaaagtctaaatattttttagagaatcttagttggtccaaattcttttccaagtacggtaatagatttttcatattgaacggtatcttcttaatctctggttctagttccgcattaaatgatgaaactaagtcactatttttataactaacgattacatcacctctaacatcatcatttaccagaatactgatcttcttttgtcgtaaatacatgtctaatgtgttaaaaaaaagatcatacaagttatacgtcatttcatctgtggtattcttgtcattgaaggataaactcgtactaatctcttctttaacagcctgttcaaatttatatcctatatacgaaaaaatagcaaccagtgtttgatcatccgcgtcaatattctgttctatcgtagtgtataacaatcgtatatcttcttctgtgatagtcgatacgttataaaggttgataacgaaaatatttttatttcgtgaaataaagtcatcgtaggattttggacttatattcgcgtctagtagatatgcttttatttttggaatgatctcaattagaatagtctctttagagtccatttaaagttacaaacaactaggaaattggtttatgatgtataatttttttagtttttatagattctttattctatacttaaaaaatgaaaataaatacaaaggttcttgagggttgtgttaaattgaaagcgagaaataatcataaattatttcattatcgcgatatccgttaagtttgtatcgtaatggcgtggtcaattacgaataaagcggatactagtagcttcacaaagatggctgaaatcagagctcatctaaaaaatagcgctgaaaataaagataaaaacgaggatattttcccggaagatgtaataattccatctactaagcccaaaaccaaacgagccactactcctcgtaaaccagcggctactaaaagatcaaccaaaaaggaggaagtggaagaagaagtagttatagaggaatatcatcaaacaactgaaaaaaattctccatctcctggagtcagcgacattgtagaaagcgtggccgctgtagagctcgatgatagcgacggggatgatgaacctatggtacaagttgaagctggtaaagtaaatcatagtgctagaagcgatctctctgacctaaaggtggctaccgacaatatcgttaaagatcttaagaaaattattactagaatctctgcagtatcgacggttctagaggatgttcaagcagctggtatctctagacaatttacttctatgactaaagctattacaacactatctgatctagtcaccgagggaaaatctaaagttgttcgtaaaaaagttaaaacttgtaagaagtaaatgcgtgcacttttttataaagatggtaaactctttaccgataataattttttaaatcctgtatcagacgataatccagcgtatgaggttttgcaacatgttaaaattcctactcatttaacagatgtagtagtatatgaacaaacgtgggaggaggcgttaactagattaatttttgtgggaagcgattcaaaaggacgtagacaatacttttacggaaaaatgcatgtacagaatcgcaacgctaaaagagatcgtatttttgttagagtatataacgttatgaaacgaattaattgttttataaacaaaaatataaagaaatcgtccacagattccaattatcagttggcggtttttatgttaatggaaactatgttttttattagatttggtaaaatgaaatatcttaaggagaatgaaacagtagggttattaacactaaaaaataaacacatagaaataagtcccgatgaaatagttatcaagtttgtaggaaaggacaaagtttcacatgaatttgttgttcataagtctaatagactatataaaccgctattgaaactgacggatgattctagtcccgaagaatttctgttcaacaaactaagtgaacgaaaggtatacgaatgtatcaaacagtttggtattagaatcaaggatctccgaacgtatggagtcaattatacgtttttatataatttttggacaaatgtaaagtccatatctcctcttccgtcaccaaaaaagttaatagcgttaactatcaaacaaactgctgaagtggtaggtcatactccatcaatttcaaaaagagcttatatggcaacgactattttagaaatggtaaaggataaaaattttttagatgtagtatctaaaactacgttcgatgaattcctatctatagtcgtagatcacgttaaatcatctacggatggatgatatagatctttacacaaataattacaagaccgataaatggaaatggataagcgtatgaaatctctcgcaatgacagctttcttcggagagctaagcacattagatattatggcattgataatgtctatatttaaacgccatccaaacaataccattttttcagtggataaggatggtcagtttatgattgatttcgaatacgataattataaggcttctcaatatttggatctgaccctcactccgatatctggagatgaatgcaagactcacgcatcgagtatagccgaacaattggcgtgtgtggatattattaaagaggatattagcgaatatatcaaaactactccccgtcttaaacgatttataaaaaaataccgcaatagatcagatactcgcatcagtcgagatacagaaaagcttaaaatagctctagctaaaggcatagattacgaatatataaaagacgcttgttaataagtaaatgaaaaaaaactagtcgtttataataaaacacgatatggatgccaacgtagtatcatcttctactattgcgacgtatatagacgctttagcgaagaatgcttcagaattagaacagaggtctaccgcatacgaaataaataatgaattggaactagtatttattaagccgccattgattactttgacaaatgtagtgaatatctctacgattcaggaatcgtttattcgatttaccgttactaataaggaaggtgttaaaattagaactaagattccattatctaaggtacatggtctagatgtaaaaaatgtacagttagtagatgctatagataacatagtttgggaaaagaaatcattagtgacggaaaatcgtcttcacaaagaatgcttgttgagactatcgacagaggaacgtcatatatttttggattacaagaaatatggatcctctatccgactagaattagtcaatcttattcaagcaaaaacaaaaaactttacgatagactttaagctaaaatattttctaggatccggtgcccaatctaaaagttctttgttgcacgctattaatcatccaaagtcaaggcctaatacatctctggaaatagaattcacacctagagacaatgaaacagttccatatgatgaactaataaaggaattgacgactctctcgcgtcatatatttatggcttctccagagaatgtaattctttctccgcctattaacgcgcctataaaaacctttatgttgcctaaacaagatatagtaggtttggatctggaaaatctatatgccgtaactaagactgacggcattcctataactatcagagttacatcaaacgggttgtattgttattttacacatcttggttatattattagatatcctgttaagagaataatagattccgaagtagtagtctttggtgaggcagttaaggataagaactggaccgtatatctcattaagctaatagagcccgtgaatgctatcagtgatagactagaagaaagtaagtatgttgaatctaaactagtggatatttgtgatcggatagtattcaagtcaaagaaatacgaaggtccgtttactacaactagtgaagtcgtcgatatgttatctacatatttaccaaagcaaccagaaggtgttattctgttctattcaaagggacctaaatctaacattgattttaaaattaaaaaggaaaatactatagaccaaactgcaaatgtagtatttaggtacatgtccagtgaaccaattatctttggagaatcgtctatctttgtagagtataagaaatttagcaacgataaaggctttcctaaagaatatggttctggtaagattgtgttatataacggcgttaattatctaaataatatctattgtttggaatatattaatacacataatgaagtgggtattaagtccgtggttgtacctattaagtttatagcagaattcttagttaatggagaaatacttaaacctagaattgataaaaccatgaaatatattaactcagaagattattatggaaatcaacataatatcatagtcgaacatttaagagatcaaagcatcaaaataggagatatctttaacgaggataaactatcggatgtgggacatcaatacgccaataatgataaatttagattaaatccagaagttagttattttacgaataaacgaactagaggaccgttgggaattttatcaaactacgtcaagactcttcttatttctatgtattgttccaaaacatttttagacgattccaacaaacgaaaggtattggcgattgattttggaaacggtgctgacctggaaaaatacttttatggagagattgcgttattggtagcgacggatccggatgctgatgctatagctagaggaaatgaaagatacaacaaattaaactctggaattaaaaccaagtactacaaatttgactacattcaggaaactattcgatccgatacatttgtctctagtgtcagagaagtattctattttggaaagtttaatatcatcgactggcagtttgctatccattattcttttcatccgagacattatgctaccgtcatgaataacttatccgaactaactgcttctggaggcaaggtattaatcactaccatggacggagacaaattatcaaaattaacagataaaaagacttttataattcataagaatttacctagtagcgaaaactatatgtctgtagaaaaaatagctgatgatagaatagtggtatataatccatcaacaatgtctactccaatgactgaatacattatcaaaaagaacgatatagtcagagtgtttaacgaatacggatttgttcttgtagataacgttgatttcgctacaattatagaacgaagtaaaaagtttattaatggcgcatctacaatggaagatagaccgtctacaaaaaactttttcgaactaaatagaggagccattaaatgtgaaggtttagatgtcgaagacttacttagttactatgttgtttatgtcttttctaagcggtaaataataatatggtatgggttctgatatccccgttctaaatgcattaaataattccaatagagcgatttttgttcctataggaccttccaactgtggatactctgtattgttaatagatatattaatacttttgtcgggtaacagaggttctacgtcttctaaaaataaaagttttataacatctggcctgttcataaataaaaacttggcgattctatatatactcttattatcaaatctagccattgtcttatagatgtgagctactgtaggtgtaccatttgattttctttctaatactatatatttctctcgaagaagttcttgcacatcatctgggaataaaatactactgttgagtaaatcagttattttttttatatcgatattgatggacatttttatagttaaggataataagtatcccaaagtcgataacgacgataacgaagtatttatacttttaggaaatcacaatgactttatcagattaaaattaacaaaattaaaggagcatgtatttttttctgaatatattgtgactccagatacatatggatctttatgcgtcgaattaaatgggtctagttttcagcacggtggtagatatatagaggtggaggaatttatagatgctggaagacaagttagatggtgttctacatccaatcatatatctaaagatatacccgaagatatgcacactgataaatttgtcatttatgatatatacacttttgacgctttcaagaataaacgattggtattcgtacaggtacctccgtcgttaggagatgatagtcatttgactaatccgttattgtctccgtattatcgtaattcagtagccagacaaatggtcaataatatgatttttaatcaagattcatttttaaaatatttattagaacatctgattagaagccactatagagtttctaaacatataacaatagttagatacaaggataccgaagaattaaatctaacgagaatatgttataatagagataagtttaaggcgtttgtattcgcttggtttaacggcgtttcggaaaatgaaaaggtactagatacgtataaaaaggtatctaatttgatataatgaattcagtgactgtatcacacgcgccatatactattacttatcacgatgattgggaaccagtaatgagtcaattggtagagttttataacgaagtagccagttggctgctacgagacgagacgtcgcctattcctgataagttctttatacagttgaaacaaccgcttagaaataaacgagtatgtgtgtgcggtatagatccgtatccgaaagatggaactggtgtaccgttcgaatcaccaaattttacaaaaaaatcaattaaggagatagcttcatctatatctagattaaccggagtaattgattataaaggttataaccttaatataatagacggggttataccctggaattattacttaagttgtaaattaggagaaacaaaaagtcacgcgatctactgggataagatttccaagttactgctgcagcatataactaaacacgttagtgttctttattgtttgggtaaaacagatttctcgaatatacgggcaaagttagaatccccggtaactaccatagtcggatatcatccagcggctagagaccgccaattcgagaaagatagatcatttgaaattatcaacgttttactggaattagacaacaaggcacctataaattgggctcaagggtttatttattaatgctttagtgaaattttaacttgtgttctaaatggatgcggctattagaggtaatgatgttatctttgttcttaagactataggtgtcccgtcagcgtgcagacaaaatgaagatccaagatttgtagaagcatttaaatgcgacgagttagaaagatatattgagaataatccagaatgtacactattcgaaagtcttagggatgaggaagcatactctatagtcagaattttcatggatgtagatttagacgcgtgtctagacgaaatagattatttaacggctattcaagattttattatcgaggtgtcaaactgtgtagctagattcgcgtttacagaatgcggtgccattcatgaaaatgtaataaaatccatgagatctaatttttcattgactaagtctacaaatagagataaaacaagttttcatattatctttttagacacgtataccactatggatacattgatagctatgaaacgaacactattagaattaagtagatcatctgaaaatccactaacaagatcgatagacactgccgtatataggagaaaaacaactcttcgggttgtaggtactaggaaaaatccaaattgcgacactattcatgtaatgcaaccaccgcatgataatatagaagattacctattcacttacgtggatatgaacaacaatagttattacttttctctacaacaacgattggaggatttagttcctgataagttatgggaaccagggtttatttcattcgaagacgctataaaaagagtttcaaaaatattcattaattctataataaactttaatgatctcgatgaaaataattttacaacggtaccactggtcatagattacgtaacaccttgtgcattatgtaaaaaacgatcgcataaacatccgcatcaactatcgttggaaaatggtgctattagaatttacaaaactggtaatccacatagttgtaaagttaaaattgttccgttggatggtaataaactgtttaatattgcacaaagaattttagacactaactctgttttattaaccgaacgaggagaccatatagtttggattaataattcatggaaatttaacagcgaagaacccttgataacaaaactaattttgtcaataagacatcaactacctaaggaatattcaagcgaattactctgtccgaggaaacgaaagactgtagaagctaacatacgagacatgttagtagattcagtggagaccgatacctatccggataaacttccgtttaaaaatggtgtattggacctggtagacggaatgttttactctggagatgatgctaaaaaatatacgtgtactgtatcaaccggatttaaatttgacgatacaaagttcgtcgaagacagtccagaaatggaagagttaatgaatatcattaacgatatccaaccattaacggatgaaaataagaaaaatagagagctatatgaaaaaacattatctagttgtttatgcggtgctaccaaaggatgtttaacattcttttttggagaaactgcaactggaaagtcgacaaccaaacgtttgttaaagtctgctatcggtgacctgtttgttgagacgggtcaaacaattttaacagatgtattggataaaggacctaatccatttatcgctaacatgcatttgaaaagatctgtattctgtagcgaactacctgattttgcatgtagtgggtcaaagaaaatcagatctgataatattaaaaagttgacagaaccttgtgtcattggaagaccgtgtttctccaataaaattaataatagaaaccatgcgacaatcattatcgatactaattacaaacctgtttttgataggatagataacgcattaatgagaagaattgccgtcgtgcgattcagaacacacttttctcaaccttctggtagagaggctgctgaaaataatgacgcgtacgataaagtcaaactattagacgaggggttagatggtaaaatacaaaataatagatatagattcgcatttctatacttgttggtgaaatggtacagaaaatatcatgttcctattatgaaactatatcctacacccgaagagattcctgactttgcattctatctcaaaataggtactctgttggtatctagctctgtaaagcatattccattaatgacggacctctccaaaaagggatatatattgtacgataatgtggtcactcttccgttgactactttccaacagaaaatatccaagtattttaattctagactatttggacacgatatagagagcttcatcaatagacataagaaatttgccaatgttagtgatgaatatctgcaatatatattcatagaggatatttcatctccgtaaatatatgctcatatatttatagaagatatcacatatctaaatgaataccggaatcatagatttatttgataatcatgttgatagtataccaactatattacctcatcagttagctactctagattatctagttagaactatcatagatgagaacagaagcgtgttattgttccatattatgggatcaggtaaaacaataatcgctttgttgttcgccttggtagcttccagatttaaaaaggtttacattctagtgccgaacatcaacatcttaaaaattttcaattataatatgggtgtagctatgaacttgtttaatgacgaattcatagctgagaatatctttattcattccacaacaagtttttattctcttaattataacgataacgtcattaattataacggattatctcgctacaataactctatttttatcgttgatgaggcacataatatctttgggaataatactggagaacttatgaccgtgataaaaaataaaaacaagattccttttttactattgtctggatctcccattactaacacacctaatactctgggtcatattatagatttaatgtccgaagagacgatagattttggtgaaattattagtcgtggtaagaaagtaattcagacacttcttaacgaacgcggtgtgaatgtacttaaggatttgcttaaaggaagaatatcatattacgaaatgcctgataaagatctaccaacgataagatatcacggacgtaagtttctagatactagagtagtatattgtcacatgtctaaacttcaagagagagattatatgattactagacgacagctatgttatcatgaaatgtttgataaaaatatgtataacgtgtcaatggcagtattgggacaacttaatctgatgaataatttagatactttatttcaggaacaggataaggaattgtacccaaatctgaaaataaataatggcgtgttatacggagaagaattggtaacgttaaacattagttccaaatttaaatactttattaatcggatacagacactcaacggaaaacattttatatacttttctaattctacatatggcggattggtaattaaatatatcatgctcagtaatggatattctgaatataatggttctcagggaactaatccacatatgataaacggcaaaccaaaaacatttgctatcgttactagtaaaatgaaatcgtctttagaggatctattagatgtgtataattctcctgaaaacgatgatggtagtcaattgatgtttttgttttcatcaaacattatgtccgaatcctatactctaaaagaggtaaggcatatttggtttatgactatcccagatactttttctcaatacaaccaaattcttggacgatctattagaaaattctcttacgccgatatttctgaaccagttaatgtatatcttttagccgccgtatattccgatttcaatgacgaagtgacgtcattaaacgattacacacaggatgaattaattaatgttttaccatttgacatcaaaaagctgttgtatctaaaatttaagacgaaagaaacgaatagaatatactctattcttcaagagatgtctgaaacgtattctcttccaccacatccatcaattgtaaaagttttattgggagaattggtcagacaatttttttataataattctcgtattaagtataacgataccaagttacttaaaatggttacatcagttataaaaaataaagaagacgctaggaattacatagatgatattgtaaacggtcacttctttgtatcgaataaagtatttgataaatctcttttatacaaatacgaaaacgatattattacagtaccgtttagactttcctacgaaccatttgtttggggagttaactttcgtaaagaatataacgtggtatcttctccataaaactgatgagatatataaagaaataaatgtcgagctttgttaccaatggatacctttccgttacattggaacctcatgagctgacgttagacataaaaactaatattaggaatgccgtatataagacgtatctccatagagaaattagtggtaaaatggccaagaaaatagaaattcgtgaagacgtggaattacctctcggcgaaatagttaataattctgtagttataaacgttccgtgtgtaataacctacgcgtattatcacgttggggatatagtcagaggaacattaaacatcgaagatgaatcaaatgtaactattcaatgtggagatttaatctgtaaactaagtagagattcgggtactgtatcatttagcgattcaaagtactgcttttttcgaaatggtaatgcgtatgacaatggcagcgaagtcactgccgttctaatggaggctcaacaaggtatcgaatctagttttgtttttctcgcgaatatcgtcgactcataaaaaagagaatagcggtaagtataaacacgaatactatggcaataattgcgaatgttttattctcttcgatatatttttgataatatgaaaaacatgtctctctcaaatcggacaaccatctcataaaatagttctcgcgcgctggagaggtagttgccgctcgtataatctctccagaataatatacttgcgtgtcgtcgttcaatttatacggatttctatagttctctgttatataatgcggtttgccctcatgattagacgacgacaatagtgttctaaatttagatagttgatcagaatgaatgtttattggcgttggaaaaattatccatacagcgtctgcagagtggttgatagttgttcctagatatgtaaaataatccaacttactaggcagcaaattgtctagataaaatactgaatcaaacggtgcagacgtattggcggatctaatggaatccaattgattaactatcttttgaaaatatacatttttatgatccaatacttgtaagaatatagaaataatgataagtccatcatcgtgtttttttgcctcttcataagaactatattttttcttattccaatgaacaagattaatctctccagagtatttgtacacatctatcaagtgattggatccataatcgtcttcctttccccaatatatatgtagtgatgataacacatattcattggggagaaaccctccacttatatatcctcctttaaaattaatccttactagttttccagtgttctggatagtggttggtttcgactcattataatgtatgtctaacggcttcaatcgcgcgttagaaattgcttttttagtttctatattaataggagatagttgttgcggcatagtaaaaatgaaatgataactgtttaaaaatagctcttagtatgggaattacaatggatgaggaagtgatatttgaaactcctagagaattaatatctattaaacgaataaaagatattccaagatcaaaagacacgcatgtgtttgctgcgtgtataacaagtgacggatatccgttaataggagctagaagaacttcattcgcgttccaggcgatattatctcaacaaaattcagattctatctttagagtatccactaaactattacggtttatgtactacaatgaactaagagaaatctttagacggttgagaaaaggttctatcaacaatatcgatcctcactttgaagagttaatattattgggtggtaaactagataaaaaggaatctattaaagattgtttaagaagagaattaaaagaggaaagtgatgaacgtataacagtaaaagaatttggaaatgtaattctaaaacttacaacacgggataaattatttaataaagtatatataagttattgcatggcgtgttttattaatcaatcgttggaggatttatcgcatactagtatttacaatgtagaaattagaaagattaaatcattaaatgattgtattaacgacgataaatacgaatatctgtcttatatttataatatgctagttaatagtaaatgaacttttacagatctagtataattagtcagattattaagtataatagacgactagctaagtctattatttgcgaggatgactctcaaattattacactcacggcattcgttaaccaatgcctatggtgtcataaacgagtatccgtgtccgctattttattaactactgataacaaaatattagtatgtaacagacgagatagttttctctattctgaaataattagaactagaaacatgtttagaaagaaacgattatttctgaattattccaattatttgaacaaacaggaaagaagtatactatcgtcatttttttctctagatccagctactactgataatgatagaatagacgctatttatccgggtggcatacccaaaaggggtgagaatgttccagagtgtttatccagggaaattaaagaagaagttaatatagacaattcttttgtattcatagacactcggttttttattcatggcatcatagaagataccattattaataaattttttgaggtaatcttctttgtcggaagaatatctctaacgagtgatcaaatcattgatacatttaaaagtaatcatgaaatcaaggatctaatatttttagatccgaattcaggtaatggactccaatacgaaattgcaaaatatgctctagatactgcaaaacttaaatgttacggccatagaggatgttattatgaatcattaaaaaaattaactgaggatgattgattaaaaaatataaattaatttaccatcgtgtatttttataacgggattgtccggcatatcatgtagatagttaccgtctacatcgtatactcgaccatctacgcctttaaatcctctatttattgacattaatctattagaattggaataccaaatattagtaccctcaattagtttattggtaatattttttttagacgatagatcgatggctcttgaaaccaaggttttccaaccggactcattgtcgatcggtgagaagtctttttcattagcatgaatccattctaatgatgtatgtttaaacactctaaacaattggacaaattcttttgatttgctttgaatgatttcaaataggtcttcgtctacagtaggcataccattagataatctagccattataaagtgcacgtttacatatctacgttctggaggagtaagaacgtgactattgagacgaatggctcttcctactatctgacgaagagacgcctcgttccatgtcatatctaaaatgaagatatcattaattgagaaaaaactaataccctcgcctccactagaagagaatacgcatgttttaatgcattctccgttagtgtttgattcttggttaaactcagccaccgccttgattctagtatcttttgttctagatgagaactctatattagagataccaaagactttgaaatatagtaataagatttctattcctgactgattaacaaatggttcaaagactagacatttaccatgggatgctaatattcccaaacatacatctataaatttgacgcttttctcttttaattcagtaaatagagagatatcagccgcactagcatcccctttcaatagttctccctttttaaaggtatctaatgcggatttagaaaactctctatctcttaatgaatttttaaaatcattatatagtgttgctatctcttgcgcgtattcgcccggatcacgattttgtctttcaggaaagctatcgaacgtaaacgtagtagccatacgtctcagaattctaaatgatgatatacctgtttttatttcagcgagtttagccttttgataaatttcttcttgctttttcgacatattaacgtatcgcattaatactgttttcttagcgaatgatgcagacccttctacgtcatcaaaaatagaaaactcgttattaactatatacgaacatagtcctcctagtttggagactaattctttttcatcgactagacgtttattctcaaatagtgattggtgttgtaaggatcctggtcgtagtaagttaaccaacatggtgaattcttgcacactattgacgataggtgtagccgataaacaaatcatcttatggttttttaacgcaatggtcttagataaaaaattatatactgaacgagtaggacggatcttaccatcttctttgattaatgatttagaaatgaagttatgacattcatcaatgatgacgcatattctactcttggaattaatagttttgatattagtaaaaaatttatttctaaaattttgatcatcgtaattaataaaaatacaatccttcgttatctctggagcgtatctgagtatagtgttcatccaaggatcttctatcaaagcctttttcaccaataagataatagcccaattcgtataaatatccttaagatgtttgagaatatatacagtagtcattgttttaccgacacccgtttcatggaacaataaaagagaatgcatactgtctaatcctaagaaaactcttgctacaaaatgttgataatccttgaggcgtactacgtccgaccccatcatttcaacgggcatattagtagttctgcgtaaggcataatcgatataggccgcgtgtgatttactcatttatgagtgataagtaataactatgttttaaaaatcacagcagtagtttaactagtcttctctgatgtttgttttcgatactttttgaatcagaagtcatactagaataaagcaacgagtgaacgtaatagagagcttcgtatactctattcgaaaactctaagaacttattaatgaattccgtatccactggattgtttaaaatactaaattgaacactgttcacatccttccaagaagaagacttagtgacggacttaacatgagacataaataaatccaaattttttttacaaacatcactagccaccataatggcgctatctttcaaccagctatcgcttacgcattttagcagtctaacatttttaaagagactacaatatattctcatagtatcgattacacctctaccgaataaagttggaagtttaataatacaatatttttcgtttacaaaatcaaataatggtcgaaacacgtcgaaggttaacatcttataatcgctaatgtatagattgttttcagtgagatgattattagatttaatagcatctcgttcacgtttgaacagtttattgcgtgcgctgaggtcggcaactacggcgtccgctttagtactcctcccataatactttacgctattaatctttaaaatttcatagactttatctagatcgctttctggtaacatgatatcatgtgtaaaaagttttaacatgtcggtcggcattctatttagatcattaactctagaaatctgaagaaagtaattagctccgtattccagactaggtaatgggcttttacctagagacagattaagttctggcaatgtttcataaaatggaagaaggacatgcgttccctcccggatattttttacaatttcatccatttacaactctatagtttgttttcattattattagttattatctcccataatcttggtaatacttaccccttgatcgtaagataccttatacaggtcattacatacaactaccaattgtttttgtacataatagattggatggttgacatccatggtggaataaactactcgaacagatagtttatctttccccctagatacattagccgtaatagttgtcggcctaaagaatatctttggtgtaaagttaaaagttagggttcttgttccattattgctttttgtcagtagttcattataaattctcgagatgggtccgttctctgaatatagaacatcatttccaaatctaacttctagtctagaaataatatcggtcttattcttaaaatctattcccttgatgaagggatcgttaatgaacaaatccttggcctttgattcggctgatctattatctccgttatagacgttacgttgactagtccaaagacttacaggaatagatgtatcgatgatgttgatactatgtgatatgtgagcaaagattgttctcttagtggcatcactatatgttccagtaatggcggaaaactttttagaaatgttatatataaaagaattttttcgtgttccaaacattagcagattagtatgaagataaacactcatattatcaggaacattatcaatttttacatacacatcagcatcttgaatagaaacgataccatcttctggaacctctacgatctcggcagactccggataaccagtcggtgggccatcgctaacaataactagatcatccaacaatctactcacatatgcatctatataatctttttcatcttgtgagtaccctggatacgaaataaatttattatccgtatttccataataaggtttagtataaacagagagagatgttgccgcatgaacttcagttacagtcgccgttggttggtttatttgacctattactctcctaggtttctctataaacgatggtttaatttgtacattcttaaccatatatccaataaagctcaattcaggaacataaacaaattctttgttgaacgtttcaaagtcgaacgaagagtcacgaataacgatatcggatactggattgaaggttaccgttacggtaatttttgaatcggatagtttaagactgctgaatgtatcttccacatcaaacggagttttaatataaacgtatactgtagatggttctttaatagtgtcattaggagttaggccaatagaaatatcattaagttcactagaatatccagagtgtttcaaagcaattgtattattgatacaattattatataattcttcgccctcaatttcccaaataacaccgttacacgaagagatagatacgtgattaatacatttatatccaacatatggtacgtaactgaatcttcccatacctttaacttctggaagttccaaactcagaaccaaatgattaagcgcagtaatatactgatccctaatttcgaagctagcgatagcctgattgtctggaccatcgtttgtcataactccggatagagaaatatattgcggcatatataaagttggaatttgactatcgactgcgaagacattagaccgtttaatagagtcatccccaccgatcaaagaattaatgatagtattattcattttctatttaaaatggaaaaagcttacaataaactccgtagagaaatatctataatttgtgagttttccttaaagtaacagcttccgtaaacgccgtctttatctcttagtaggtttattgtatttatgaccttttccttatcttcatagaatactaaaggcaacaaagaaatttttggttcttctctaagagctacgtgagacttaaccatagaagccaacgaatccctacatattttagaacagaaataccctacttcaccacccttgtatgtctcaatactaataggtctaaaaaccaaatcttgattacaaaaccaacacttatcaattacactatttgtcttaatagacacatctgccatagatttataatactttggtagtatacaagcgagtgcttcttctttagcgggcttaaagactgctttaggtgctgaaataaccacatctggaaggcttactcgcttagccatttaattacggaactatttttttatacttctaatgagcaagtagaaaacctctcatctacaaaaacgtactcgtgtccataatcctctaccatagttacacgttttttagatctcatatgtgctaaaaagttttcccatactaattggttactattatttttcgtataatttttaacagtttgaggttttagatttttagttacagaagtgatatcgaatattttatccaaaaagaatgaataattaattgtcttagaaggagtgttttcttggcaaaagaataccaagtgcttaaatatttctactacttcattaatcttttctgtactcagattcagtttctcatcttttacttgattgattatttcaaagactaacttataatcctttttatttattctctcgttagccttaagaaaactagatacaaaatttgcatctacatcatccgtggatatttgatttttttccatgatatccaagagttccgagataatttctccagaacattgatgagacaataatctccgcaatacatttctcaaatgaataagtttattagacacgtggaagtttgactttttttgtacctttgtacatttttgaaataccgactcgcaaaaaatacaatattcatatccttgttcagatactataccgttatgtctacaaccgctacataatcgtagattcatgttaacactctacgtatctcgtcgtccaatattttatataaaaacattttatttctagacgttgccagaaaatcctgtaatatttttagttttttgggctgtgaataaagtatcgccctaatattgttaccgtcttccgccaatatagtagttaaattatccgcacatgcagaagaacaccgcttaggcggattcagtacaatgttatatttttcgtaccaactcatttaaatatcataatctaaaatagttctgtaatatgtctagcgctaatatattgatcataatcctgtgcataaattaagatacaacaatgtctcgaaatcatcgacatggcttcttccatagttagaagatcgtcgtcaaagttagcaacgtgattcatcaacatttgctgttttgaggcagcaaatactgaaccgtcgccattcaaccattcataaaaaccatcgtctgaatccattgataatttcttgtactggtttttgagagctcgcatcaatctagcatttctagctcccggattgaaaacagaaagaggatcgtacatccagggtccattttctgtaaatagaatcgtataatgtcccttcaagaagatatcagacgatccacaatcaaagaattggtctccgagtttgtaacaaactgcggactttaacctatacatgataccgtttagcataatttctggtgatacgtcaatcggagtatcatctattagagatctaaagccggtgtaacattctccaccaaacatattcttattctgacgtcgttctacataaaacatcattgctccattaacgataacaggggaatgaacagcactacccatcacattagttcccaatggatcaatgtgtgtaactccagaacatcttccatagcctatgttaggaggagcgaacaccactcttccactattgccatcgaatgccatagaataaatatccttggaattgatagaaatcggactgtcggatgttgtgatcatcttcataggattaacaactatgtatggtgccgcctgaagtttcatatcgtaactgatgccgtttataggtctagccacagaaaccaacgtaggtctaaatccaactatagacaaaatagaagccaatatctgttcctcatctgtcataacttgagagcatccagtatgaataatcttcattagatggggatctaccgcatcatcatcgttacaataaaaaattcccattctaatgttcataattgcttttctaatcatggtatgcatgtttgctctctgaatctctgtggaaattagatctgatacacctgtaatcactatcggattatcctccgtaagacgattaaccaacaacatataattataagactttacttttctaaattcataaagttgctggattaggctataggtgtctccatgtacatacgcgttctcgagcgcaggaagtttaataccgaatagtgccatcagaataggatgaatatagtaattagtttctggttttctataaataaaagacaaatcttgtgaactagacatatcggtaaaatgcatggattggaatcgtgtagtcgacagaagaatatgatgattagatggagagtatattttatctaactctttgagttggtcaccgattctaggactagctcgagaatgaataagtactaaaggatgagtacatttcacagaaacactagcattgttcaatgtgctctttacatgggtaaggagttgaaatagctcgtttctatttgttctgacaatatttagtttattcataatgttaagcatatcctgaatagtaaagttagatgtgtcatacttgttagtagttagatatttagcaattgcattcccatcatttctcaatctcgtactccaatcatgtgtagatgctacttcgtcgatggaaaccatacaatcctttttgataggctgttgagattgatcatttcctgcacgtttaggtttggtacgttgatttctagcccctgcggatataaagtcatcgtctacaatttgggacaatgaattgcatacactacaagacaaagatttatcagaagtgtgaatatgatcttcatctaccaaagaaagagtttgattagtataactagattttagtcctgcgttagatgttaaaaaaacatcgctattgaccacggcttccattatttatattcgtagtttttactcgaaagcgtgattttaatatccaatcttattacttttggaatcgttcaaaacctttgactagttgtagaatttgatctattgccctacgcgtatactcccttgcatcatatacgttcgtcaccagatcgtttgtttcggcctgaagttggtgcatatctctttcaacattcgacatgagatccttaagggccatatcgtctagattttgttgagatgctgctcctggatttggattttgttgtgctgttgtacatactgtaccaccagtaggtgtaggagtacatacagtggccacaataggaggttgagaaagtgtaaccgttggagtagtacaagaaatacttccatccgattgttgtgtacatgtagttgttggtaacgtctgagaaggttgggtagatggcggcgtcgtcgttttttgatctttattaaatttagagataatatcctgaacagcattgctcggcgtcaacgctggaaggagtgaactcgccggcgcatcagtatcttcagacagccaatcaaaaagattagacatatcagatgatgtattagtttgttgtcgtggttttggtgtaggagcagtactactaggtagaagaataggagccgatgtagctgttggaaccggctgtggagttatatgaatagttggttgtagcggttggataggctgtctgctggcggccatcatattatctctagctagttgttctcgcaactgtctttgataatacgactcttgagactttagtcctatttcaatcgcttcatcctttttcgtatccggatccttttcttcagaataatagattgacgactttggtgtagaggattctgccagcctctgtgagaacttgttaaagaagtccatttaaggctttaaaattgaattgcgattataagattaaatggcagacacagacgatattatcgactatgaatccgatgatctcaccgaatacgaggatgatgaagaagaggaagaagatggagagtcactagaaactagtgatatagatcccaaatcttcttataagattgtagaatcagcatccactcatatagaagatgcgcattccaatcttaaacatatagggaatcatatatctgctcttaaacgacgctatactagacgtataagtctatttgaaatagcgggtataatagcagaaagctataacttgcttcaacgaggaagattacctctagtttcagaattttctgacgaaacgatgaagcaaaatatgctacatgtaattatacaagagatagaggagggttcttgtcctatagtcatcgaaaagaacggagaattgttgtcggtaaacgattttgacaaagatggtctaaaattccatctagactatattatcaaaatttggaaacttcaaaaacgatattagaatttatacgaatatcgttctctaaatgtcacaatcaagtctcgcatgttcagcaatttattgtcgtactttatatcgtgttcattaacgatatcttgcaaaatagtaatgattctatcttccttcgatagatattcttcagagattattgtcttatattctttcttgttatcagatatgaatttgataagactttgaacattattgatacccgtctgtttaattttttctacagatattttagttttggcagattctatcgtatctgtcaatagacatccaacatcgacattcgacgtcaattgtctataaatcaacgtataaattttagaaataacattagcgaattgttgtgcgttgatgtcgttattctgaaacagtatgattttaggtagcattttcttaacaaagagaacgtatttattgttactcagttgaacagatgatatatccagattactaacgcatctgattccgtataccaaactttcagaagaaatggtatacaattgtttgtattcattcaatgtctctttttcagaaattagtttagagtcgaatactgcaataattttcaagagatagttttcatcagataagattttatttagtgtagatatgataaaactattgttttgttggagaacttgatacgccgcgttctctgtagtcgacgctctcaaatgggaaacaatctccattatttttttggaatcggatactatatcttcggtatcttgacgcagtctagtatacatagagttaagagagattagagtttgtacattaagcaacatgtctctaaatgtggctacaaacttttcctttttcacatcatctagtttattatataccgatttcacaacggcaccagatttaaggaaccagaatgaaaaactctgataactacaatatttcatcatagttacgattttatcatcttctatagttggtgtaatagcgcatacctttttctccaagactggaaccaacgtcataaaaatgtttaaatcaaaatccatatcaacatctgatgcgctaagaccagtctcgcgttcaagattatctttactaatggtgacgaactcatcgtataaaactctaagtttgtccattatttatttacagatttagttgtttaatttatttgtgctcttccagagttgggatagtatttttctaacgtcggtattatattattaggatctacgttcatatgtatcataatattaatcatccacgttttgataaatctatctttagcttctgaaataacgtatttaaacaaaggagaaaaatatttagctacggcatcagacgcaataacattttttgtaaatgtaacgtatttagacgacagatcttcgttaaaaagttttccatctatgtagaatccatcggttgttaacaccattcccgcgtcagattgaataggagtttgaatagtttgttttggaaatagatccttcaataacttatagttgggtgggaaaaaatcgattttatcactagactctttcttttttactatcattacctcatgaactatttcttgaatgagtatatgtattttctttcctatatcggacgcgttcattggaaaatataccatgtcgttaactataagaatatttttatcctcgtttacaaactgaataatatcagatgtagttcgtaaacgaactatatcatcaccagcacaacatctaactatatgatatccactagtttcctttagccgtttattatcttgttccatattagcagtcattccatcatttaagaaggcgtcaaagataatagggagaaatgacattttggattctgttacgactttaccaaaattaaggatatacggacttactatctttttctcaacgtcaatttgatgaacacacgatgaaaatgtgcttctatgagattgatcatgtagaaaacaacaagggatacaatatttccgcatatcatgaaatatattaagaaatcccaccttattatatttccccaaaggatccatgcacgtaaacattatgccgttatcattaataaagacttctttctcatcggatctgtaaaagttgttactgatttttttcattccaggatctagataattaataatgatgggttttctattcttattctttgtattttggcatatcctagaccagtaaacagtttccactttggtaaaatcagcagacttttgaacgctattaaacatggcattaatggcaataactaaaaatgtaaaatatttttctatgttaggaatatggtttttcactttaatagatatatggtttttggccaaaatgatagatatttttttatccgaggatagtaaaatattattagtcgccgtctctataaaaatgaagctagtctcgatatccaattttattctagaattgataggagtcgccaaatgtaccttatacgttatatctcccttgatgcgttccatttgtgtatctatatcggacacaagatctgtaaatagttttacgttattaatcatcacggtatcgccgtcgctagataacgctaatgtaccatccaagtcccaaatggagagatttaactgttcatcgtttagaataaaatgattaccggtcatattaataaagtgttcatcgtatctagataacaacgacttataattaatgtccaagtcttgaactcgctgaatgatcttttttaacccagttagttttagattggtacgaaatatattgttaaactttgattctacagtaatgtccaaatctagttgtggaaatacttccatcaacattgtttcaaacttgataatattattatctacatcttcgtacgatccaaattccggaatagatgtatcgcacgctctggccacccagataaccaaaaagtcacacgctccaggatatacattgtataaaaagctatcgttttttagtagggtttttttctgcgtgtatacgaagggattaaaaatagtattatcaacgtaactatattccaaattattcttatgagaatagataataatatcgtccttaatatctaacaaatttcctaaatatccctttaattgagtcattcgaagcgtcaatagaatatgtctcttaactatttccggctgttgtatatttaaatgacttcgtaaaaaataatatatgggcgacttctcatctatgtaatcatatggagtgagatatagggctcgttctacctcctgccccttacccacctgtaataccaattgcggacttactatatatcgcatatttatatcgtggggtaaagtgaaaatctactaccgatgatgtaagtcttacaatgttcgaaccagtaccagatcttaatttggaggcctccgtagaactaggggaggtaaatatagatcaaacaacacctatgataaaggagaatagcggttttatatcccgcagtagacgtctattcgcccatagatctaaggatgatgagagaaaactagcactacgattctttttacaaagactttattttttagatcatagagagattcattatttgttcagatgcgttgacgctgtaaaagacgtcactattaccaaaaaaaataacattatcgtggcgccttatatagcacttttaactatcgcatcaaaaggatgcaaacttacagaaacaatgattgaagcattctttccagaactatataatgaacatagtaagaaatttaaattcaactctcaagtatccatcatccaagaaaaactcggataccagtttggaaactatcacgtttatgattttgaaccgtattactctacagtagctctggctattcgagatgaacattcatctggcatttttaatatccgtcaagagagttatctggtaagttcattatctgaaataacatatagattttatctaattaatctaaaatctgatcttgttcaatggagtgctagtacgggcgctgtaattaatcaaatggtaaatactgtattgattacagtgtatgaaaagttacaactggtcatagaaaatgattcacaatttacatgttcattggctgtggaatcaaaacttccaataaaattacttaaagatagaaatgaattatttacaaaattcattaacgagttaaaaaagaccagttcattcaagataagcaaacgcgataaggatacgctactaaaatattttacttaggactggagttagaatttatagacgactcatttcgtttatcattgttactattattactattactatcattattagtgttggcattattagtattcttcttgtcatcttgttcagaaatatacagcaatgctatacctaatactaaatacattatcatgctcgcaatggctctaacaacaacgaaccaaaatgaatttggtcgtagcttttgttcacaaaaatacataaagaaatgtctacataaatctatggcgccattggctacttgaaatagcgccagtcctcctacagattttaatatagctgtataacatgacatttattcatcatcaaaagagacagagtcaccatctgtcatatttagattttttttcatgtgttcaaagtatcctctactcatttcattataatagtttatcatacttagaattttaggacggatcaatgagtaagacttgactagatcgtcagtagtaatttgtgcatcgtctattctgcatccgcttcgtcgaataatgtatagcatcgctttgagattctccatagctatcaagtctttatacaatgacatggaaatatctgtgaatactttatacttctccaacatcgatgccttaacatcatcgcctactttagcattgaaaatacgttctattgtgtagatggatgtagcaagatttttaaacaacaatgccatcttacacgatgattgcctcaagtctccaatcgtttgtttagaacgattagctacagagtccaatgcttggctgactagcatattattatctttagaaattgtattcttcaatgaggcgtttatcatatctgtgatttcgttagtcatattacagtctgactgggttgtaatgttatccaacatatcacctatggatacggtacacgtaccagcatttgtaataatcctatctaagatgttgtatggcattgcgcagaaaatatcttctcctgtaatatctccactctcgataaatctactcagattattcttaaatgccttattctctggagaaaagatatcagtgtccatcatttcattaatagtatacgcagaaaagataccacgagtatcaattctatccaagatacttatcggttccgagtcacagataatggtttcctctccttcgggagatcctgcatagaaatatctaggacaatagtttctatactgtctgtaactctgataatctctaaagtcactaactgataccatgaaattgagaagatcaaacgctgaagtaattaatttttctgcctcgtttttactacaactagttttcatcaatgtagtgacgatgtattgtttagttacttttggtctaatactgatgatagagatattattgcttcccataatggatcttctagtagtcaccttaaagcccattgatgcgaatagcagatagataaagtcttggtatgactcctttctaatatagtacggactacctttgtcacccaactttatacccacataagccataacaacctctttaatagccgtttcatgaggtttatcagccatgagcctgagtagttggaagaatctcatgaatcccgtctcagaaagtcctatatgcatgatagatttatctttcctgggaaactctcgtatagtcatagatgaaatactctttaaagtttctgaaataagattagtaacagtcttacctccgactactctaggtaacaaacaaactctaataggtgttttctctgcggagataatatcagaaaggatagagcaataagtagtattattgtgattataaagaccgaatacataacaggtagaatttataaacatcatgtcctgaaggtttttagacttgtattcctcgtaatccataccgtcccaaaacatggatttggtaactttgatagccgtagatctttgttccttcgccaacaggttaaagaaattaataaagaatttgttgtttctatttatgtccacaaattgcacgtttggaagcgccacggttacattcactgcagcattttgaggatcgcgagtatgaagtacgatgttattgtttactggtatatctggaaagaaatctaccagtctaggaataagagattgatatcgcatagaaatagtaaagtttataatctcatcatcgaagagcattttgttaccattgtaataaatatccactctgtcatatgtataaatgaagtactgttcaaacatgatgagatgtttatatgttggcatagtagtgagatcgacgtttggtaatggcaatgtattaagattaactccataatgtctagcagcatctgcgatgttataagcgtcgtcaaagcggggtcgatcttgtattgttatatattgtctaacacctataagattatcaaaatcttgtctgcttaatacaccgttaacaatttttgccttgaattcttttattggtgcattaataacatccttatagaggatgttaaacaaataagtgttatcaaagttaagatctggatatttcttttctgctagaacatccattgagtcggagccatctggtttaatataaccaccgataaatctagctctgtattctgtatccgtcaatctaatattaagaaggtgttgagtgaaaggtggaagatcgtaaaagctgtgagtattaatgataggattagtttccgaactaatgttaattggggtattaataatatctatatttccagcgttaagtgtaacattaaacagttttaattcacgtgacgtggtatcaattaaataattaatgcccaatttggatatagcagcctgaagctcatcttgtttagttacggatcctaatgagttattaagcaatatatcgaacggatgaacgaaggttgttttaagttggtcacatactttgtaatctagacatagatgcggaagaacggtagaaactatacgaaataaatattcagagtcctctaattgatcaagagtaactattgacttaataggcatcatttatttagtattaaatgacgaccgtaccagtgacggatatacaaaacgatttaattacagagttttcagaagataattatccatctaacaaaaattatgaaataactcttcgtcaaatgtctattctaactcacgttaacaacgtggtagatagagaacataatgccgccgtagtgtcatctccagaggaaatatcctcacaacttaatgaagatctatttccagatgatgattcaccggccactattatcgaacgagtacaacctcatactactattattgacgatactccacctcctacgtttcgtagagagttattaatatcggaacaacgtcaacaacgagaaaaaagatttaatattacagtatcgaaaaatgctgaagcaataatggaatctagatctatgataacttctatgccaacacaaacaccatccttgggagtagtttatgataaagataaaagaattcagatgttagaggatgaagtggttaatcttagaaatcaacgatctaatacaaaatcatctgataatttagataattttaccaaaatactatttggtaagactccgtacaaatcaacagaagttaataagcgtatagccatcgttaattatgcaaatttgaacgggtcccccttatcagtcgaggacttggatgtttgttcggaggatgaaatagatagaatctataaaacgattaaacaatatcacgaaagtagaaaacgaaaaattatcgtcactaacgtgattattattgtcataaacattatcgagcaggcattgctaaaactcggatttgaagaaatcaaaggactgagtaccgatatcacttcagaaattatcgatgtggagatcggagatgactgcgatgctgtagcatctaaactaggaatcggtaacagtccggttcttaatattgtattgtttatactcaagatattcgttaaacgaattaaaattatttaatttaatacattcccatatccagacaacaatcgtctggattaatctgttcctgtcgtctcataccggacgacatattaatctttttattagtgggcatctttttagatggtttctttttcccagcattaactgagtcgatacctagaagatcgtgattgatctctccgaccattccacgaacttctaattggccgtctctgacggtaccataaactattttaccagcattagtaacagcttggacaatctgaccatccatcgcattgtacgatgtagtagtaactgttgttctacgtctaggagcaccagaagtatttttggagcccttggatgttgatgtagaagaagacgaggattttgattttggtttacatgtaatacattttgaactctttgattttgtatcacatgcgccggcagtcacatctgtttgagaattaagattattgttgcctcctttgacggctgcatctccaccgatttgcgctagtagatttttaagctgtggtgtaatcttattaactgtttcgatataatcatcgtaactgcttctaacggctaaattttttttatccgccatttagaagctaaaaatatttttatttatgcagaagatttaactagattatacaatgaactaatatgatccttttccagattatttacaaacttggtattttttggttctggaggaggcgaatttaaattcggacttggattcggattttgtaagttcttgatcttattatacatcgagtataggatggcgacagtaactgctacacaaataccgatcaaaagaagaataccaatcatttattgacaataacttcactattgatcaagtatgcaatatatcatcttttcactaaataagtagtaataatgattcaacaatgtcgagatatatggacgataataatttagttcatggaaatatcgctatgattggtgtgaatgactccgctaactctgtggggtgcgcagtgctttccccacatagaataaattagcattccgactgtgataataataccaagtataaacgccataatactcaatactttccatgtacgagtgggactggtagacttactaaagtcaataaaggcgaagatacacgaaagaatcaaaagaatgattccagcgattagcacgccggaaaaataatttccaatcataagcatcatgtccatttaactaataaaaattttaaatcgccgaatgaacaaagtggaatataaaccatataaaaacaatagtttgtactgcaaaaataatatctatttttgttttcgaagatatggtaaaattaaatagtagtacacagcatgttataactaacagcagcaacggctcgtaattacttatcatttactagacgaaaaggtggtgggatattttcttgctcaaataatacgaatatatcacccatccattttatgcgatgtttatatactctaatctttaatagatctatagacgacgggtttaccaacaatatagattttatcgattcatctaatttaaacccttccttaaacgtgaatgatctattatctggcataacgatgaccctacctgatgaatcggacaatgtactgggccatgtagaataaattatcaacgaattatcgtctacgaacatttatatcatttgttttaattttaggacgcgaataaatggatataaaatagaaaataacagatattacaaccagtgttatggccgcgcccaaccaggtaggcagttttattttatcttttactacaggttctcctggatgtacgtcaccaacggcggacgtagttctagtacaattagacgtaagttccgcttgggaattttttaacgctaaagagttaacgttaatcgtgcacccaacgtatttacatctagttcgttgaacatcttgattataatataaccattttctatctctagattcgtcagtgcactcatgtaaccaacataccctaggtcctaaatatttatctccggaattagattttggataattcgcgcaccaacaatttctatttcctttatgatcgttacaaaagacgtataatgccgtatccccaaaagtaaaataatcaggacgaataattctaataaactcagaacaatatctcgcatccatatgtttggagcaaatatcggaataagtagacatagccggtttccgttttgcacgtaaccattctaaacaattggggtttccaggatcgtttctacaaaatccagtcatgaaatcgtcacaatgttctgtcttgtaattattattaaatatttttggacagtgtttggtatttgtcttagaacaacattttgccacgctatcactatcgcccaggagataatccttttttataaaatgacatcgttgcccggatgctatataatcagtagcgtgttttaaatccttaatatattcaggagttacctcgttctgataatagattaatgatccaggacgaaatttgaaagaactacatggttctccatgaattaatacatattgtttagcaaattcaggaactataaaactactacaatgatctatcgacataccatctatcaaacaaaacttgggtttaatttctcccggagatgtttcataatagtacgtataactttcttctgcaaacttaacagctctattatattcaggataattaaaacctaattccatatatttgtctcgtatatctgctattcctggtgctattttgattctattaagagtaacagctgcccccattcttaataatcgtcagtatttaaactgttaaatgttggtatatcaacatctaccttatttcccgcagtataaggtttgttgcaggtatactgttcaggaatggttacatttatacttcttctatagtcctgtctttcgatgttcatcacatatgcaaagaacagaataaacaaaataatgtaagaaataatattaaatatctgtgaattcgtaaatacattgattgccataataattacagcagctacaatacacacaatagacattcccacagtgttgccattacctccacgatacatttgagttactaagcaataggtaataactaagctagtaagaggcaatagaaaagatgagataaatatcatcaatatagagattagaggagggctatatagagccaagacgaacaaaatcaaaccgagtaacgttctaacatcattatttttgaagattcccaaataatcattcattcctccataatcgttttgcatcatacctccatctttaggcataaacgattgctgctgttcctctgtaaataaatctttatcaagcactccagcacccgcagagaagtcgtcaagcatattgtaatatcttaaataactcatttatatattaaaaaatgtcactattaaagatggagtataatctttatgccgaactaaaaaaaatgacttgtggtcaacccctaagtctttttaacgaagacggggatttcgtagaagttgaaccgggatcatcctttaagtttctgatacctaagggattttacgcctctccttccgtaaagacgagtctagtattcgagacattaacaacgaccgataataaaatcactagtatcaatccaacaaatgcgccaaagttatatcctcttcaacgcaaagtcgtatctgaagtagtttctaatatgaggaaaatgatcgaatcaaaacgtcctctatacattactcttcacttggcgtgtggatttggtaagactattaccacgtgttatcttatggctacacacggtagaaaaaccgtcatttgcgtacccaataaaatgttaatacatcaatggaagacacaggtagaggcagtcggattggaacataagatatccatagatggagtaagtagtctattaaaggaactaaagactcaaagtccggatgtattaatagtagtcagtagacatctgacaaacgatgccttttgtaaatatatcaataagcattatgatttgttcatcttggatgaatcacatacgtataatctgatgaacaatacagcagttacaagatttttagcgtattatcctccgatgatgtgttattttttaactgctacacctagaccatctaaccgaatttattgtaacagtattattaatattgccaagttatccaatctaaaaaaaactatctatgcagtagatagtttttttgagccatattccacagataatattagacatatggtaaaacgactagatggaccatctaataaatatcatatatataccgagaagttattatctgtagacgagcctagaaatcaacttattcttgataccctggtagaagaattcaagtcaggaactattaatcgcattttagttattactaaactacgtgaacatatggtattattctacaaacgattattagattttttcggaccagaggttgtatttataggagacgcccaaaatagacgtactccagatatggtcaaatcaatcaaggaactaaatagatttatattcgtatccaccttattttattccggtactggtttagatattcctagtttggattcgttgttcatttgctcggcagtaatcaacaatatgcaaatagagcaattactagggagggtatgtcgagaaacagaactattagataggacggtatatgtatttcctaacacatccatcaaagaaataaagtacatgataggaaatttcatgcaacgaattattagtctgtctgtagataaactaggatttaaacaaaaaagttatcggaaacatcaagaatccgatcccacttctgcatgtacaacatcatccagagaagaacgtgtattaaatagaatatttaactcgcaaaatcgttaagaagtttaagcgacgatccgcatgctgcgcaggccagtgtattacccctcatagtattaatataatccaatgatacttttgtgatgtcggaaatcttaaccaatttagactgacaggcagaacacgtcatgcaatcatcatcgtcatcgataactgtagtcttgggcttctttttgcgactcttcattccggaacgcacattggtgctatccatttaggtagtaaaaaataagtcagaatatgccctataacacgatcgtgcaaaacctggtatatcgtctctatctttatcacaatatagtgtatcgacatttttattattattgacctcgtttatcttggaacatggaatgggaacatttttgttatcaacggccatctttgccttaattccagatgttgtaaaattataactaaacagtctatcatcgacacaaatgaaattcttgtttagacgtttgtagtttacgtatgcggctcgttcgcgtctcattttttcagatattgcaggtactataatattaaaaataagaatgaaataacataggattaaaaataaagttatcatgacttctagcgctgatttaactaacttaaaagaattacttagtctgtacaaaagtttgagattttcagattctgcggctatagaaaagtataattctttggtagaatggggaacatctacttactggaaaataggcgtgcaaaaggtagctaatgtcgagacgtcaatatctgattattatgatgaggtaaaaaataaaccgtttaatattgatccgggctattacattttcttaccggtatattttgggagcgtctttatttattcgaagggtaaaaatatggtagaacttggatctggaaactcttttcaaataccagatgatatgcgaagtgcgtgtaacaaagtattagacagcgataacggaatagactttctgagatttgttttgttaaacaatagatggataatggaagatgctatatcaaaatatcagtctccagttaatatatttaaactagctagtgagtacggattaaacatacccaaatatttagaaattgaaatagaggaagacacattatttgacgacgagttatactctattatagaacgctctttcgatgataaatttccaaaaatatccatatcgtatattaagttgggagaacttagacggcaagttgtagactttttcaaattctcattcatgtatattgagtccatcaaggtagatcgtataggagataatatttttattcctagcgttataacaaaatcaggaaaaaagatattagtaaaagatgtagaccatttaatacgatccaaggttagagaacatacatttgtaaaagtaaaaaagaaaaacacattttccattttatacgactatgatggaaacggaacagaaactagaggagaagtaataaaacgaattatagacactataggacgagactattatgttaacggaaagtatttctctaaggttggtagtgcaggcttaaagcaattgactaataaattagatattaatgagtgcgcaactgtcgatgagttagttgatgagattaataaatccggaactgtaaaacgaaaaataaaaaaccaatcagcatttgatttaagcagagaatgtttgggatatccagaagcggattttataacgttagttaataacatgcggttcaaaatagaaaattgtaaggttgtaaatttcaatattgaaaatactaattgtttaaataacccgagtattgaaactatatatggaaactttaaccagttcgtctcaatctttaatgtcgtcaccgatgtcaaaaaaagattattcgagtgaaataatatgcgcctttgatataggtgcaaaaaatcctgccagaactgttttagaagtcaaggataactccgttagggtattggatatatcaaaattagactggagttctgattgggaaaggcgcatagctaaagatttgtcacaatatgaatacactacagttcttctagaacgtcagcctagaaggtcgccgtatgttaaatttatctattttattaaaggctttttatatcatacatcggctgccaaagttatttgcgtctcgcctgtcatgtctggtaattcatatagagatcgaaaaaagagatcggtcgaagcatttcttgattggatggacacattcggattgcgagactccgttccggatagacgcaaattagacgatgtagcggatagtttcaatttggctatgagatacgtattagataaatggaatactaattatacaccttataataggtgtaaatctagaaattacataaaaaaaatgtaataacgttagtaacgccattatggataatctatttacctttctacatgaaatagaagatagatatgccagaactatttttaactttcatctaataagttgcgatgaaataggagatatatatggtcttatgaaagaacgcatttcctcagaggatatgtttgataatatagtgtataataaagatatacatcctgccattaagaaactagtgtattgcgacatccaacttactaaacacattattaatcagaatacgtatccggtatttaacgattcttcacaagtgaaatgttgtcattatttcgacataaactcagataatagcaatattagctctcgtacagtagagatatttgagagggaaaagtcatctcttgtatcatatattaaaactaccaataagaagagaaaggtcaattacggcgaaataaagaaaactgttcatggaggcactaatgcaaattacttttccggtaaaaagtctgacgagtatctgagtactacagttagatccaacattaatcaaccttggatcaaaaccatctctaagaggatgagagttgatatcattaatcactctatagtaacgcgtggaaaaagctctatattacaaactatagaaattatttttactaatagaacatgtgtgaaaatattcaaggattctactatgcacattattctatccaaggacaaggatgaaaaggggtgtatacacatgattgacaaattattctatgtctattataatttatttctgttgttcgaagatatcatccaaaacgagtactttaaagaagtagctaatgttgtaaaccacgtactcacggctacggcattagatgagaaattattcctaattaagaaaatggctgaacacgatgtttatggagttagcaatttcaaaatagggatgtttaacctgacatttattaagtcgttggatcataccgttttcccctctctgttagatgaggatagcaaaataaagttttttaaggggaaaaagctcaatattgtagcattacgatctctggaggattgtataaattacgtgactaaatccgagaatatgatagaaatgatgaaggaaagatcgactattttaaatagcatagatatagaaacggaatcggtagatcgtctaaaagaattgcttctaaaatgaaaaaaaacactaattcagaaatggatcaacgactagggtataagtttttggtgcctgatcctaaagccggagttttttatagaccgttacatttccaatatgtatcgtattctaattttatattgcatcgattgcatgaaatcttgaccgtcaagcggccactcttatcgtttaagaataatacagaacgaattatgatagaaattagcaatgttaaagtgactcctccagattactcacctataatcgcgagtattaaaggtaagagttatgacgcattagccacgttcactgtaaatatctttaaagaggtaatgaccaaagagggtatatccatcactaaaataagtagttatgagggaaaagattctcatttgataaaaattccgctactaataggatacgggaataaaaatccacttgatacagccaagtatcttgttcctaatgtcataggtggagtctttatcaataaacaatctgtcgaaaaagtaggaattaatctagtagaaaagattacaacatggccaaaatttagggttgttaagccaaactcattcactttctcgttttcctccgtatcccctcctaatgtattaccgacaagatatcgccattacaagatatctctggatatatcacaattggaagcgttgaatatatcatcgacaaagacatttataacggtcaatattgttttgctgtctcaatatttatctagagtgagtctagaattcattagacgtagtttatcatacgatatgcctccagaagttgtctatctagtaaacgcgataatagatagtgctaaacgaattactgaatctattactgactttaatattgatacatacattaatgacctggtggaagctgaacacattaaacaaaaatctcagttaacgattaacgagttcaaatatgaaatgctgcataactttttacctcatatgaactatacacccgatcaactaaagggattttatatgatatctttactaagaaagtttctctactgtatcttccacacttctagatatccagatagagattcgatggtttgtcatcgcatcctaacgtacggcaaatattttgagacgttggcacatgatgaattagagaattacataggcaacatccgaaacgatatcatgaacaatcacaagaacagaggcacttacgcggtaaacattcatgtactaacaactcccggacttaatcacgcgttttctagcttattgagtggaaagttcaaaaagtcagacggtagttatcgaacacatcctcactattcatggatgcagaatatttctattcctaggagtgttggattttatccggatcaagtaaagatttcaaagatgttttctgtcagaaaataccatccaagtcaatatctttacttttgttcatcagacgttccggaaagaggtcctcaggtaggtttagtatctcaattgtctgtcttgagttccattacaaatatactaacgtctgagtatttggatttggaaaagaaaatttgtgagtatatcagatcatattataaagatgatataagttactttgaaacaggatttccaatcactatagaaaatgctctagtcgcatctcttaatccaaatatgatatgtgattttgtaactgactttagacgtagaaaacggatgggattcttcggtaacttggaggtaggtattactttagttagggatcacatgaatgaaattcgcattaatattggagcgggaagattagtcagaccattcttggttgtggataacggagagctcatgatggatgtgtgtccggagttagaaagcagattagacgacatgacattctctgacattcagaaagagtttccgcatgtcatcgaaatggtagatatagaacaatttacttttagtaacgtatgtgaatcggttcaaaaatttagaatgatgtcaaaggatgaaagaaagcaatacgatttatgtgactttcctgccgaatttagagatggatatgtagcatcttcactagtgggaatcaatcacaattctggacccagagctattcttggatgtgctcaagctaaacaagctatctcttgtctgagttcggatatacgaaataaaatagacaatggaattcatttgatgtatccagagaggccaatcgtgattagtaaggctttagaaacttcaaagattgcggctaattgcttcggccaacatgttactatagcattaatgtcgtacaaaggtatcaatcaagaggatggaattatcatcaaaaaacaatttattcagagaggcggtctcgatattgttacagccaagaaacatcaagtagaaattccattggaaaactttaataacaaagaaagagataggtctaacgcctattcaaaattagaaagtaatggattagttagactgaatgctttcttggaatccggagacgctatggcacgaaatatctcatcaagaactcttgaagatgattttgctagagataatcagattagcttcgatgtttccgagaaatataccgatatgtacaaatctcgcgttgaacgagtacaagtagaacttactgacaaagttaaggtacgagtattaaccatgaaagaaagaagacccattctaggagacaaatttaccactagaacgagtcaaaagggaacagtcgcgtatgtcgcggatgaaacggaacttccatacgacgaaaatggtatcacaccagatgtcattattaattctacatccatcttctctagaaaaactatatctatgttgatagaagttattttaacagccgcatattctgctaagccgtacaacaataagggagaaaaccgacctgtctgttttcctagtagtaacgaaacatccatcgatacatatatgcaattcgctaaacaatgttatgagcattcaaatccgaaattgtccgatgaagaattatcggataaaatcttttgtgaaaagattctctatgatcctgaaacggataagccttatgcatccaaagtattttttggaccaatttattacttgcgtctgaggcatttaactcaggacaaggcaaccgttagatgtagaggtaaaaagacgaagctcattagacaggcgaatgagggacgaaaacgtggaggaggtatcaagttcggagaaatggagagagactgtttaatagcgcatggtgcagccaatactattacagaagttttgaaagattcggaagaagattatcaagatgtgtatgtttgtgaaaattgtggagacatagcagcacaaatcaagggtattaatacatgtcttagatgttcaaaacttaatctctctcctctcttaacaaaaattgataccacgcacgtatctaaagtatttcttactcaaatgaacgccagaggcgtaaaagtcaaattagatttcgaacgaaggcctccttcgttttataaaccattagataaagttgatctcaagccgtcttttctggtgtaatattctagtttggtagtagatacatatcaatatcatcaaattcgagatccgaattataaaatgggcgtggattgttaactatagaatcggacgtctgatattcgaaaatctgtggagtttcaggttttggtggaggtgtaactgctacttgggatactgaagtctgatattcagaaagctgtggatgttctggttcggcatccaccgatggtgtcacatcactaatcggttcggtaacgtctgtggatggaggtgctacttctacagaacctgtagcctcagttgtcaacggagatacatttttaatgcgagaaaatgtataatttggtaatggtttcttatgtggatctgaagaagaggtaagatatctactagaaagataccgatcacgttctagttctcttttgtagaacttaactttttctttctccgcatctagttgatattccaacctcttcacgttactacgttcagattccaattcacgttcgcatgggttacctccgcagtttttacgagcgatttcacgttcagccttcatgcgtctctccctctctctatcgagtttatcagagcagtctttctgaaggcgatcgaactccataaatttctccaacgctttgattgtttccatagatttccgaagttcagcttttaggactgtgattctttttctttcgaattcacagctggatgtacaaccgtttccattaccgccatctctaagtttcttttctagatcggcaacatttcatccccatgccttttacattcctcgagtctactgtcgtcgaaatatcgttccagctccttttcgacatcaataactttagcacgttgtctctcaagctctcttttgtagttatctgattccctggcacgtttaagatcttcatgcaattgagtcagctcttaacttcctctcttgcttcttcgtcatagtacgcgcaatcactgtgagatccattgttaccacgtctacactcggcgagctcgcgtttaagagattcaatttcccgtttgtattggtccatgtttccattgctaccaccattagatttacaggctgctagttgtcgttcgagatcagaaatacgggttttcttggaattgatttcgtcgatgtacttggcatcgaaacacttattaagttctttttccaattctacgattttatttctttcgcgagtcaattccctcctgtagtaactatctgttttgtcagattcacgctctctacgtagactttcttgcaagttactaatttgttccctagcacgtccgagtttagttttatatgctgaatagagttctgattcatcctttgagcagatctctagcgatcgtttaagattcctaattctagtctttagcctatttacctcctcagaagatgttccgttaccgttgcgtttacactcgttaagctgtctatcaagatccatgattctatctctaagacgttgcatctctctttccatatcagcattgctttcattattacgtctgcagtcactcaactgtctttcaatatctgagattctatctctaagacgtcgcatctctctctgtttcggcattggtttcattattacgtctacagtcgttcaactgtctttcaagatctgatattctagattggagtctgctaatctctgtagcattttcacggcattcactcagttgtctttcaagatctgaaattttagattggagtctgctaatctctgtaagatttcctcctccgctctcgatgcagtcggtcaacttattctctagttctctaatacgcgaacgcagtgcatcaacttcttgcgtgtcttcctggttgcgtgtacattcatcgagtctagattcgagatctctaacgcgtcgtcgttcttcctcaagttctctgcgtactacagaaagcgtgtccttatcttgttgatatttagcaatttctgattctagagtactgattttgcttacgtagttactaatatttgtcttggccttatcaagatcctccttgtatttgtcgcattccttgatatccctacgaagtctggacagttcccattcgacattacgacgtttatcgatttcagctcggagatcgtcatcgcgttgttttagccacatacgactgagttcaagttctcgttgacaagatccatctacttttccattcctaatagtatccagttccttttctagttctgaacgcatttctcgttccctatcaagcgattctctcaattctcggatagtcttcttatcaatttctaataaatctgaaccatcatctgtcccattttgaatatccctgtgttctttgatctcttttgtaagtcggtcgattctttcggttttataaacagaatccctttccaaagtcctaatcttactgagtttatcactaagttctgcattcaattcggtgagttttctcttggcttcttccaactctgttttaaactctccactatttccgcattcttcctcgcatttatctaaccattcaattagtttattaataactagttggtaatcagcgattcctatagccgttcttgtaattgtgggaacataattaggatcttctaatggattgtatggcttgatagcatcatctttatcattattagggggatggacaaccttaattggttggtcctcatctcctccagtagcgtgtggttcttcaataccagtgttagtaataggcttaggcaaatgcttgtcgtacgcgggcacttcctcatccatcaagtatttataatcgggttctacttcagaatattcttttctaagagacgcgacttcgggagttagtagaagaactctgtttctgtatctatcaacgctggaatcaatactcaagttaaggatagcgaatacctcatcgtcatcatccgtatcttctgaaacaccatcatatgacatttcatgaagtctaacgtattgataaatagaatcagatttagtattaaacagatccttaacctttttagtaaacgcatatgtatattttagatctccagatttcataatatgatcacatgccttaaatgtcagtgcttccatgatataatctggaacactaatgggtgacgaaaaagatacagcaccatatgctacgttgataaataaatctgaaccactaagtagataatgattaatgttaagaaagaggaaatattcagtgtataggtatgtcttggcgtcatatcttgtactaaacacgctaaacagtttgttaatgtgatcaatttccaatagattaattagagcagcgggaataccaacaaacatattaccacatccgtattttctatgaatatcacatatcatgttaaaaaatcttgatagaagagcgaatatctcgtctgacttaatgagtcgtagttcagcagcaacataagtcataactgtaaatagaacatactttcctgtagtgttgattctagactccacatcaacaccattattaaaaatagttttatatacatctttaatctgctctccgttaatcgtcgaacgttctagtatacggaaacactttgatttcttatctgtagttaatgacttagtgatatcacgaagaatattacgaattacatttcttgtttttcttgagagacctgattcagaactcaactcatcgttccatagtttttctacctcagtggcgaaatctttggagtgcttggtacatttttcaataaggttcgtgacctccatttattataaaaaatttattcaaaacttaactacaatcgggtaattataaaatcgtagatctcccatgtggcggaatactaccatctatcgcatgtggatggacagtaggtaatggccatgggaacagtaatgtttgcatatttatctttcttgccagtattactgcatattgtcccaatgtttcgatgtgatgttctaacctatcaactgccgctgtatcacaacaatagtgtccgatgaaattaagattatgatccaatgtgtttaatatatgattatcaagtcttatacgatccgcgtcttttttgacaggatcaggttcttctacaggaagaagtttcggcctcttatgatattcatgtctgggaaacggtggtctagggtgaggctccggtatcggagtgggttttggattataatcatcatcgtctatgacatcatcttcgacttcgatatttattttgctatcttgatgatgtcctgtatcagttgcattttcagcactcgactgaatattagcgcattcattgtctattattaccatatttctaaacccaaaatgtatgtgttgaacatcagtactatcgttgatgagtcttatagcatgaattcgcttatcgttatcgggtttatcttctgtcaccttagcaattccttttttattaaactctacataatcatatccatttctattgtttgttctaatataaacgagtatagcatcattgctaaatttttcaatagtatcaaaaacagaatatcctaaaccatataatatatattcaggaacactcaaactaaatgtccaggattctcctaaatacgtaaactttaatagtgcgaaatcattcaaaaatctaccacttatagatagatagtacataaatgcgtatagtagtctacctatctctttattatgaaaaccggcattacgatcatatatgtcgtgatatacctgtgatccgtttacgttaaaccataaatacatgggtgatcctataaacatgaatttatttctaattctcagagctatagttaattgaccgtgtaatatttgcttacatgcatacttgatacgcttattaataagatttttatcattgctcgttatttcagaatcgtatatataaggagtaccatcgtgattcttaccagatattatacaaaatactatatataaaatatattgacccacgttagtaatcatataaatgtttaacgttttaaattttgtattcaatgatccattatcatacgctatcatggtcttgtaatattcattctttaaaatataatattgtgttagccattgcattggagctcctaatggagattttctattctcatccattttaggataggctttcataaagtccctaataacttcgtgaataatgtttctatgttttctactgatgcatgtatttgcttcgatttttttatcccatgtttcatctatcatagatttaaacgcagtaatgctcgcaacattaacatcttgaaccgttggtacaattccgttccataaatttataatgttcgccatttatataactcattttttgaatatacttttaattaacaaaagagttaagttactcatatggacgccgtccagtctgaacatcaatctttttagccagagatatcatagccgctcttagagtttcagcgtgattttccaacctaaatagaacttcatcgttgcgtttacaacacttttctatttgttcaaactttgttgttacattagtaatctttttttccaaattagttagccgttgtttgagagtttcctcattgtcgtcttcatcggctttaacaattgcttcgcgtttagcctctggctttttagcagcctttgtagaaaaaaattcagttgctggaattgcaagatcgtcatctccggggaaaagagttccgtccatttaaagtacagattttagaaactgacactctgcgttatttatatttggtacaacacatggattataaatattgatgttaataacatcagaaaatgtaaagtctatacattgttgcatcgtgttaaattttctaatggatctagtattattgggtccaacttctgcctgaaatccaaatatggaagcggatacaaaaccgtttcctggataaaccacacatctccacttttgctttacatcagaaattgtgtcgttgacatcttgaactctcctatctaatgccggtgttccacctatagattttgaatattcgaatgctgcatgagtagcattaaattccttaatattgccataattttcatatattgagtaaccctggataaaaagtaaacacaccgcagccgtcgctaccacaataaaaaaaattgatagagagttcatttataatctattagaagctgacaaaatttttttacacgcatcagacaatgctttaataaatagttcaacatctacttttgtcatatcgaaccgatggtatgattctaacctagaattacatccgaaaaagttgactatgttcatagtcattaagtcattaacaaacaacattccagactctggattataagacgatactgtttcgtcacaattacctaccttaatcatgtgattatgaatattggctattagagcaccttctaagaaatctataatatctttgaaacacgatttaaaatcaaaccacgaatatacttctacgaagaaagttagtttacccataggagaaataactataaatggagatctaaatacaaaatccggatctatgatagttttaacattattatattctctattaaatacctccacatctaaaaatgttaattttgaaactatgtcttcgtttattaccgtacctgaactaaacgctataagctctattgtttgagaactctttaaacgatattcttgaaatacatgtaacaaagtttcctttaactcggtcggtttatctaccatagttacagaatttgtatccttatctataatataataatcaaaatcgtataaagttatataattatcgcgttcagattgggatcttttcaaatagactaaaaaccccatttctctagtaagtatcttatgtatatgtttgtaaaatatcttcatggtgggaatatgctctaccgcagttagccattcctcattgacagcggtagatgtattagacaaaactattccaatgtttaacaagggccattttacgagattattaaatccttgtttgataaatgtagccaatgagggttcgagttcaacgacgattgaattctcttcccgcggatgctgcatgatgaacgacgggatgttgttcgattgatttggaattctttttcgactttttgtttatattaaatattttaaaatttatagcggatagcaattcatgtaccacggataatgtagacgcgtattgcgcatcgatatctttattattagataaatttatcaataaatgtgagaagtttgcctcgttaaggtcttccatttaaatattatataaacatttgtgtttgtaacttattcgtcttttatggaatagttttttactagtaaagctgcaattacacactttgtccgtaaaacataaatataaacaccagcttttatcaatcgttccaaaaagtcgacggcggacatttttaacatggcatctattttaaatacacttaggtttttggaaaaaacatcattttataattgtaacgattcaataactaaagaaaagattaagattaaacataagggaatgtcatttgtattttataagccaaagcattctaccgttgttaaatacttgtctggaggaggtatatatcatgatgatttggttgtattggggaaggtaacaattaataatctaaagatgatgctattttacatggatttatcatatcatggagtgacaagtagtggagcaatttacaaattgggatcgtctatcgatagactttctctaaataggactattgttacaaaagttaataattatgatgatacattttttgacgacgatgattgatcgctattgcacaattttgtttttgtactttctaatatagtgtttaggttctttttcatatgagaatattgatttactaaaatatctatgtttaacttttgttctatgacgtccttatcggcggtatcggtacatatacgtaattcaccttcacaaaatacggagtcttcgataataatagccaatcgattattggatctagctgtctgtatcatattcaacatgtttaatatatcctttcgtttcccctttacaggcatcgatcgtagcatattttccgcgtctgatatggaaatgttaaaactacaaaaatgcgtaatgttagcccgtcctaatattggtacgtgtctataagtttggcatagtagaataatagacgtgtttaaatgccttccaaagtttaagaattctattagagtattgcattttgatagtttatcgcctacatcatcaaaaataagtaaaaagtgtgctgattttttatgattttgtgcgacagcaatacatttttctatgttacttttagttcgtatcagattatattctagagattcctgactactaacgaaattaatatgatttggccaaatgtatccatcataatctgggttataaacgggtgtaaacaagaatatatgtttatattttttaactagtgtagaaaacagagatagtaaatagatagtttttccagatccagatcctcctgttaaaaccattctaaacggcatttttaataaattttctcttgaaaattgtttttcttggaaacaattcataattatatttacagttactaaattaatttgataataaatcaaaatatggaaaactaaggttgttagtagggaggagaacaaagaaggcacatcgtgatataaataacatttattatcatgatgacaccagaaaacgacgaagagcagacatctgtgttctccgctactgtttacggagacaaaattcagggaaagaataaacgcaaacgcgtgattggtctatgtattagaatatctatggttatttcactactatctatgattaccatgtccgcgtttctcatagtgcgcctaaatcaatgcatgtctgctaacgaggctgctattactgacgccgctgttgccgttgctgctgcatcatctactcatagaaaggttgcgtctagcactacacaatatgatcacaaagaaagctgtaatggtttatattaccagggttcttgttatatattacattcagactaccagttattctcggatgctaaagcaaattgcactgcggaatcatcaacactacccaataaatccgatgtcttgactacctggctcattgattatgttgaggatacatggggatctgatggtaatccaattacaaaaactacatccgattatcaagattctgatgtatcacaagaagttagaaagtatttttgtgttaaaacaatgaactaatatttatttttgtacattaataaatgaaatcgcttaatagacaaactgtaagtaggtttaagaagttgtcggtgccggccgctataatgatgatactctcaaccattattagtggcataggaacatttctgcattacaaagaagaactgatgcctagtgcttgcgccaatggatggatacaatacgataaacattgttatttagatactaacattaaaatgtctacagataatgcggtttatcagtgtcgtaaattacgagctagattgcctagacctgatactagacatctgagagtattgtttagtattttttataaagattattgggtaagtttaaaaaagaccaatgataaatggttagatattaataatgataaagatatagatattagtaaattaacaaattttaaacaactaaacagtacgacggatgctgaagcgtgttatatatacaagtctggaaaactggttaaaacagtatgtaaaagtactcaatctgtactatgtgttaaaaaattctacaagtgacaacaaaaaatgaattaataataagtcgttaacgtacgccgccatggacgccgcgtttgttattactccaatgggtgtgttgactataacagatacattgtatgatgatctcgatatctcaatcatggactttataggaccatacattataggtaacataaaaactgtccaaatagatgtacgggatataaaatattccgacatgcaaaaatgctactttagctataagggtaaaatagttcctcaggattctaatgatttggctagattcaacatttatagcatttgtgccgcatacagatcaaaaaataccatcatcatagcatgcgactatgatatcatgttagatatagaagataaacatcagccattttatctattcccatctattgatgtttttaacgctacaatcatagaagcgtataacctgtatacagctggagattatcatctaatcatcaatccttcagataatctgaaaatgaaattgtcgtttaattcttcattctgcatatcagacggcaatggatggatcataattgatgggaaatgcaatagtaattttttatcataaaagttgtaaagtaaataataaaacaataaatattgaactagtagtacgtatattgagcaatcagaaatgatgctggtacctcttatcacggtgaccgtagttgcgggaacaatattagtatgttatatattatatatttgtaggaaaaagatacgtactgtctataatgacaataaaattatcatgacaaaattaaaaaagataaagagttctaattccagcaaatctagtaaatcaactgatagcgaatcagactgggaggatcactgtagtgctatggaacaaaacaatgacgtagataatatttctaggaatgagatattggacgatgatagcttcgctggtagtttaatatgggataacgaatccaatgttatggcgcctagcacagaacacatttacgatagtgttgctggaagcacgctgctaataaataatgatcgtaatgaacagactatttatcagaacactacagtagtaattaatgaaacggagactgttgaagtacttaatgaagataccaaacagaatcctaactattcatccaatcctttcgtaaattataataaaaccagtatttgtagcaagtcaaatccgtttattacagaacttaacaataaatttagtgagaataatccgtttagacgagcacatagcgatgattatcttaataagcaagaacaagatcatgaacacgatgatatagaatcatcggtcgtatcattggtgtgattagtttcctttttataaaattgaagtaatatttagtattattgctgccgtcacgttgtacaaatggagatattccctgtattcggcatttctaaaattagcaattttattgctaataatgactgtagatattatatagatacagaacatcaaaaaattatatctgatgagatcaatagacagatggatgaaacggtacttcttaccaacatcttaagcgtagaagttgtaaatgacaatgagatgtaccatcttattcctcatagattatcgacgattatactctgtattagttctgtcggaggatgtgttatctctatagataatgacatcaatggcaaaaatattctaacctttcccattgatcatgctgtaatcatatccccactgagtaaatgtgtcgtagttagcaagggtcctacaaccatattggttgttaaagcggatatacctagcaaacgattggtaacatcgtttacaaacgacatactatatgtaaacaatctgtcactgattaattatttgccgttgtctgtattcattattagacgagtcaccgactatttggatagacacatatgcgatcagatatttgctaataataagtggtattcccttataaccatcgacgataagcaatatcctattccatcaaactgtataggtatgtcctctgccaagtacataaattctagcatcgagcaagatactttaatccatgtttgtaacctcgagcatccgttcgactcagtatacaaaaaaatgcagtcgtacaattctctacctatcaaggaacaaatattgtacggtagaattgataatataaatatgagcattagtatttctgtggattaatagatttctagtatggggatcattaatcatctctaatctctaaatacctcataaaacgaaaaaaaagctattatcaaatactgtacggaatggattcattctcttctctttttatgaaactctgttgtatatctactgataaaactggaagcaaaaaatctgatagaaagaataagaataagatcaaggattatatggaacacgattattataaaataacaatagttcctggttcctcttccacgtctactagctcgtggtattatacacatgcctagtaatagtctctttgcgttgacggaaagcagactagaaataacaggctaaaatgttcagacaccataatagttcccaacccagataataacagagttccatcaacacattcctttaaactcaatcccaaacccaaaaccgttaaaatgtatccggccaattgatagtagataatgaggtgtacagcgcatgataatttacacagtaaccaaaatgaaaatactttagtaattataagaaatatagacggtaatgtcatcatcaacaatccgataatatgcctgagagtaaacattgacggataaaacaaaaatgctccgcataactctatcatggcaataacacaaccaaatacttgtaagattcctaaattagtagaaaatacaacgaatatcgatgtataagtgatctcgagaaataataagaataaagtaatgcccgtaaagataaacatcaacattgtttggtaatcattaaaccaattagtatgaagttgaactaatttcacagtagattttattccagtgttatcctcgcatgtataagtacctggtaagatatctttatattccataatcaatgagacatcactatctgataacgaatgaagtctagcactagtatgccatttacttaatattgtcgtcttggaagttttattataagttaaaatatcatggttatccaatttccatctaatatactttgtcggattatctatagtacacggaataatgatggtatcattacatgctgtatactctatggtctttgtagttgttataacaaccaacgtatagaggtatatcaacgatattctaactcttgacattttttatttatttaaaatgatacctttgttatttattttattctattttgctaacggtattgaatggcataagtttgaaacgagtgaagaaataatttctacttacttattagacgacgtattatacacgggtgttaatggggcggtatacacattttcaaataataaactaaacaaaactggtttaactaataataattatataacaacatctataaaagtagaggatgcggataaggatacattagtatgcggaaccaataacggaaatcccaaatgttggaaaatagacggttcagacgacccaaaacatagaggtagaggatacgctccttatcaaaatagcaaagtaacgataatcagtcacaacggatgtgtactatctgacataaacatatcaaaagaaggaattaaacgatggagaagatttgacggaccatgtggttatgatttattcacggcggataacgtaattccaaaagatggtttacgaggagcattcgtcgataaagacggtacttatgacaaagtttacattcttttcactgatactatcggctcaaagagaattgtcaaaattccgtatatagcacaaatgtgcctaaacgacgaaggtggtccatcatcattgtctagtcatagatggtcgacgtttctcaaagtcgaattagaatgtgatatcgacggaagaagttatagacaaattattcattctagaactataaaaacagataatgatacgatactatatgtattcttcgatagtccttattccaagtccgcattatgtacctattctatgaataccattaaacaatctttttctacgtcaaaattggaaggatatacaaagcaattgccgtctccagctcctggtatatgtttaccagctggaaaagttgttccacataccacgtttgaagtcatagaacaatataatgtactagatgatattataaagcctttatctaaccaacctatcttcgaaggaccgtctggtgttaaatggttcgatataaaggagaaggaaaatgaacatcgggaatatagaatatacttcataaaagaaaattctatatattcgttcgatacaaaatctaaacaaactcgtagctcgcaagtcgatgcgcgactattttcagtaatggtaactgcgaaaccgttatttatagcagatatagggataggagtaggaatgccacaaatgaaaaaaatacttaaaatgtaatcttaatcgagtacaccacacgacaatgaacaaacataagacagattatgctggttatgcttgctgcgtaatatgcggtctaattgtcggaattatttttacagcgacactattaaaagttgtagaacgtaaattagttcatacaccattaatagataaaacgataaaagatgcatatattagagaagattgtcctactgactggataagctataataataaatgtatccatttatctactgatcgaaaaacctgggaggaaggacgtaatgcatgcaaagctctaaattcaaattcggatctaattaagatagagactccaaacgagttaagttttttaagaagccttagacgaggctattgggtaggagaatccgaaatattaaaccagacaaccccatataattttatagctaagaatgccacgaagaatggaactaaaaaacggaaatatatttgtagcacaacgaatactcccaaactgcattcgtgttacactatataacaattacactacatttttatcataccactacttcggttagatgttttagaaaaaaataaatatcgccgtaccgttcttgtttttataaaaataacaattaacaattatcaaattttttctttaatattttacgtggttgaccattcttggtggtaaaataatctcttagtgttggaatggaatgctgtttaatgtttccacactcatcgtatattttgacgtatgtagtcacatcgtttacgcaatagtcagactgtagttctatcatgcttcctacatcagaaggaggaacagttttaaagtctcttggttttaatctattaccgttagttttcatgaaatcctttgttttatccacttcacattttaaataaatgtccactatacattcttttgttaattttactagatcgtcatgggtcatagaatttataggttccgtagtccatggatccaaactagcaaacttcgcgtatacggtatcgcgattagtgtatacaccaactgtatgaaaattaagaaaacagtttaataaatcaacagaaatatttaatcctccgtttgatacagatgcgccatatttatggatttcggattcacacgttgtttgtctgaggtgttcgtctagtgttgcttctacgtaaacttcgattcccatatattctttattgtcagaatcgcataccgatttatcatcatacactgtttgaaaactaaatggtatacacatcaaaataataaataataacgagtacattctgcaatattgttatcgtaattggaaaaatagtgttcgagtgagttggattatgtgagtattggattgtatattttattttatattttgtaataagaataaaatgctaatgtcaagtttattccaatagatgtcttattaaaaacatatataataaataacaatggctgaatggcataaaattatcgaggatatctcaaaaaataataagttcgaggatgccgccatcgttgattacaagactacaaagaatgttctagctgctattcctaacagaacatttgccaagattaatccgggtgaaattattcctctcatcactaatcgtaatattctaaaacctcttattggtcagaaatattgtattgtatatactaactctctaatggatgagaacacgtatgctatggagttgcttactgggtacgcccctgtatctccgatcgttatagcgagaactcataccgcacttatatttttgatgggtaagccaacaacatccagacgtgacgtgtatagaacgtgtagagatcacgctacccgtgtacgtgcaactggtaattaaaataaaaagtaatattcatatgtagtgtcaattttaaatgatgatgatgaaatggataatatccatattgacgatgtcaataatgccggtattggcatacagttcatcgatttttagatttcattcagaggatgtggaattatgttatgggcatttgtattttgataggatctataatgtagtaaatataaaatataatccgcatattccatatagatataattttattaatcgcacgttaaccgtagatgaactagacgataatgtcttttttacacatggttattttttaaaacacaaatatggttcacttaatcctagtttgattgtctcattatcaggaaacttaaaatataatgatatacaatgctcagtaaatgtatcgtgtctcattaaaaatttggcaacgagtacatctactatattaacatctaaacataagacttattctctacatcggtccacgtgtattactataataggatacgattctattatatggtataaagatataaatgacaagtataatgacatctatgattttactgcaatatgtatgctaatagcgtctacattgatagtgaccatatacgtgtttaaaaaaataaaaatgaactcttaattatgctatgctattagaaatggataaaatcaaaattacggttgattcaaaaattggtaatgttgttaccatatcgtataacttggaaaagataactattgatgtcacacctaaaaagaaaaaagaaaaggatgtattattagcgcaatcagttgctgtcgaagaggcaaaagatgtcaaggtagaagaaaaaaatattatcgatattgaagatgacgatgatatggatgtagaaagcgcataatacgatctataaaaataagtatataaatactttttatttactgtactcttactgtgtagtggtgataccctactcgattatttttttaaaaaaaaaatacttattctgattcttctaaccatttccgtgttcgttcgaatgccacatcgacgtcaaagataggggagtagttaaaatctagttctgcattgttggtacacaccttaaatgtagtgttggatatcttcaacgtatagttgttgagtagtgatggttttctaaatagaattctcttcatatcattcttgcacgcgtacatttttagcatccatcttggaaaccttaactttcgaggttattggttgtggatcttctacaatatctatgactctgatttcttgaacatcatctgcactaattaacagttttactatatacctgcctagaaatccggcaccaccagtaaccgcgtacacggccattgctgccactcataatatcagactacttattctattttactaaataatggctgtttgtataatagaccacgataatatcagaggagttatttactttgaaccagtccatggaaaagataaagttttaggatcagttattggattaaaatccggaacgtatagtttgataattcatcgttacggagatattagtcaaggatgtgattccataggcagtccagaaatatttatcggtaacatctttgtaaacagatatggtgtagcatatgtttatttagatacagatgtaaatatatctacaattattggaaaggcgttatctatttcaaaaaatgatcagagattagcgtgtggagttattggtatttcttacataaatgaaaagataatacattttcttacaattaacgagaatggcgtttgatatatcagttaatgcgtctaaaacaataaatgcattagtttacttttctactcagcaaaataaattagtcatacgtaatgaagttaatgatacacactacactgtcgaatttgatagggacaaagtagttgacacgtttatttcatataatagacataatgacaccatagagataagaggggtgcttccagaggaaactaatattggttgcgcggttaatacgccggttagtatgacttacttgtataataagtatagttttaaactgattttagcagaatatataagacacagaaatactatatccggcaatatttattcggcattgatgacactagatgatttggctattaaacagtatggagacattgatctattatttaatgagaaacttaaagtagactccgattcgggactatttgactttgtcaactttgtaaaggatatgatatgttgtgattctagaatagtagtagctctatctagtctagtatctaaacattgggaattgacaaataaaaagtataggtgtatggcattagccgaacatatatctgatagtattccaatatctgagctatctagactacgatacaatctatgtaagtatctacgcggacacactgagagcatagaggataaatttgattattttgaagacgatgattcgtctacatgttctgccgtaaccgacagggaaacggatgtataattttttttatagcgtgaaggatatgataaaaaatataattgttgtatttatcccattccaatcaccttatatgattctgtaacacaataaaggagtcttatagatgtatagaggtcagatactggtttgataaactgtttattccacataagtatgtttgactttatggttagacccgcatactttaacaaatcactgaaaattggagttaggtattgacctctcagaatcagttgccgttctggaacattaaatgtattttttatgatatactccaacgcatttatgtgggcatacaacaagtcattactaatggaatattccaagagttttagttgtctagtatttaacaagagaagagatttcaacagactgtttatgaactcgaatgccgcctcattgtcgcttatattgatgatgtcgaattctcccaatatcatcaccgatgagtagctcatcttgttatcgggatccaagttttctaaagatgtcattaaaccctcgatcatgaatggatttatcatcatcgtttttatgttggacatgagcttagtccgtttgtccacatctatagaagatgatttctgaattatttcatatatctctctctttaactccaggaacttgtcaggatggtctactttaatatgttctcgtctaagagatgaaaatctttggatggttgcacgcgacttttctctaaaggatgacgttgcccaagatcctctcttaaatgaatccatcttatccttggacaagatggacagtctattttccttagatggtttaatatttttgttacccatgatctataaaggtagacctaatcgtctcggatgaccatatatttattttcagttttattatacgcataaattgtaaaaaatatgttaggtttacaaaaatgtctcgtggggcattaatcgtttttgaaggattggacaaatctggaaaaacaacacaatgtatgaacatcatggaatctataccggcaaacacgataaaatatcttaactttcctcagagatccactgtcactggaaaaatgatagatgactatctaactcgtaaaaaaacctataatgatcatatagttaatctattattttgtgcaaatagatgggagtttgcatcttttatacaagaacaactagaacagggaattactttaatagttgatagatacgcattttctggagtagcgtatgccgccgctaaaggcgcgtcaatgactctcagtaagagttatgaatctggattgcctaaacccgacttagttatattcttggaatctggtagcaaagaaattaatagaaacgtcggcgaggaaatttatgaagatgttacattccaacaaaaggtattacaagaatataaaaaaatgattgaagaaggagatattcattggcaaattatttcttctgaattcgaggaagatgtaaagaaggagttgattaagaatatagttatagaggctatacacacggttactggaccagtggggcaactgtggatgtaatagtgaaattacattttttataaatagatgttagtacagtgttataaatggatgaagcatattactctggcaacttggaatcagtactcggatacgtgtccgatatgcataccgaactcgcatcaatatctcaattagttattgccaagatagaaactatagataatgatatattaaacaaggacattgtaaattttatcatgtgtagatcaaacttggataatccatttatctctttcctagatactgtatatactattaaaaataactagttataagtttgaatccgtcaattttgattccaaaattgaatggactggggatggtctatacaatatatcccttaaaaattatggcatcaagacgtggcaaacaatgtatacaaatgtaccagaaggaacatacgacatatccgcatttccaaagaatgatttcgtatctttctgggttaaatttgaacaaggcgattataaagtggaagagtattgtacgggactatgcgtcgaagtaaaaattggaccaccgactgtaacattaactgaatacgacgaccatatcaatttgtacatcgagcatccgtatgctactagaggtagcaaaaagattcctatttacaaacgcggtgacatgtgtgatatctacttgttgtatacggctaacttcacattcggagattctaaagaaccagtaccatatgatatcgatgactacgattgcacgtctacaggttgcagcatagactttgtcacaacagaaaaagtgtgcgtgacagcacagggagccacagaagggtttctcgaaaaaattactccatggagttcgaaagtatgtctgacacctaaaaagagtgtatatacatgcgcaattagatccaaagaagatgttcccaatttcaaggacaaaatggccagagttatcaagagaaaatttaatacacagtctcaatcttatttaactaaatttctcggtagcacatcaaatgatgttaccacttttcttagcatgcttaacttgactaaatattcataattattttttattaatgatacaaaaacgaaataaaactgcatattatacactggttaacgcccttataggctctaaccattttcaagatgaggtccctgattatagtccttctgttcccctctatcatctactccatgtctattagacgatgtgagaagactgaagaggaaacatggggattgaaaatagggttgtgtataattgccaaagatttctatcccgaaagaactgattgcagtgttcatctcccaactgcaagtgaaggattgataactgaaggcaatggattcagggatatacgaaacaccgataaattataaaaaaagcaatgtgtccgctgtttccgttaataatactattttcgtaactggcggattattcataaataactctaatagcacgatcgtggacatttataaagacaaacaatggtcgattatagaaatggctagggtatatcacggcatcgactcgacatttggaatgttatattttgccggaggtctatccgttaccgaacaatatggtaatttagagaaaaacaacgagatatcttgttacaatcctagaacgaataagtggtttgatatttcatatactatttataagatatccatatcatcattgtgtaaactaaataacgtcttctatgtatttagtaaggacattggatatgtggaaaagtatgatggtgcatggaagttagtacatgatcgtctccccgctataaaggcattatcaacttctccttattgattgaaaatgaaaatataaatagtttttatgtatagcagtattaccctatagttttattgcttactactaacatggatacagatgttacaaatgtagaagatatcataaatgaaatagatagagagaaagaagaaatactaaaaaatgtagaaattgaaaataataaaaacattaacaagaatcatcccaatgaatatattagagaagcactcgttattaataccagtagtaatagtgattccattgataaagaagttatagaatgtatcagtcacgatgtaggaatatagatcatatctactaatttttataatcgatacaaaacataaaaaacaactcgttattacatagcaggcatggaatccttcaagtattgttttgataacgatggcaagaaatggattatcggaaatactttatattctggtaattcaatactctataaggtcagaaaaaatttcactagttcgttctacaattacgtaatgaagatagatcacaaatcacacaagccattgttgtctgaaatacgattctatatatctgtattggatcctttgactatcgacaactggacacgggaacgtggtataaagtatttggctattccagatctgtatggaattggagaaaccgatgattatatgttcttcgttataaagaattcgggaagagtattcgccccaaaggatactgaatcagtcttcgaagcatgcgtcactatgataaacacgttagagtttatacactctcgaggatttacccatggaaaaatagaaccgaggaatatactgattagaaataaacgtctttcactaattgactattctagaactaacaaactatacaagagtggaaactcacatatagattacaacgaggacatgataacttcaggaaatatcaattatatgtgtgtagacaatcatcttggagcaacagtttcaagacgaggagatttagaaatgttgggatattgcatgatagaatggttcggtggcaaacttccatggaaaaacgaaagtagtataaaagtaataaaacaaaaaaaagaatataaaaaatttatagctactttctttgaggactgttttcctgaaggaaatgaacctctggaattagttagatatatagaattagtatacacgttagattattctcaaactcctaattatgacagactacgtaaactgtttatacaagattgaaattatattcttttttttatagagtgtggtagtgttacggatatctaatattaatattagactatctctatcgcgctacacgaccaatatcgattactatggatatcttctatgaaaggagagaatgtatttatttctccagcgtcaatctcgtcagtattgacaatactgtattatggagctaatggatccactgctgaacagctatcaaaatatgtagaaacggaggagaacacggataaggttagcgctcagaatatctcattcaaatccatgaataaagtatatgggcgatattctgccgtgtttaaagattcctttttgagaaaaattggcgataagtttcaaactgttgacttcactgattgtcgcactatagatgcaatcaacaagtgtgtagatatctttactgaggggaaaatcaatccactattggatgaaccattgtctcctagcaattagtgccgtatactttaaagcaaaatggttgacgccattcgaaaaggaatttaccagtgattatcccttttacgtatctccgacggaaatggtagacgtaagtatgatgtctatgtacggcaaggcatttaatcacgcatctgtaaaagaatcattcggcaacttttcaatcatagaactgccatatgttggagatactagtatgatggtcattcttccagacaagattgatggattagaatccatagaacaaaatctaacagatacaaattttaagaaatggtgtgactttatggatgctatgtttatagatgttcacattcccaagtttaaggtaacaggctcgtataatctggtggatactctagtaaagtcaggactgacagaggtgttcggttcaactggagattatagcaatatgtgtaatttagatgtgagtgtcgacgctatgatccacaaaacgtatatagatgtcaatgaagagtatacagaagcagctgcagcaacttctgtactagtggcagactgtgcatcaacaattacaaatgagttctgtgcagatcatccgttcatctatgtgattaggcatgttgatggaaaaattcttttcgttggtagatattgctctccgacaactaattgttaaccattttttttaaaaaaaacaatgggtgatggatacacttgatggtataatgatgaatgaacgcgatgtttctgtaagcgttggcaccggaatactattcatggaaatgtttttccgttacaataaaaatagtatcaacaatcaactaatgtatgatataattaatagcgtatctataagtgtagctaattatagatatagaagctgcttttaacgacgatggtatatacatccgtagaaatatgattaacaagttgtacggatacgcatctctaactactattggcacgatcgctggaggtgtttgttattatctgttgatgcatctagttagtttgtataaataattatttcaatatactagttaaaattttaagattttaaatgtataaaaaactaataacgtttttatttgtaataggtgcattagcatcctattcgaataatgagtacactccgtttaataaactgagtgtaaaactctatatagatggagtagataatatagaaaattcatatactgatgataataatgaattggtgttaaattttaaagagtacacaatttctattattacagagtcatgcgacgtcggatttgattccatagatatagatgttataaacgactataaaattattgatatgtataccattgactcgtctactattcaacgcagaggtcacacgtgtagaatatctaccaaattatcatgccattatgataagtacccttatattcacaaatatgatggtgatgagcgacaatattctattactgcagagggaaaatgctataaaggaataaaatatgaaataagtatgatcaacgatgatactctattgagaaaacatactcttaaaattggatctacttatatatttgatcgtcatggacatagtaatacatattattcaaaatatgatttttaaaaatttaaaatatattatcacttcagtgacagtagtcaaataacaaacaacaccatgagatatattataattctcgcagttttgttcattaatagtatacacgctaaaataactagttataagtttgaatccgtcaattttgattccaaaattgaatggactggggatggtctatacaatatatcccttaaaaattatggcatcaagacgtggcaaacaatgtatacaaatgtaccagaaggaacatacgacatatccgcatttccaaagaatgatttcgtatctttctgggttaaatttgaacaaggcgattataaagtggaagagtattgtacgggactatgcgtcgaagtaaaaattggaccaccgactgtaacattgactgaatacgacgaccatatcaatttgtacatcgagcatccgtatgctactagaggtagcaaaaagattcctatttacaaacgcggtgacatgtgtgatatctacttgttgtatacggctaacttcacattcggagattctaaagaaccagtaccatatgatatcgatgactacgattgcacgtctacaggttgcagcatagactttgtcacaacagaaaaagtgtgcgtgacagcacagggagccacagaagggtttctcgaaaaaattactccatggagttcgaaagtatgtctgacacctaaaaagagtgtatatacatgcgcaattagatccaaagaagatgttcccaatttcaaggacaaaatggccagagttatcaagagaaaatttaatacacagtctcaatcttatttaactaaatttctcggtagcacatcaaatgatgttaccacttttcttagcatgcttaacttgactaaatattcataactaatttttattaatgatacaaaaacgaaataaaactgcatattatacactggttaacgcccttataggctctaaccattttcaagatgaggtccctgattatagtccttctgttcccctccatgtctattagacgatgtgagaagactgaagaggaaacatggggattgaaaatagggttgtgtataattgccaaagatttttatcccgaaagaactgattgcagtgttcatctcccaactgcaagtgaaggattgataactgaaggcaatggattcagggatatacgaaacaccgataaattataaaaaaagcaatgtgtccgctgtttccgttaataatactattttcgtaactggcggattattcataaataactctaatagcacgatcgtggacatttataaagacaaacaatggtcgattatagaaatggctagggtatatcacggcatcgactcgacatttggaatgttatattttgccggaggtctatccgttaccgaacaatatggtaatttatagaaaaacaacgagatatcttgttacaatcctagaacgaataagtggtttgatatttcatatactatttataagatatccatatcatcattgtgtaaactaaataacgtcttctatgtatttagtaaggacattggatatgtggaaaagtatgatggtgcatggaagttagtacatgatcgtctccccgctataaaggcattatcaacttctccttattgattgaaaatgaaaatataaatagtttttatgtatagcagtattaccctatagttttattgcttactactaacatggatacagatgttacaaatgtagaagatatcataaatgaaatagatagagagaaagaagaaatactaaaaaatgtagaaattgaaaataataaaaacattaacaagaatcatcccaatgaatatattagagaagcactcgttattaataccagtagtaatagtgattccattgataaagaagttatagaatgtatcagtcacgatgtaggaatatagatcatatctactaatttttataatcgatacaaaacataaaaaacaactcgttattacatagcaggcatggaatccttcaagtattgttttgataacgatggcaagaaatggattatcggaaatactttatattctggtaattcaatactctataaggtcagaaaaaatttcactagttcgttctacaattacgtaatgaagatagatcacaaatcacacaagccattgttgtctgaaatacgattctatatatctgtattggatcctttgactatcgacaactggacacgggaacgtggtataaagtatttggctattccagatctgtatggaattggagaaaccgatggattatatgttcttcgttataaagaattcgggaagagtattcgccccaaaggatactgaatcagtcttcgaagcatgcgtcactatgataaacacgttagagtttatacactctcgaggatttacccatggaaaaatagaaccgaggaatataatattaaaacttaccacgtaaaacttaaaatttaaaatgatatttcattgacagatagatcacacattatgaactttcaaggacttgtgttaactgacaattgcaaaaatcaatgggtcgttggaccattaataggaaaaggtggatttggtagtatttatactactaatgacaataattatgtagtaaaaatagagcccaaagctaacggatcattatttaccgaacaggcattttatactagagtacttaaaccatccgttatcgaagaatggaaaaaatctcacaatataaagcacgtaggtcttatcacgtgcaaggcatttggtctatacaaatccattaatgtggaatatcgattcttggtaattaatagattaggtgcagatctagatgcggtgatcagagccaataataatagactaccaaaaaggtcggtgatgttgatcggaatcgaaatcttaaataccatacaatttatgcacgagcaaggatattctcacggagatattaaagcgagtaatatagtcttagatcaaatagataagaataaattatatctagtggattacggattggtttctaaattcatgtctaatggcgaacatgttccatttataagaaatccaaataaaatggataacggtactctagaatttacacctatagattcgcataaaggatacgttgtatctagacgtggagatctagaaacacttggatattgtatgattagatggttgggaggtatcttaccatggactaagatatctgaaacaaagaattgtgcattagtaagtgccacaaaacagaaatatgttaacaatactgcgactttgttaatgaccagtttgcaatatgcacctagagaattgctgcaatatattaccatggtaaactctttgacatattttgaggaacccaattacgacaagtttcggcacatattaatgcagggtgtatattattaagtgtggtgtttggtcgataaaaattaaaaaataacttaatttattattgatctcgtgtgtacaaccgaaatcatggcgatgttttacgcacacgctctcggtgggtacgacgagaatcttcatgcctttcctggaatatcatcgactgttgccaatgatgtcaggaaatattctgttgtgtcagtttataataacaagtatgacattgtaaaagacaaatatatgtggtgttacagtcaggtgaacaagagatatattggagcactgctgcctatgtttgagtgcaatgaatatctacaaattggaaatccgatccatgatcaagaaggaaatcaaatctctatcatcacatatcgccacaaaaactactatgctctaagcggaatcgggtacgagagtctagacttgtgtttggaaggagtagggattcatcatcacgtacttgaaacaggaaacgctgtatatggaaaagttcaacatgattattctactatcaaagagaaggccaaagaaatgagtgcacttagtccaggacctatcatcgattaccacgtctggataggagattgtatctgtcaagttactgctgtggacgtacatggaaaggaaattatgaaaatgagattcaaaaagggtgcggtgcttccgatcccaaatctggtaaaagttaaacttggggagaatgatacagaaaatctttcttctactatatcggcgacaccatcgaggtaaccacctctctggaagacagcgtgaataatgtactcatgaaacgtttggaaactatacgccatatgtggtctgttgtatatgatcattttgatattgtgaatggtaaagaatgctgttatgtgcatacgcatttgtctaatcaaaatcttataccgagtactgtaaaaacaaatttgtacatgaagactatgggatcatgcattcaaatggattccatggaagctctagagtatcttagcgaactgaaggaatcaggtggatggagtcccagaccagaaatgcaggaatttgaatatccagatggagtggaagacactgaatcaattgagagattggtagaggagttcttcaatagatcagaacttcaggctggtgaatcagtcaaatttggtaattctattaatgttaaacatacatctgtttcagctaagcaactaagaacacgtatacggcagcagcttccttctatactctcatcttttaccaacacaaagggtggatatttgttcattggagttgataataatacacacaaagtatttggattcacggtgggttacgactacctcagactgatagagaatgatatagaaaagcatatcaaaagactttgtgttgtgtatttctgtgagaagaaagaggacatcaagtacgcgtgtcgattcatcaaggtatataaacctggggatgaggctacctcgacatacgtgtgcgctatcaaagtggaaagatgctgttgtgctgtgtttgcagattggccagaatcatggtatatggatactaatggtatcaagaagtattctccagatgaatgggtgtcacatataaaattttaattaatgtaactatagagaacaaataataaggttgtaatatcatatagacaataactaacaattaattagtaactgttatctcttttttaattaaccaactaactatatacctattaatacatcgtaattatagttcttaacatctattaatcattaattcgcttctttaattttttataaactaacattgttaattgaaaagggataacatgttacagaatataaattatatatggatttttttaaaaaggaaatacttgactggagtatatatttatctcttcattatatagcacgcgtgttttccaatttttccacatcccatataatacaggattataatctcgttcgaacatacgagaaagtggataaaacaatagttgattttttatctaggttgccaaatttattccatattttagaatatggggaaaatattctacatatttattctatggatgatgctaatacgaatattataattttttttctagatagagtattaaatattaataagaacgggtcatttatacacaatctcgggttatcatcatccattaatataaaagaatatgtatatcaattagttaataatgatcatccagataataggataagactaatgcttgaaaatggacgtagaacaagacattttttgtcctatatatcagatacagttaatatctatatatgtattttaataaatcatggattttatatagatgccgaagacagttacggttgtacattattacatagatgtatatatcactataagaaatcagaatcagaatcatacaatgaattaattaagatattgttaaataatggatcagatgtagataaaaaagatacgtacggaaacacaccttttatcctattatgtaaacacgatatcaacaacgtggaattgtttgagatatgtttagagaatgctaatatagactctgtagactttaatagatatacacctcttcattatgtctcatgtcgtaataaatatgattttgtaaagttattaatttctaaaggagcaaatgttaatgcgcgtaataaattcggaactactccattttattgtggaattatacacggtatctcgcttataaaactatatttggaatcagacacagagttagaaatagataatgaacatatagttcgtcatttaataatttttgatgctgttgaatctttagattatctattatccagaggagttattgatattaactatcgtactatatacaacgaaacatctatttacgacgctgtcagttataatgcgtataatacgttggtctatctattaaacaaaaatggtgattttgagacgattactactagtggatgtacatgtatttcggaagcagtcgcaaacaacaacaaaataataatggaagtactattgtctaaacgaccatctttgaaaattatgatacagtctatgatagcaattactaaacataaacagcataatgcagatttattgaaaatgtgtataaaatatactgcgtgtatgaccgattatgatactcttatagatgtacagtcgctacagcaatataaatggtatattttaagatgtttcgatgaaatagatatcatgaagagatgttatataaaaaataaaactgtattccaattagttttttgtatcaaagacattaatactttaatgagatacggtaaacatccttctttcgtgaaatgcactagtctcgacgtatacggaagtcgtgtacgtaatatcatagcatctattagatatcgtcagagattaattagtctattatccaagaagctggatcctggagataaatggtcgtgttttcctaacgaaataaaatataaaatattggaaaactttaacgataacgaactatccacatatctaaaaatcttataaacattattaaaatataaaatctaagtaggataaaatcacactacatcattgtttccttttagtgctcgacagtgtatactatttttaacgctcataaataaaaatgaaaacgatttccgttgttacgttgttatgcgtactacctgctgttgtttattcaacatgtactgtacccactatgaataacgctaaattaacgtctaccgaaacatcgtttaatgataaccagaaagttacgtttacatgtgatcagggatatcattctttggatccaaatgctgtctgtgaaacagataaatggaaatacgaaaatccatgcaaaaaaatgtgcacagtttctgattatgtctctgaactatataataaaccgctatacgaagtgaattccaccatgacactaagttgcaacggcgaaacaaaatattttcgttgcgaagaaaaaaatggaaatacttcttggaatgatactgttacgtgtcctaatgcggaatgtcaacctcttcaattagaacacggatcgtgtcaaccagttaaagaaaaatactcatttggggaatatatgactatcaactgtgatgttggatatgaggttattggtgcttcgtacataagttgtacagctaattcttggaatgttattccatcatgtcaacaaaaatgtgatatgccgtctctatctaacggattaatttccggatctacattttctatcggtggcgttatacatcttagttgtaaaagtggttttacactaacggggtctccatcatccacatgtatcgacggtaaatggaatcccatactcccaatatgtgtacgaactaacgaaaaatttgatccagtggatgatggtcccgacgatgagacagatttgagcaaactctcgaaagacgttgtacaatatgaacaagaaatagaatcgttagaagcaacttatcatataatcatagtggcgttgacaattatgggcgtcatatttttaatctccgttatagtattagtttgttcctgtgacaaaaataatgaccaatataagttccataaattgctaccgtaaatataaatccgttaaaataattaataatttaataacaaacaagtatcaaaagattaaagacttatagctagaatcaattgagatgtcttcttcagtggatgttgatatctacgatgccgttagagcatttttactcaggcactattataacaagagatttattgtgtatggaagaagtaacgccatattacataatatatacaggctatttacaagatgcgccgttataccgttcgatgatatagtacgtactatgccaaatgaatcacgtgttaaacaatgggtgatggatacacttaatggtataatgatgaatgaacgcgatgtttctgtaagcgttggcaccggaatactattcatggaaatgtttttcgattacaataaaaatagtatcaacaatcaactaatgtatgatataattaatagcgtatctataattctagctaatgagagatatagaagcgcttttaacgacgatggtatatacatccgtagaaatatgattaacaagttgtacggatacgcatctctaactactattggcacgatcgctggaggtgtttgttattatctgttgatgcatctagttagtttgtataaataattatttcaatatactagttaaaattttaagattttaaatgtataaaaaactaataacgtttttatttgtaataggtgcattagcatcctattcgaataatgagtacactccgtttaataaactgagtgtaaaactctatatagatggagtagataatatagaaaattcatatactgatgataataatgaattggtgttaaattttaaagagtacacaatttctattattacagagtcatgcgacgtcggatttgattccatagatatagatgttataaacgactataaaattattgatatgtataccattgactcgtctactattcaacgcagaggtcacacgtgtagaatatctaccaaattatcatgccattatgataagtacccttatattcacaaatatgatggtgatgagcgacaatattctattactgcagagggaaaatgctataaaggaataaaatatgaaataagtatgatcaacgatgatactctattgagaaaacatactcttaaaattggatctacttatatatttgatcgtcatggacatagtaatacatattattcaaaatatgatttttaaaaatttaaaatatattatcacttcagtgacagtagtcaaataacaaacaacaccatgagatatattataattctcgcagttttgttcattaatagtatacatgctaaaataactagttataagtttgaatccgtcaattttgattccaaaattgaatggactggggatggtctatacaatatatcccttaaaaattatggcatcaagacgtggcaaacaatgtatacaaatgtaccagaaggaacatacgacatatccgcatttccaaagaatgatttcgtatctttctgggttaaatttgaacaaggcgattataaagtggaagagtattgtacgggactatgcgtcgaagtaaaaattggaccaccgactgtaacattgactgaatacgacgaccataaacagaaaaagtgtgcgtgacagcacagggagccacagaagggtttctcgaaaaaattactccatggagttcgaaagtatgtctgacacctaaaaagagtgtatatacatgcgcaattagatccaaagaagatgttcccaatttcaaggacaaaatggccagagttatcaagagaaaatttaatacacagtctcaatcttatttaactaaatttctcggtagcacatcaaatgatgttaccacttttcttagcatgcttaacttgactaaatattcataactaatttttattaatgatacaaaaacgaaataaaactgcatattatacactggttaacgcccttataggctctaaccattttcaagatgaggtccctgattatagtccttctgttcccctctatcatctactccatgtctattagacgatgtgagaagactgaagaggaaacatggggattgaaaatagggttgtgtataattgccaaagatttctatcccgaaagaactgattgcagtgttcatctcccaactgcaagtgaaggattgataactgaaggcaatggattcagggatatacgaaacaccgataaattataaaaaaagcaatgtgtccgctgtttccgttaataatactattttcgtaactggcggattattcataaataactctaatagcacgatcgtggttaacaatatggaaaaacttgacatttataaagacaaacaatggtcgattatagaaatgcctatggctagggtatatcacggcattgactcgacatttggaatgttatattttgccggaggtctatccgttaccgaacaatatggtaatttagagaaaaacaacgagatatcttgttacaatcctagaacgaataagtggtttgatatttcatatactatttataagatatccatatcatcattgtgtaaactaaataacgtcttctatgtatttagtaaggacattggatatgtggaaaagtatgatggtgcatggaagttagtacatgatcgtctccccgctataaaggcattatcaacttctccttattgattgaaaatataaatagtttttatgtatagcagtattaccctatagttttattgcttactactaacatggatacagatgttacaaatgtagaagatatcataaatgaaatagatagagagaaagaagaaatactaaaaaatgtagaaattgaaaataataaaaacattaacaagaatcatcccaatgaatatattagagaagcactcgttattaataccagtagtaatagtgattccattgataaagaagttatagaatgtatcagtcacgatgtaggaatatagatcatatctactaatttttataatcgatacaaaacataaaaaacaactcgttattacatagcaggcatggaatccttcaagtattgttttgataacgatggcaagaaatggattatcggaaatactttatattctggtaattcaatactctataaggtcagaaaaaatttcactagttcgttctacaattacgtaatgaagatagatcacaaatcacacaagccattgttgtctgaaatacgattctatatatctgtattggatcctttgactatcgacaactggacacgggaacgtggtataaagtatttggctattccagatctgtatggaattggagaaaccgatgattatatgttcttcgttataaagaattcgggaagagtattcgccccaaaggatactgaatcagtcttcgaagcatgcgtcactatgataaacacgttagagtttatacactctcgaggatttacccatggaaaaatagaaccgaggaatatactgattagaaataaacgtctttcactaattgactattctagaactaacaaactatacaagagtggaaactcacatatagattacaacgaggacatgataacttcaggaaatatcaattatatgtgtgtagacaatcatcttggagcaacagtttcaagacgaggagatttagaaatgttgggatattgcatgatagaatggttcggtggcaaacttccatggaaaaacgaaagtagtataaaagtaataaaacaaaaaaaagaatataaaaaatttatagctactttctttgaggactgttttcctgaaggaaatgaacctctggaattagttagatatatagaattagtatacacgttagattattctcaaactcctaattatgacagactacgtaaactgtttatacaagattgaaattatattcttttttttatagagtgtggtagtgttacggatatctaatattaatattagactatctctatcgcgctacacgaccaatatcgattactatggatatcttctatgaaaggagagaatgtatttatttctccagcgtcaatctcgtcagtattgacaatactgtattatggagctaatggatccactgctgaacagctatcaaaatatgtagaaacggaggagaacacggataaggttagcgctcagaatatctcattcaaatccatgaataaagtatatgggcgatattctgccgtgtttaaagattcctttttgagaaaaattggcgataagtttcaaactgttgacttcactgattgtcgcactatagatgcaatcaacaagtgtgtagatatctttactgaggggaaaatcaatccactattggatgaaccattgtctcctagcaattagtgccgtatactttaaagcaaaatggttgacgccattcgaaaaggaatttaccagtgattatcccttttacgtatctccgacggaaatggtagacgtaagtatgatgtctatgtacggcaaggcatttaatcacgcatctgtaaaagaatcattcggcaacttttcaatcatagaactgccatatgttggagatactagtatgatggtcattcttccagacaagattgatggattagaatccatagaacaaaatctaacagatacaaattttaagaaatggtgtgactttatggatgctatgtttatagatgttcacattcccaagtttaaggtaacaggctcgtataatctggtggatactctagtaaagtcaggactgacagaggtgttcggttcaactggagattatagcaatatgtgtaatttagatgtgagtgtcgacgctatgatccacaaaacgtatatagatgtcaatgaagagtatacagaagcagctgcagcaacttctgtactagtggcagactgtgcatcaacaattacaaatgagttctgtgcagatcatccgttcatctatgtgattaggcatgttgatggaaaaattcttttcgttggtagatattgctctccgacaactaattgttaaccattttttttaaaaaaaatagaaaaaacatgtggtattagtgcaggtcgttgttcttccaattgcaattggtaagatgacggccaactttagtacccacgtcttttcaccacagcactgtggatgtgacagactgaccagtattgatgacgtcaaacaatgtttgactgaatatatttattggtcgtcctatgcataccgcaacaggcaatgcgctggacaattgtattccacactcctctcttttagagatgatgcggaattagtgttcatcgacattcgcgagctggtaaaaaatatgccgtgggatgatgtcaaagattgtacagaaatcatccgttgttatataccggatgagcaaaaaaccatcagagagatttcggccatcatcggactttgtgcatatgctgctacttactggggaggtgaagaccatcccactagtaacagtctgaacgcattgtttgtgatgcttgagatgctaaattacgtggattataacatcatattccggcgtatgaattgatgagttgtacatcttgacattttctttcttctcttctccctttcttctcttctcccttcctccctcttctccctttcccagaaacaaacttttttacccactataaaataaaatgagtatactacctgttatatttctttctatatttttttattcttcattcgttcagacttttaacgcgtctgaatgtatcgacaaagggcaatattttgcatcattcatggagttagaaaacgagccagtaatcttaccatgtcctcaaataaatacgctatcatccggatataatatattagatattttatgggaaaaacgaggagcggataatgatagaattataccgatagataatggtagcaatatgctaattctgaacccgacacaatcagactctggtatttatatatgcattaccacgaacgaaacctactgtgacatgatgtcgttaaatttgacaatcgtgtctgtctcagaatcaaatatagattttatctcgtatccacaaatagtaaatgagagatctactggcgaaatggtatgtcccaatattaatgcatttattgctagtaacgtaaacgcagatattatatggagcggacatcgacgccttagaaataagagacttaaacaacggacacctggaattattaccatagaagatgttagaaaaaatgatgctggttattatacatgtgttttagaatatatatacggtggcaaaacatataacgtaaccagaattgtaaaattagaggtacgggataaaataataccttctactatgcaattaccagatggcattgtaacttcaataggtagtaatttgactattgcatcgttgagacctcccacaacggatgcagacgtcttttggataagtaatggtatgtattacgaagaagatgatggggacggaaacggtagaataagtgtagcaaataaaatctatatgaccgataagagacgtgttattacatcccggttaaacattaatcctgtcaaggaagaagatgctacaacgtttacgtgtatggcgtttactattcctagcatcagcaaaacagttactgttagtataacgtgaatgtatgttgttacatttccatgtcaattgagtttataagaatttttatacattatcttccaacaaacaattgacgaacgtattgctatgattaactcccacgatactatgcatattattaatcattaacttgcagactatacctagtgctattttgacatactcatgttcttgtgtaattgcggtatctatattattaaagtacgtaaatctagctatagttttattatttaattttagataatataccgtctccttatttttaaaaattgccacatcctttattaaatcatgaatgggaatttctatgtcatcgttagtatattgtgaacaacaagagcagatatctataggaaagggtggaatgcgatacattgatctatgtagttttaaaacacacgcgaactttgaagaatttatataaatcattccatcgatacatccttctatgttgagatgtatatatccaggaattcgtttattaatatcgggaaatgtataaactaaaacattgcccgaaagcggtgcctctatctgcgttatatccgttcttaacttacaaaatgtaaccaatacctttgcatgacttgttttgttcggcaacgttagtttaaacttgacgaatggattaattacaatagcatgatccgcgcatctattaagtttttttactttaacgcccttgtatgtttttacagagactttatctaaatttctagtgcttgtatgtgttataaatataacgggatatagaaccgaatcacctaccttagatacccaattacattttatcagatccagataataaacaaattttgtcgccctaactaattctatattgttatatattttacaattggttatgatatcatgtaataacttggagtctaacgcgcatcgtcgtacgtttatacaattgtgatttagtgtagtatatctacacatgtatttttccgcactatagtattctggactagtgataaaactatcgttatatctatcttcaatgaactcatcgagatattgctctctgtcatattcatacacctgcataaactttctagacatcttacaatccgtgttattttaggatcatatttacatatttacgggtatatcaaagatgttagattagttaatgggaatcgtctataataatgaatattaaacaattatatgaggacttttaccacaaagcatcataaaaatgagtcgtcgtctgatttatgttttaaatatcaaccgcaaatcaactcataaaatacaagagaatgaaatatatacatattttagtcattgcaatatagaccatacttctacagaacttgattttgtagttaaaaactatgatctaaacagacgacaacctgtaactgggtatactgcactacactgctatttgtataataattactttacaaacgatgtactgaagatattattaaatcatggagtggatgtaacgatgaaaaccagtagcggacgtatgcctgtttatatattgcttactagatgttgtaatatttcacatgatgtagtgatagatatgatagacaaagataaaaaccacttattacatagagactattccaacctattactagagtatataaaatctcgttacatgttattaaaggaagaggatatcgatgagaacatagtatccactttattagataagggaatcgatcctaactttaaacaagacggatatacagcgttacattattattatttgtgtctcgcacacgtttataaaccaggtgagtgtagaaaaccgataacgataaaaaaggccaagcgaattatttctttgtttatacaacatggagctaatctaaacgcgttagataattgtggtaatacaccattccatttgtatcttagtattgaaatgtgtaataatattcatatgactaaaatgctgttgacttttaatccgaatttcgaaatatgtaataatcatggattaacgcctatactatgttatataacttccgactacatacaacacgatattcttgttatgttaatacatcactatgaaacaaatgttggagaaatgccgatagatgagcgtcgtatgatcgtattcgagtttatcaaaacatattctacacgtccggcagattcgataacttatttgatgaataggtttaaaaatataaatatttatacccgctatgaaggaaagacattattacacgtagcatgtgaatataataatacacacgtaatagattatcttatacgtatcaacggagatataaatgcgttaaccgacaataacaaacacgctacacaactcattatagataacaaagaaaattccccatataccattaattgtttactgtatatacttagatatattgtagataagaatgtgataagatcgttggtggatcaacttccatctctacctatcttcgatataaaatcatttgagaaattcatatcctactgtatacttttagatgacacattttacgataggcacgttaagaatcgcgattctaaaacgtatcgatacgcattttcaaaatacatgtcgtttgataaatacgatggtataataactaaatgtcacgacgaaacaatgttactcaaactgtccactgttctagacactacactatatgcagttttaagatgtcataattcgagaaagttaagaagatacctcaacgagttaaaaaaatataataacgataagtcctttaaaatatattctaatattatgaatgagagataccttaatgtatattataaagatatgtacgtgtcaaaggtatatgataaactatttcctgttttcacagataaaaattgtctactaacattactaccttcagaaattatatacgaaatattatacatgctgacaattaacgatctttataatatatcgtatccacctaccaaagtatagttgtatttttctcatgcgatgtgtgtaaaaaaactgatattatataaatattttagtgccgtataataaagatgacgatgaaaatgatggtacatatatatttcgtatcattattgttattgctattccacagttacgccatagacatcgaaaatgaaatcacagaattcttcaataaaatgagagatactctaccagctaaagactctaaatggttgaatccagcatgtatgttcggaggcacaatgaatgatatagccgctctaggagagccattcagcgcaaagtgtcctcctattgaagacagtcttttatcgcacagatataaagactatgtggttaaatgggagaggctagaaaagaatagacggcgacaggtttctaataaacgtgttaaacatggtgatttatggatagccaactatacatctaaattcagtaaccgtaggtatttgtgcaccgtaactacaaagaatggtgactgtgttcagggtatagttagatctcatattaaaaaacctccttcatgcattccaaaaacatatgaactaggtactcatgataagtatggcatagacttatactgtggaattctttacgcaaaacattataataatataacttggtataaagataataaggaaattaatatcgacgacattaagtattcacaaacgggaaaggaattaattattcataatccagagttagaagatagcggaagatacgactgttacgttcattacgacgacgttagaatcaagaatgatatcgtagtatcaagatgtaaaatacttacggttataccgtcacaagaccacaggtttaaactaatactagatccgaaaatcaacgtaacgataggagaacctgccaatataacatgcactgctgtgtcaacgtcattattgatcgacgatgtactgattgaatgggaaaatccatccggatggcttataggattcgattttgatgtatactctgttttaactagtagaggcggtatcaccgaggcgaccttgtactttgaaaatgttactgaagaatatataggtaatacatataaatgtcgtggacacaactattattttgaaaaaacccttacaactacagtagtattggagtaaatatacaatgcatttttatatacattactgaattattattactgaattattattactgaattattattaattatatcgtatttgtgctatagaatggatgaagatacgcgactatctaggtatttgtatctcaccgatagagaacatataaatgtagactctattaaacagttgtgtaaaatatcagatcctaatgcatgttatagatgtggatgtacggctttacatgagtacttttataattatagatcagtcaacggaaaatacaagtatagatacaacggttactatcaatattattcatctagcgattatgaaaattataatgaatattattatgatagaactggtatgaacagtgagagtgataatatatcaatcaaaacagaatatgaattctatgatgaaacacaagatcaaagtacacaactagtaggttacgacattaaactcaaaaccaatgaggatgattttatggctatgatagatcagtgggtgtccatgattatatagatgaatcaattaataaagtagtatatggaagagagtctcacgtaagatggcgggatatatggcaagaacataatgatggcgtatacagtataggaaaggagtgcatagataatatatacgaagacaaccataccgtagacgaattctacaagatagacagcgtatcagatgtagatgacgcggaacacatatctccgataactaaaaaaccatagaatcagttgatgataatacctacatttctaatcttccgtataccatcaaatacaaaatattcgagcaacaataagtattttttatacctttaaaactgataaataaattttttctagtgatattttggcaagatgagaatcctatttctcatcgctttcatgtatgggtgtgttcactcatatgttaacgcggttgaaaccaaatgtccaaatctagacattgtaacatcttctggagaatttcattgttcaggatgtgtggaacatatgcctgagtttagctatatgtattggttggcaaaggatatgaaatcggacgaggataccaagtttatagaacatctgggtgatggcatcaaagaagatgaaaccgttcgtaccacagatagtggaatcgtcactctacgtaaagtccttcatgtaaccgatactaataaatttgataattataggttcacttgtgtcctcactacgatagatggcgtttcaaaaaagaatatttggctgaagtagtgcgtgctactatttttatttatgatataatctaatggaattaatttgaattgatatttatccaatactaaagattatattagaatcaaattaatcttttatacgagaaaaaataacgacatacgtcgtcaacaaattaaactttttatttattagttaactagcttatagaacttgctcattgttatgtttctaaaacgggtacggcatataggacaattatccgacgcaccggtttctcttcgtgttctatgccatatattgatgcatgttatgcaaaatatatgagtacacgaatccaataaaccaaagtatctatcgttttgagtaaacaacttcatagcaaattccacattctttttctttacttactctatacacgtcctcgtatttatttagtattttgatgatatccaactcagaaatggttgttgtattattgggtgtataggtattattagctatgtaccaatttaccaaccctcttaatattgattgataatcacatcggttatccaatcaataaccacattaataactaaattgtagtgtatatatagaccatatatgtttctatttttttgacagttacgtatagtttcagtaagttttgattgttgtattcctgtatctctagataagttagtcatatagtcccttccggcgatacgttttttccaagcccgaaattgattagccaaatgtgtatttatttttgtgatattgatataatatttcggataatgcatactgttagtcttatatcatttggttcatctatgtattgtaatattgttacatgatctatagatgatgtattgattttggcaggatcgaattccatatccgcgactaaacagtgaaaaaaatgtaaatactttttaaattttaaattagtaaaacttttttttattttttatgattccaaaaatactgaatacaaagtcctaaattataaatatggagatcatactaccacaacttattattatgtatacaaggccggtgtaatagatagatatatataattctattacaccggcagacaattaccgaccggtatttgtcgttaccaacataccgtataatatgtaatatacaattccataacccattgacagttgttatacatcaaaattgcaattcttttgattacgatgttataagaatgtagttaattgatgtatgatgttaatgtgtcctctttcctcttataacatcgtaatcaaaaacttttttataatatatacctaataatgtgtcttaatagttctcgtgattcgtcaaacaatcattcttataaaatataataaagcaacgtaaaaacacataaaaataagcgtaactaataagacaatggatatttacgacgataaaggtctacagactattaaactgtttaataatgaatttgattgtataaggaatgacatcagagaattatttaaacatgtaactgattccgatagtatacaacttccgatggaagacaattctgatattatagaaaatatcagaaaaatactatatagacgattaaaaaatgtagaatgtgttgacatcgataacacaataacttttatgaaatacgatccaaatgatgataataagcgtacgtgttctaattgggtacccttaactaataactatatggaatattgtctagtaatatatttggaaacaccgatatgtggaggcaaaataaaattataccaccctacaggaaatataaagtcggataaggatattatgtttgcaaagactctagactaagatagacagcgtatcagatgtagatgacgcggaacacatatctcctataactaatgatgtatctacacaaacatgggaaaagaaatcagagttagatagatacatggaatcgtatcctcgtcatagatatagtaaacattctgtatttaagggattttctgataaagttagaaaaaatgatttagacatgaatgtggtaaaagaattactttctaacggtgcatctctaacaatcaaggatagcagtaataaggatccaattgctgtttattttagaagaacgataatgaatttagaaatgattgatattattaacaaacatacaactattgatgaacgaaagtatatagtacactcctatctaaaaaattatagaaatttcgattatccatttttcaggaagttagttttgactaataaacattgtctcaacaattattataatataagcgacagcaaatatggaacaccgctacatatattggcgtctaataaaaaattaataactcctaattacatgaagttattagtgtataacggaaatgatataaacgcacgaggtgaagatacacaaatgcgaaccaactcagaaatggttgttgtattattgggtgtataggtattattagctatgtaccaatttaccaaccctcttaatattgattgataatcacatcggttatccaattaataactaaattgtagtgtatatatagaccatatatgtttctatttttttgacagttacgtatagtttcagtaagttttgattgttgtattcctgtatctctagataagttagtcatatagtcccttccggcgatacgttttttccaagcccgaaattgattagccaaatgtgtatttatttttgtgatattgatataatatttcggataatgcatactgttagtcttatatcatttggttcatctatgtattgtaatattgttacatgatctatagatgatgtattgattttggcaggatcgaattccatatccgcgactaaacagtgaaaaaaatgtaaatactttttaaattttaaattagtaaaacttttttttattttttatgattccaaaaatactgaatacaaagtcctaaattataaatatggagatcatactaccacaacttattattatgtatacaaggccggtgtaatagatagatatatataattctattacaccggcagacaattaccgaccggtatttgtcgttaccaacataccgtataatatgtaatatacaattccataacccattgacagttgttatacatcaaaattgcaattcttttgattacgatgttataagaatgtagttaattgatgtatgatgttaatgtgtcctctttcctcttataacatcgtaatcaaaaacttttttataatatatacctaataatgtgtcttaatagttctcgtgattcgtcaaacaatcattcttataaaatataataaagcaacgtaaaaacacataaaaataagcgtaactaataagacaatggatatttacgacgataaaggtctacagactattaaactgtttaataatgaatttgattgtataaggaatgacatcagagaattatttaaacatgtaactgattccgatagtatacaacttccgatggaagacaattctgatattatagaaaatatcagaaaaatactatatagacgattaaaaaatgtagaatgtgttgacatcgataacacaataacttttatgaaatacgatccaaatgatgataataagcgtacgtgttctaattgggtacccttaactaataactatatggaatattgtctagtaatatatttggaaacaccgatatgtggaggcaaaataaaattataccaccctacaggaaatataaagtcggataaggatattatgtttgcaaagactctagactttaaatcaacgaaagtgttaactggacgtaaaacaattgccgttctagacatatccgtttcatataatagatcaatgactactattcactacaacgacgacgttgatatagatatacatactgataaaaatggaaaagagttatgttattgttatataacaatagatgatcattacttggttgatgtggaaactataggagttatagtcaatagatctggaaaatgtctgttagtaaataaccatctaggtataggtatcgttaaagataaacgtataagcgatagttttggagatgtatgtatggatacaatatttgacttttctgaagcacgagagttattttcattaactaatgatgataacaggaatatagcatgggacactgataaactagacgatgatacagatatatggactcccgtcacagaagatgattacaaatttctttctagactagtattgtatgcaaaatctcaatcggatactgtatttgactattatgttcttactggtgatacggaaccacccactgtattcattttcaaggtaactagattttactttaatatgccgaaataaaaaatttttgtataatatctagaggtagaggtattgtttagataaatacaaataacatagatacatcgcatacttagcatttttataaatatacataagacatacactttatacatttttgtaaaaatactcataaaaaaatttataaaaattatggcacaaccatatcttgtataggtagtttagttcgtcgagtgaacctataaacagataatagacaacacataataatgcctactaatacaagcataataccgggagatgggatatatgacgttgtagtgtttgggttttctgaacgttgatagtctactaatactacatgctgacatctaatgcctgtataaccatgagagcatctacaatacataccgtcaatatctctagcgtggatacagtcaccgtgtaaacaatatccatctccctctggaccgcataatctgatagctggaatatctgttgtagcgtttgtaatttctggcaatgtcgtttcgatagcgttaccactatcggcgaatgatctgattatcatagcagcgaacaacaacatcagataatttatcaacatttttgatggattctgtgtttatgctgtttctcagtgtgtgtttatgacaagattgggaattttatattattaattcagtaatataaactaataatatattgttaattgtgtaaataatataaaaataacaatacaatattgaatgtgttgctgttaaaaatgtatgtgttaatataatagaataaaataaatgagtatgatcattttagataacgattgattttatcattaccgcttcattcttatattctttgcttacggaacctatatttagaaacatctactaacaattttttatgcttgcattattaatggtatgtaatatgattgattgtgtacgcaataccaatttgttaagtatgaatacggggtacaaacataaattgaaatttaacattatttatttatgatatatatcgttatcgttaggtctataccatggatatctttaaagaactaatcttaaaacaccctgatgaaaatgttttgatttctccagtttccattttatctactttatctattctaaatcatggagcagctggttctacagctgaacaactatcaaaatatatagagaatatgaatgagaatacacccgatgacaataatgatgacatggaggtagatattccgtattgtgcgacactagctaccgcaaataaaatatacggtagcgatagtatcgagttccacgcctccttcctacaaaaaataaaagacgattttcaaactgtaaactttaataatgctaaccaaacaaaggaactaatcaacgaatgggttaagacaatgacaaatggtaaaattaattccttattgactagtccgctatccattaatactcgtatgacagttgttagcgccgtccattttaaagcaatgtggaaatatccattttctaaacatcttacatatacagacaagttttatatttctaagaatatagttaccagcgttgatatgatggtgggtaccgagaataacttgcaatatgtacatattaatgaattattcggaggattctctattatcgatattccatacgagggaaactctagtatggtaattatactaccggacgacatagaaggtatatataacatagaaaaaaatataacagatgaaaaatttaaaaaatggtgtggtatgttatctactaaaagtatagacttgtatatgccaaagtttaaagtggaaatgacagaaccgtataatctggtaccgattttagaaaatttaggacttactaatatattcggatattatgcagattttagcaagatgtgtaatgaaactatcactgtagaaaaatttctacatacgacgtttatagatgttaatgaggagtatacagaagcatcggccgttacaggagtatttacgattaacttttcgatggtatatcgtacgaaggtctacataaaccatccattcatgtacatgattaaagacaccacaggacgtatactttttatagggaaatactgctatccgcaataaatataaacaaatagacttttataaagagtcttcaacgataagtatatcgacatactacttatgctgcgaaagattctgaacgagaacgactatctcaccctcttggatcatatccgcactgctaaatactaaatctccactacactttttatcatcttatgaggaatgattgccttcgtgaaataggaataattagcaccagaatagctatggattattgtggtagagagtgcactattctatgtcgtctactggatgaagatgtgacgtacaaaaaaataaaactagaaattgaaacgtgtcacaacttatcaaaacatatagatagacgaggaaacaatgcgctacattgttacgtctccaataaatgcgatacagacattaagattgttctctcgcggagtcgagagactttgtagaaacaacgaaggattaactccgctaggagtatacagtaagcatagatacgtaaaatctcagattgtgcatctactgatatccagctattcaaattcctctaacgaactcaagtcgaatataaatgatttcgatctgtattcggataatatcgacttacgtctgctaaaatacctaattgtggataaacggatacgtccgtccaagaatacgaattatgcaatcaatggtctcggattggtggatatatacgtaacgacgcctaatccgagaccagaagtattgctatggcttcttaaatcagaatgttacagcaccggttacgtatttcgtacctgtatgtacgacagtgatatgtgtaagaactctcttcattactatatatcgtctcatagagaatctcaatctctatccaaggatgtaattaaatgtttgatcgataacaatgtttccatccatggcagagacgaaggaggatctttacccatccaatactactggtctttctcaaccatagatatagagattgttaaattattattaataaaggatgtggacacgtgtagagtatacgacgtcagccctatattagaggcgtattatctaaacaagcgatttagagtaaccccatataatgtagacatggaaatcgttaatcttcttattgagagacgtcatactcttgtcgacgtaatgcgtagtattacttcgtacgattccagagaatataaccactacatcatcgataacattctaaagagatttagacaacaggatgtacaagccatgttgataaactacttacattacggcgatatggtcgttcgatgcatgttagataacggacaacaactatcctctgcacgactactttgttaataataatctcgtcgatgtaaacgtcgtaaggtttatcgtggaaaatatggacacgcggctgtaaatcacgtatcgaacaatggccgtctatgtatgtacggtctgatattatcgagatttaataattgcgggtatcactgttatgaaaccatactgatagatgtatttgatatactaagcaagtacatggatgatatagatatgatcgataactctactatattacgcggtcgatgtcaataatatacaatttgcaaagcggttattggaatatggagcgagtgtcacgctcgataatcaatacggccatccagaaaagcagttaccaaagagaaaacaaaacgaagctagttgatttattactgagttaccatcccactctagagactatgattgacgcatttaatagagatatacgctatctatatcctgaaccattattcgcctgtatcagatacgccttaatcctagatgatgattttccttctaaagtaaagtatgatatcgccggtcgtcataaggaactaaagcgctatagagtagacattaatagaatgaagaatgtctacatatcaggcgtctccatgtttgatatattatttaaacgaagcaaacgccacaaattgagatacgcaaagaatccgacatcaaatggtacaaaaaagaactaacgtccatcattacagaaactgtaaagaacaatgagaggatcgactccatagtggacaacattaatacagacgataacttgatttcgaaattacccatggagatactttattactccattaaataatttatcatggagcgataatgtcctgtttcatttgtttccatgacatattacaaaatcgattccgtccaagatgataaaaacatttaccggcatcataaacacggagtttattttatatgtctcgcataaacattactaaaaaaatatattgtcgataacttgatttcgaaattacccatggagatactttattactccattaaataatttatcatggagcgataatgtcctgtttcatttgtttccatgacatattacaaaatcgattccgtccaagatgataaaaacatttaccggcatcataaacacggagtttattttatatgtctcgcataaacattactaaaaaaatatattgttctgtttttctttcacatctttaattatgaaaaagtaaatcattatgagatggacgagattgtacgcatcgttcgcgacagtatgtggtacatacctaacgtatttatggacgacggtaagaatgaaggtcacgtttctgtcaacaatgtctgtcatatgtattttacgttctttgatgtggatacatcgtctcatctgtttaagctagttattaaacactgcgatctgaataaacgaggtaactctccattacattgctatacgatgaatacacgatttaatccatctgtattaaagatattgttacaccacggcatgcgtaactttgatagcaaggatgaccactatcaatcgataacaagatctttgatatactaacggacaccattgatgactttagtaaatcatccgatctattgctgtgttatcttagatataaattcaatgggagcttaaactattacgttctgtacaaaggatccgaccctaattgcgccgacgaggatgaactcacttctcttcattactactgtaaacacatatccacgttctacgaaagcaattattacaagttaagtcacactaagatgcgagccgagaagcgattcatctacgcgataatagattatggagcaaacattaacgcggttacacacttaccttcaacagtataccaaacatagtcctcgtgtggtgtatgctcttttatctcgaggagccgatacgaggatacgtaataatcttgattgtacacccatcatggaacgattgtgcaacaggtcatattctcataatgttactcaattggcacgaacaaaaggaagaaggacaacatctactttatctattcataaaacataatcaaggatacactctcaatatactacggtatctattagataggttcgacattcagaaagacgaatactataataccgcctttcaaaattgtaacaacaatgttgcctcatacatcggatacgacatcaaccttccgactaaagacggtattcgacttggtgtttgaaaacagaaacatcatatacaaggcggatgttgtgaatgacatcatccaccacagactgaaagtatctctacctatgattaaatcgttgttctacaagatgtctctccctacgacgattactacgtaaaaaagatactagcctactgcctattaagggacgagtcattcgcggaactacatagtaaattctgtttaaacgaggactataaaagtgtatttatgaaaaatatatcattcgataagatagattccatcatcgtgacataagtcgcctcaaagagattcgaatctccgacaccgacctgtatacggtatcacagctatcttaaagccatacattcagacagtcacatttcatttcccatgtacgacgatctcatagaacagtgccatctatcgatggagcgtaaaagtaaactcgtcgacaaagcactcaataaattagagtctaccatcggtcaatctagactatcgtatttgcctccggaaattatgcgcaatatcatctaaacagtatgttgtacggaaagaaccattacaaatattatccatgatagaaagaaaatatctatatgattggagaagtaggaaacaggaacaagacaacgattactacattattaaatcatgaagtccgtattatactcgtatatattgtttctctcatgtataataataaacggaagagatatagcaccgcatgcaccatccgatggaaagtgtaaagacaacgaatacaaacgccataatttgtgtccgggaacatacgcttccagattatgcgatagcaagactaacacacgatgtacgccgtgtggttcgggtaccttcacatctcgcaataatcatttacccgcttgtctaagttgtaacggaagacgcgatcgtgtaacacgactcacaatagaatctgtgaatgctctcccggatattattgtcttctcaaaggatcatccggatgcaaggcatgtgtttcccaaacaaaatgtggaataggatacggagtatccggagacgtcatctgttctccgtgtggtctcggaacatattctcacaccgtctcttccgcagataaatgcgaacccgtacccagaaatacgtttaactatatcgatgtggaaattaacctgtatccagttaacgacacgtcgtgtactcggacgaccactaccggtctcagcgaatccatctcaacgtcggaactaactattactatgaatcataaagactgtaatcccgtatttcgtgatggatacttctccgttcttaataaggtagcgacttcaggtttctttacaggagaaaggtgtgcactctgaatttcgagattaaatgcaataacaaagattcttcctccaaacagttaacgaaagcaaagaatgatactatcatgccgcattcggagacagtaactctagtgggcgacatctatatactatatagtaataccaatactcaagactacgaaactgatacaatctcttatcatgtgggtaatgttctcgatgtcgatagccatatgcccggtagttgcgatatacataaactgatcactaattccaaacccacccactttttatagtaagtttttcacccataaataataaatacaataattaatttctcgtaaaagtagaaaatatattctaatttattgcacggtaaggaagtagaatcataaagaacagtactcaatcaatagcaattatgaaacaatatatcgtcctggcatgcatgtgcctggcggcagctgctatgcctgccagtcttcagcaatcatcctcatcctcctcctcgtgtacggaagaagaaaacaaacatcatatgggaatcgatgttattatcaaagtcacaaagcaagaccaaacaccgaccaatgataagatttgccaatccgtaacggaaattacagagtccgagtcagatccagatcccgaggtggaatcagaagatgattccacatcagtcgaggatgtagatcctcctaccacttattactccatcatcggtggaggtctgagaatgaactttggattcaccaaatgtcctcagattaaatccatctcagaatccgctgatggaaacacagtgaatgctagattgtccagcgtgtccccaggacaaggtaaggactctcccgcgatcactcatgaagaagctcttgctatgatcaaagactgtgaagtgtctatcgacatcagatgtagcgaagaagagaaagacagcgacatcaagacccatccagtactcgggtctaacatctctcataagaaagtgagttacgaagatatcatcggttcaacgatcgtcgatacaaaatgcgtcaagaatctagagtttagcgttcgtatcggagacatgtgcaaggaatcatctgaacttgaggtcaaggatggattcaagtatgtcgacggatcggcatctgaaggtgcaaccgatgatacttcactcatcgattcaacaaaactcaaagcgtgtgtctgaatcgataactctattcatctgaaattggatgagtagggttaatcgaacgattcaggcacaccacgaattaaaaaagtgtaccggacactatattccggtttgcaaaacaaaaatgttcttaactacattcacaaaaagttacctctcgcgacttcttctttttctgtctcaatagtgtgatacgattatgacactattcctattcctattcctatttcctttcagagtatcacaaaaatattaaacctctttctgatggtctcataaaaaaagttttacaaaaatatttttattctctttctctctttgatggtctcataaaaaaagttttacaaaaatatttttattctctttctctctttgatggtctcataaaaaaagttttacaaaaatatttttattctctttctctctttgatggtctcataaaaaaagttttacaaaaatatttttattctctttctctctttgatggtctcataaaaaaagttttacaaaaatatttttattctctttctctctttgatggtctcataaaaaaagttttacaaaaatatttttattctctttctctctttgatggtctcataaaaaaagttttacaaaaatatttttattctctttctctctttgatggtctcataaaaaaagttttacaaaaatatttttattctctttctctctttgatggtctcataaaaaaagttttacaaaaatatttttattctctttctctctttgatggtctcataaaaaaagttttacaaaaatatttttattctctttctctctttgatggtctcataaaaaaagttttacaaaaatatttttattctctttctctctttgatggtctcataaaaaaagttttacaaaaatatttttattctctttctctctttgatggtctcataaaaaaagttttacaaaaatatttttattctctttctctctttgatggtctcataaaaaaagttttacaaaaatatttttatt

SEQ ID NO: 2 - DNA, 203057 bp, Artificial Sequence
  GLV-1h68
ttatgagaccatcaaagagagaaagagaataaaaatatttttgtaaaactttttttatgagaccatcaaagagagaaagagaataaaaatatttttgtaaaacttttttatgagaccatcaaagagagaaagagaataaaaatatttttgtaaaacttttttatgagaccatcaaagagagaaagagaataaaaatatttttgtaaaactttttttatgagaccatcaaagagagaaagagaataaaaatatttttgtaaaactttttttatgagaccatcaaagagagaaagagaataaaaatatttttgtaaaactttttttatgagaccatcaaagagagaaagagaataaaaatatttttgtaaaactttttttatgagaccatcaaagagagaaagagaataaaaatatttttgtaaaactttttttatgagaccatcaaagagagaaagagaataaaaatatttttgtaaaactttttttatgagaccatcaaagagagaaagagaataaaaatatttttgtaaaactttttttatgagaccatcaaagagagaaagagaataaaaatatttttgtaaaactttttttatgagaccatcaaagagagaaagagaataaaaatatttttgtaaaactttttttatgagaccatcaaagagagaaagagaataaaaatatttttgtaaaactttttttatgagaccatcaaagagagaaagagaataaaaatatttttgtaaaactttttttatgagaccatcaaagagagaaagagaataaaaatatttttgtaaaactttttttatgagaccatcagaaagaggtttaatatttttgtgatactctgaaaggaaataggaataggaataggaatagtgtcataatcgtatcacactattgagacagaaaaagaagaagtcgcgagaggtaactttttgtgaatgtagttaagaacatttttgttttgcaaaccggaatatagtgtccggtacacttttttaattcgtggtgtgcctgaatcgttcgattaaccctactcatccaatttcagatgaatagagttatcgattcagacacacgctttgagttttgttgaatcgatgagtgaagtatcatcggttgcaccttcagatgccgatccgtcgacatacttgaatccatccttgacctcaagttcagatgattccttgcacatgtctccgatacgaacgctaaactctagattcttgacgcattttgtatcgacgatcgttgaaccgatgatatcttcgtaactcactttcttatgagagatgttagacccgagtactggatgggtcttgatgtcgctgtctttctcttcttcgctacatctgatgtcgatagacacttcacagtctttgatcatagcaagagcttcttcatgagtgatcgcgggagagtccttaccttgtcctggggacacgctggacaatctagcattcactgtgtttccatcagcggattctgagatggatttaatctgaggacatttggtgaatccaaagttcattctcagacctccaccgatgatggagtaataagtggtaggaggatctacatcctcgactgatgtggaatcatcttctgattccacctcgggatctggatctgactcggactctgtaatttccgttacggattggcaaatcttatcattggtcggtgtttggtcttgctttgtgactttgataataacatcgattcccatatgatgtttgttttcttcttccgtacacgaggaggaggatgaggatgattgctgaagactggcaggcatagcagctgccgccaggcacatgcatgccaggacgatatattgtttcataattgctattgattgagtactgttctttatgattctacttccttaccgtgcaataaattagaatatattttctacttttacgagaaattaattattgtatttattatttatgggtgaaaaacttactataaaaagtgggtgggtttggaattagtgatcagtttatgtatatcgcaactaccgggcatatggctatcgacatcgagaacattacccacatgataagagattgtatcagtttcgtagtcttgagtattggtattactatatagtatatagatgtcgcccactagagttactgtctccgaatgcggcatgatagtatcattctttgctttcgttaactgtttggaggaagaatctttgttattgcatttaatctcgaaattcagagtgcacacctttctcctgtaaagaaacctgaagtcgctaccttattaagaacggagaagtatccatcacgaaatacgggattacagtctttatgattcatagtaatagttagttccgacgttgagatggattcgctgagaccggtagtggtcgtccgagtacacgacgtgtcgttaactggatacaggttaatttccacatcgatatagttaaacgtatttctgggtacgggttcgcatttatctgcggaagagacggtgtgagaatatgttccgagaccacacggagaacagatgacgtctccggatactccgtatcctattccacattttgtttgggaaacacatgccttgcatccggatgatcctttgagaagacaataatatccgggagagcattcacagattctattgtgagtcgtgttacacgatcgcgtcttccgttacaacttagacaagcgggtaaatgattattgcgagatgtgaaggtacccgaaccacacggcgtacatcgtgtgttagtcttgctatcgcataatctggaagcgtatgttcccggacacaaattatggcgtttgtattcgttgtctttacactttccatcggatggtgcatgcggtgctatatctcttccgtttattattatacatgagagaaacaatatatacgagtataatacggacttcatgatttaataatgtagtaatcgttgtcttgttcctgtttcctacttctccaatcatatagatattttctttctatcatggataatatttgtaatggttctttccgtacaacatactgtttagatgatattgcgcataatttccggaggcaaatacgatagtctagattgaccgatggtagactctaatttattgagtgctttgtcgacgagtttacttttacgctccatcgatagatggcactgttctatgagatcgtcgtacatgggaaatgaaatgtgactgtctgaatgtatggctttaagatagctgtgataccgtatacaggtcggtgtcggagattcgaatctctttgaggcgacttatgtcacgatgatggaatctatcttatcgaatgatatatttttcataaatacacttttatagtcctcgtttaaacagaatttactatgtagttccgcgaatgactcgtcccttaataggcagtaggctagtatcttttttacgtagtaatcgtcgtagggagagacatcttgtagaacaacgatttcgttttgttttctcttctgtaactgcttttctggatggccgtattgattatcgagcgtgatactcgctccatattccaataaccgctttgcaaattgtatattattgacatcgaccgcgtaatatagtagagttatcgatcatatctatatcatccatgtacttgcttagtatatcaaatacatctatcagtatggtttcataacagtgatacccgcaattattaaatctcgataatatcagaccgtacatacatagacggccattgttcgatacgtgatttacagccgcgtgtccatattttccacgataaaccttacgacgtttacatcgacgagattattattaacaaagtagtcgtgtagaggatagttgttgtccgttatctaacatgcatcgaacgaccatatcgccgtaatgtaagtagtttatcagtatggcttgtacgatggattcatcctgttgtctaaatctctttagaatgttatcgatgatgtagtggttatattctctggaatcgtacgaagtaatactacgcattacgtcgacaagagtatgacgtctctcaataagaagattaacgatttccatgtctacattatatggggttactctaaatcgcttgtttagataatacgcctctaatatagggctgacgtcgtatactctacacgtgtccacatcctttattaataataatttaacaatctctatatctatggttgagaaagaccagtagtattggatgggtaaagatcctccttcgtctctgccatggatggaaacattgttatcgatcaaacatttaattacatccttggatagagattgagattctctatgagacgatatatagtaatgaagagagttcttacacatatcactgtcgtacatacaggtacgaaatacgtaaccggtgctgtaacattctgatttaagaagccatagcaatacttctggtctcggattaggcgtcgttacgtatatatccaccaatccgagaccattgattgcataattcgtattcttggacggacgtatccgtttatccacaattaggtattttagcagacgtaagtcgatattatccgaatacagatcgaaatcatttatattcgacttgagttcgttagaggaatttgaatagctggatatcagtagatgcacaatctgagattttacgtatctatgcttactgtatactcctagcggagttaatccttcgttgtttctacaaagtctctcgactccgcgagagaacaatcttaatgtctgtatcgcatttattggagacgtaacaatgtagcgcattgtttcctcgtctatctatatgttttgataagttgtgacacgtttcaatttctagttttatttttttgtacgtcacatcttcatccagtagacgacatagaatagtgcactctctaccacaataatccatagctattctggtgctaattattcctatttcacgaaggcaatcattcctcataagatgataaaaagtgtagtggagatttagtatttagcagtgcggatatgatccaagagggtgagatagtcgttctcgttcagaatctttcgcagcataagtagtatgtcgatatacttatcgttgaagactctttataaaagtctatttgtttatatttattgcggatagcagtatttccctataaaaagtatacgtcctgtggtgtctttaatcatgtacatgaatggatggtttatgtagaccttcgtacgatataccatcgaaaagttaatcgtaaatactcctgtaacggccgatgcttctgtatactcctcattaacatctataaacgtcgtatgtagaaatttttctacagtgatagtttcattacacatcttgctaaaatctgcataatatccgaatatattagtaagtcctaaattttctaaaatcggtaccagattatacggttctgtcatttccactttaaactttggcatatacaagtctatacttttagtagataacataccacaccattttttaaatttttcatctgttatatttttttctatgttatatataccttctatgtcgtccggtagtataattaccatactagagtttccctcgtatggaatatcgataatagagaatcctccgaataattcattaatatgtacatattgcaagttattctcggtacccaccatcatatcaacgctggtaactatattcttagaaatataaaacttgtctgtatatgtaagatgtttagaaaatggatatttccacattgctttaaaatggacggcgctaacaactgtcatacgagtattaatggatagcggactagtcaataaggaattaattttaccatttgtcattgtcttaacccattcgttgattagttcctttgtttggttagcattattaaagtttacagtttgaaaatcgtcttttattttttgtaggaaggaggcgtggaactcgatactatcgctaccgtatattttatttgcggtagctagtgtcgcacaatacggaatatctacctccatgtcatcattattgtcatcgggtgtattctcattcatattctctatatattttgatagttgttcagctgtagaaccagctgctccatgatttagaatagataaagtagataaaatggaaactggagaaatcaaaacattttcatcagggtgttttaagattagttctttaaagatatccatggtatagacctaacgataacgatatatatcataaataaataatgttaaatttcaatttatgtttgtaccccgtattcatacttaacaaattggtattgcgtacacaatcaatcatattacataccattaataatgcaagcataaaaaattgttagtagatgtttctaaatataggttccgtaagcaaagaatataagaatgaagcggtaatgataaaatcaatcgttatctaaaatgatcatactcatttattttattctattatattaacacatacatttttaacagcaacacattcaatattgtattgttatttttatattatttacacaattaacaatatattattagtttatattactgaattaataatataaaattcccaatcttgtcataaacacacactgagaaacagcataaacacagaatccatcaaaaatgttgataaattatctgatgttgttgttcgctgctatgataatcagatcattcgccgatagtggtaacgctatcgaaacgacattgccagaaattacaaacgctacaacagatattccagctatcagattatgcggtccagagggagatggatattgtttacacggtgactgtatccacgctagagatattgacggtatgtattgtagatgctctcatggttatacaggcattagatgtcagcatgtagtattagtagactatcaacgttcagaaaacccaaacactacaacgtcatatatcccatctcccggtattatgcttgtattagtaggcattattatgtgttgtctattatctgtttataggttcactcgacgaactaaactacctatacaagatatggttgtgccataatttttataaatttttttatgagtatttttacaaaaatgtataaagtgtatgtcttatgtatatttataaaaatgctaagtatgcgatgtatctatgttatttgtatttatctaaacaatacctctacctctagatattatacaaaaattttttatttcggcatattaaagtaaaatctagttaccttgaaaatgaatacagtgggtggttccgtatcaccagtaagaacataatagtcaaatacagtatccgattgagattttgcatacaatactagtctagaaagaaatttgtaatcatcttctgtgacgggagtccatatatctgtatcatcgtctagtttatcagtgtcccatgctatattcctgttatcatcattagttaatgaaaataactctcgtgcttcagaaaagtcaaatattgtatccatacatacatctccaaaactatcgcttatacgtttatctttaacgatacctatacctagatggttatttactaacagacattttccagatctattgactataactcctatagtttccacatcaaccaagtaatgatcatctattgttatataacaataacataactcttttccatttttatcagtatgtatatctatatcaacgtcgtcgttgtagtgaatagtagtcattgatctattatatgaaacggatatgtctagaacggcaattgttttacgtccagttaacactttcgttgatttaaagtctagagtctttgcaaacataatatccttatccgactttatatttcctgtagggtggtataattttattttgcctccacatatcggtgtttccaaatatattactagacaatattccatatagttattagttaagggtacccaattagaacacgtacgcttattatcatcatttggatcgtatttcataaaagttattgtgttatcgatgtcaacacattctacattttttaatcgtctatatagtatttttctgatattttctataatatcagaattgtcttccatcggaagttgtatactatcggaatcagttacatgtttaaataattctctgatgtcattccttatacaatcaaattcattattaaacagtttaatagtctgtagacctttatcgtcgtaaatatccattgtcttattagttacgcttatttttatgtgtttttacgttgctttattatattttataagaatgattgtttgacgaatcacgagaactattaagacacattattaggtatatattataaaaaagtttttgattacgatgttataagaggaaagaggacacattaacatcatacatcaattaactacattcttataacatcgtaatcaaaagaattgcaattttgatgtataacaactgtcaatgggttatggaattgtatattacatattatacggtatgttggtaacgacaaataccggtcggtaattgtctgccggtgtaatagaattatatatatctatctattacaccggccttgtatacataataataagttgtggtagtatgatctccatatttataatttaggactttgtattcagtatttttggaatcataaaaaataaaaaaaagttttactaatttaaaatttaaaaagtatttacatttttttcactgtttagtcgcggatatggaattcgatcctgccaaaatcaatacatcatctatagatcatgtaacaatattacaatacatagatgaaccaaatgatataagactaacagtatgcattatccgaaatattatatcaatatcacaaaaataaatacacatttggctaatcaatttcgggcttggaaaaaacgtatcgccggaagggactatatgactaacttatctagagatacaggaatacaacaatcaaaacttactgaaactatacgtaactgtcaaaaaaatagaaacatatatggtctatatatacactacaatttagttattaattggataaccgatgtgattatcaatcaatattaagagggttggtaaattggtacatagctaataatacctatactccaaatacacccaataatacaacaaccatttctgagttggatatcatcaaaatactaaataaatacgaggacgtgtatagagtaagtaaagaaaaagaatgtggaatttgctatgaagttgtttactcaaaacgatagatactttggtttattggattcgtgtactcatatattttgcataacatgcatcaatatatggcatagaacacgaagagaaaccggtgcgtcggataattgtcctatatgccgtacccgttttagaaacataacaatgagcaagttctataagctagttaactaataaataaaaagtttaatttgttgacgacgtatgtcgttattttttctcgtataaaagattaatttgattctaatataatctttagtattggataaatatcaattcaaattaattccattagattatatcataaataaaaatagtagcacacaactacttcagcaaacattctttttataaatgccatctagcgtagcgaggacacaagtgaacctataattatcaaatttattagtatcagtcacatgaaggactttacgtagagtgacgattccactatctgtggtacgaacggtttcatcttctttgatgccatcacccagatgttctataaacttggtatcctcgtccgatttcatatcctttgccaaccaatacatatagctaaactcaggcatatgttccacacatcctgaacaatgaaattctccagaagatgttacaatgtctagatttggacatttggtttcaaccgcgttaacatatgagtgaacacacccatacatgaaagcgatgagaaataggattctcatcttgccaaaatatcactagaaaaaatttatttatcagttttaaaggtataaaaaatacttattgttgctcgaatattttgtatttgatggtatacggaagattagaaatgtaggtattatcatcaactgattctatggttttatgtattctatcatgtttcactattgcgttggaaataatatcatatgcttccacatatattttattttgttttaactcataatactcacgtaattctggattattggcatatctatgaataattttagctccatgatcagtaaatattaatgagaacatagtattaccacctaccattatttttttcatctcattcaattcttaattgcaaagatctatataatcattatagcgttgacttatggactctggaatcttagacgatgtacagtcatctataatcatggcatatttaatacattgttttatagcatagtcgttatctacgatgttagatatttctctcaatgaatcaatcacacaatctaatgtaggtttatgacataatagcattttcagcagttcaatgtttttagattcgttgatggcaatggctatacatgtatatccgttatttgatctaatgttgacatctgaaccggattctagcagtaaagatactagagattgtttattatatctaacagccttgtgaagaagtgtttctcctcgtttgtcaatcatgttaatgtctttaagataaggtaggcaaatgtttatagtactaagaattgggcaagcataagacatgtcacaaagacccttttttgtatgtataagtgtaaaaattataacatccatagttggatttacataggtgtccaatcgggatctctccatcatcgagataattgatggcatctcccttccttttttagtagatatttcatcgtgtaagaatcaatattaatatttctaaagtatccgtgtatagcctctttatttaccacagctccatattccactagagggatatcgccgaatgtcatatactcaattagtatatgttggaggacatccgagttcattgttttcaatatcaaagagatggtttccttatcatttctccatagtggtacaatactacacattattccgtgcggctttccattttccaaaaacaatttgaccaaatctaaatctacatctttattgtatctataatcactatttagataatcagccataattcctcgagtgcaacatgttagatcgtctatatatgaataagcagtgttatctattcctttcattaacaatttaacgatgtctatatctatatgagatgacttaatataatattgaagagctgtacaatagtttttatctataaaagacggcttgattccgtgattaattagacatttaacaacttccggacgcacatatgctctcgtatccgactctgaatacagatgagagatgatatacagatgcaatacggtaccgcaatttcgtagttgataatcatcatacgcgtatcagtactcgtcctcataaagaacactgcagccattttctatgaacaaatcaataattttagaaacaggatcattgtcattacataattttctataactgaacgatggttttcacatttaacactcaagtcaaatccatgttctaccaacacctttatcaagtcaacgtctacatttttggatttcatatagctgaatatattaaagttatttatgttgctaaatccagtggcttctagtagagccatcgctatatccttattaactttaacatgtctactatttgtgtattcttctaatggggtaagctgtctccaatttttgcgtaatggattagtgccactgtctagtagtagtttgacgacctcgacattattacaatgctcattaaaaaggtatgcgtgtaaagcattattcttgaattggttcctggtatcattaggatctctgtctttcaacatctgtttaagttcatcaagagccacctcctcattttccaaatagtcaaacattttgactgaatgagctactgtgaactctatacacccacacaactaatgtcattaaatatcatgtcaaaaacttgtacaattattaataaaaataatttagtgtttaaattttaccagttccagattttacacctccgttaatacctccattaaccccactggacgatcctcctccccacattccaccgccaccagatgtataagttttagatcctttattactaccatcatgtccatggataaagacactccacatgccgccactaccccctttagaagacatattaataagacttaaggacaagtttaacaataaaattaatcacgagtaccctactaccaacctacactattatatgattatagtttctatttttacagtaccttgactaaagtttctagtcacaagagcaatactaccaacctacactattatatgattatagtttctatttttataggaacgcgtacgagaaaatcaaatgtctaatttctaacggtagtgttgataaacgattgttatccgcggatacctcctctatcatgtcgtctattttcttactttgttctattaacttattagcattatatattatttgattataaaacttatattgcttattagcccaatctgtaaatatcggattattaacatatcgtttctttgtaggtttatttaacatgtacatcactgtaagcatgtccttaccatttattttaatttgacgcatatccgcaatttctttttcgcagtcggttataaattctatatatgatggatacatgctacatgtgtacttataatcgactaatatgaagtacttgatacatattttcagtaacgatttattattaccacctatgaataagtacctgtgatcgtctaggtaatcaactgttttcttaatacattcgatggttggtaatttactcagaataatttccaatatcttaatatataattctgctatttctgggatatatttatctgccagtataacacaaatagtaatacatgtaaacccatattttgttattatattaatgtctgcgccattatctattaaccattctactaggctgacactatgcgactcaatacaatgataaagtatactacatccatgtttatctattttgtttatatcatcaatatacggcttacaaagttttagtatcgataacacatccaactcacgcatagagaaggtagggaataatggcataatatttattaggttatcatcattgtcattatctacaactaagtttccattttttaaaatatactcgacaactttaggatctctattgccaaatttttgaaaatatttatttatatgcttaaatctatataatgtagctccttcatcaatcatacatttaataacattgatgtatactgtatgataagatacatattctaacaatagatcttgtatagaatctgtatatcttttaagaattgtggatattaggatattattacataaactattacacaattctaaaatataaaacgtatcacggtcgaataatagttgatcaactatataattatcgattttgtgatttttcttcctaaactgtttacgtaaatagttagatagaatattcattagttcatgaccactatagttactatcgaataacgcgtcaaatatttcccgtttaatatcgcatttgtcaagataataatagagtgtggtatgttcacgataagtataataacgcatctctttttcgtgtgaaattaaatagtttattacgtccaaagatgtagcataaccatcttgtgacctagtaataatataataatagagaactgttttacccattctatcatcataatcagtggtgtagtcgtaatcgtaatcgtctaattcatcatcccaattataatattcaccagcacgtctaatctgttctattttgatcttgtatccatactgtatgttgctacatgtaggtattcctttatccaataatagtttaaacacatctacattgggatttgatgttgtagcgtatttttctacaatattaataccatttttgatactatttatttctatacctttcgaaattagtaatttcaataagtctatattgatgttatcagaacatagatattcgaatatatcaaaatcattgatatttttatagtcgactgacgacaataacaaaatcacaacatcgtttttgatattattatttttcttggtaacgtatgcctttaatggagtttcaccatcatactcatataatggatttgcaccactttctatcaatgattgtgcactgctggcatcgatgttaaatgttttacaactatcatagagtatcttatcgttaaccatgattggttgttgatgctatcgcattttttggtttctttcatttcagttatgtatggatttagcacgtttgggaagcatgagctcatatgatttcagtactgtagtgtcagtactattagtttcaataagatcaatctctagatctatagaatcaaaacacgataggtcagaagataatgaatatctgtaggcttcttgttgtactgtaacttctggttttgttagatggttgcatcgtgctttaacgtcaatggtacaaattttatcctcgctttgtgtatcatattcgtccctactataaaattgtatattcagattatcatgcgatgtgtatacgctaacggtatcaataaacggagcacaccatttagtcataaccgtaatccaaaaatttttaaagtatatcttaacgaaagaagttgtgtcattgtctacggtgtatggtactagatcctcataagtgtatatatctagagtaatgtttaatttattaaatggttgataatatggatcctcgtgacaatttccgaagatggaaataagacataaacacgcaataaatctaattgcggacatggttactccttaaaaaaatacgaataatcaccttggctatttagtaagtgtcatttaacactatactcatattaatccatggactcataatctctatacgggattaacggatgttctatatacggggatgagtagttctcttctttaactttatactttttactaatcatatttagactgatgtatgggtaatagtgtttgaagagctcgttctcatcatcagaataaatcaatatctctgtttttttgttatacagatgtattacagcctcatatattacgtaatagaacgtgtcatctaccttattaactttcaccgcatagttgtttgcaaatacggttaatcctttgacctcgtcgatttccgaccaatctgggcgtataatgaatctaaactttaattgcttgtaatcattcgaaataatttttagtttgcatccgtagttatcccctttatgtaactgtaaatttctcaacgcgatatctccattaataatgatgtcgaattcgtgctgtatacccatactgaatggatgaacgaataccgacggcgttaatagtaatttactttttcatctttacatattgggtactagttttactatcataagtttataaattccacaagctactatggaataagccaaccatcttagtataccacacatgtcttaaagtttattaattaattacatgttgttttatatatatcgctacgaatttaaagagaaattagtttaggaagaaaaattatctatctacatcatcacgtctctgtattctacgatagagtgctactttaagatgcgacagatccgtgtcatcaaatatatactccattaaaatgattattccggcagcgaacttgatattggatatatcacaacctttgttaatatctacgacaatagacagcagtcccatggttccataaacagtgagtttatctttctttgaagagatattttgtagagatcttataaaactgtcgaatgacatcgcatttatatctttagctaaatcgtatatgttaccatcgtaatatctaaccgcgtctatcttaaacgtttccatcgctttaaagacgtttccgatagatggtctcatttcatcagtcatactgagccaacaaatataatcgtgtataacatctttgatagaatcagactctaaagaaaacgaatcggctttattatacgcattcatgataaacttaatgaaaaatgtttttcgttgtttaagttggatgaatagtatgtcttaataattgttattatttcattaattaatatttagtaacgagtacactctataaaaacgagaatgacataactaatcataactagttatcaaagtgtctaggacgcgtaattttcatatggtatagatcctgtaagcattgtctgtattctggagctattttctctatcgcattagtgagttcagaatatgttataaatttaaatcgaataacgaacataactttagtaaagtcgtctatattaactcttttattttctagccatcgtaataccatgtttaagatagtatattctctagttactacgatctcatcgttgtctagaatatcacatactgaatctacatccaattttagaaattggtctgtgttacatatctcttctatattattgttgatgtattgtcgtagaaaactattacgtagaccattttctttataaaacgaatatatagtactccaattatctttaccgatatatttgcacacataatccattctctcaatcactacatctttaagattttcgttgttaagatatttggctaaactatataattctattagatcatcaacagaatcagtatatatttttctagatccaaagacgaactctttggcgtcctctataatattcccagaaaagatattttcgtgttttagtttatcgagatctgatctgttcatatacgccatgattgtacggtacgttatgataaccgcataaaataaaaatccattttcatttttaaccaatactattcataattgagattgatgtaatactttgttactttgaacgtaaagacagtacacggatccgtatctccaacaagcacgtagtaatcaaatttggtgttgttaaacttcgcaatattcatcaatttagatagaaacttatactcatcatctgttttaggaatccatgtattattaccactttccaacttatcattatcccaggctatgtttcgtccatcatcgttgcgcagagtgaataattcttttgtattcggtagttcaaatatatgatccatgcatagatcggcaaagctattgtagatgtgatttttcctaaatctaatataaaactcgtttactagcaaacactttcctgatttatcgaccaagacacatatggtttctaaatctatcaagtggtggggatccatagttatgacgcagtaacatatattattacattcttgactgtcgctaatatctaaatatttattgttatcgtattggattctgcatatagatggcttgtatgtcaaagatatagaacacataaccaatttatagtcgcgctttacattctcgaatctaaagttaagagatttagaaaacattatatcctcggatgatgttatcactgtttctggagtaggatatattaaagtctttacagatttcgtccgattcaaataaatcactaaataatatcccacattatcatctgttagagtagtatcattaaatctattatattttatgaaagatatatcactgctcacctctatatttcgtacatttttaaactgtttgtataatatctctctgatacaatcagatatatctattgtgtcggtagacgataccgttacatttgaattaatggtgttccattttacaacttttaacaagttgaccaattcatttctaatagtatcaaactctccatgattaaatattttaatagtatccattttatatcactacggacacaaagtagctgacataaaccattgtataatttttatgttttatgtttattagcgtacacattttggaagttccggcttccatgtatttcctggagagcaagtagatgatgaggaaccagatagtttatatccgtacttgcacttaaagtctacattgtcgttgtatgagtatgatcttttaaacccgctagacaagtatccgtttgatattgtaggatgtggacatttaacaatctgacacgtgggtggatcggaccattctcctcctgaacacaggacactagagttaccaatcaacgaatatccactattgcaactataagttacaacgctcccatcggtataaaaatcctcgtatccgttatgtcttccgttggatatagatggaggggattggcatttaacagattcacaaataggtgcctcgggattccataccatagatccagtagatcctaattcacaatacgatttagattcaccgatcaactgatatccgctattacaagagtacgttatactagagccaaagtctactccaccaatatcaagttggccattatcgatatctcgaggcgatgggcatctccgtttaatacattgattaaagagtgtccatccagtacctgtacatttagcatatataggtcccattttttgctttctgtatccaggtagacatagatattctatagtgtctcctatgttgtaattagcattagcatcagtctccacactattcttaaatttcatattaatgggtcgtgacggaatagtacagcatgatagaacgcatcctattcccaacaatgtcaggaacgtcacgctctccaccttcatatttatttatccgtaaaaatgttatcctggacatcgtacaaataataaaaagcccatatatgttcgctattgtagaaattgtttttcacagttgctcaaaaacgatggcagtgacttatgagttacgttacactttggagtctcatctttagtaaacatatcataatattcgatattacgagttgacatatcgaacaaattccaagtatttgattttggataatattcgtattttgcatctgctataattaagatataatcaccgcaagaacacacgaacatctttcctacatggttaaagtacatgtacaattctatccatttgtcttccttaactatatatttgtatagataattacgagtctcgtgagtaattccagtaattacatagatgtcgccgtcgtactctacagcataaactatactatgatgtctaggcatgggagacttttttatccaacgatttttagtgaaacattccacatcgtttaatactacatatttctcatacgtggtataaactccacccattacatatatatcatcgtttacgaataccgacgcgcctgaatatctaggagtaattaagtttggaagtcttatccatttcgaagtgccgtgtttcaaatattctgccacacccgttgaaatagaaaattctaatcctcctattacatataactttccatcgttaacacaagtactaacttctgattttaacgacgacatattagtaaccgttttccattttttcgttttaagatctacccgcgatacggaataaacatgtctattgttaatcatgccgccaataatgtatagacaattatgtaaaacatttgcattatagaattgtctatctgtattaccgactatcgtccaatattctgttctaggagagtaatgggttattgtggatatataatcagagtttttaatgactactatattatgttttataccatttcgtgtcactggctttgtagatttggatatagttaatcccaacaatgatatagcattgcgcatagtattagtcataaacttgggatgtaaaatgttgatgatatctacatcgtttggatttttatgtatccactttaataatatcatagctgtaacatcctcatgatttacgttaacgtcttcgtgggataagatagttgtcagttcatcctttgataattttccaaattctggatcggatgtcaccgcagtaatattgttgattatttctgacatcgacgcattatatagttttttaattccatatcttttagaaaagttaaacatccttatacaatttgtgaaattaatattatgaatcatagtttttacacatagatctactacaggcggaacatcaattattatggcagcaactagtatcatttctacattgtttatggtgatgtttatcttcttccagcgcatatagtctaatagcgattcaaacgcgtgatagtttataccattcaatataatcgcttcatcctttagatggtgatcctgaatgcgtttaaaaaaattatacggagacgccgtaataatttccttattcacttgtataatttccccattgatagaaaatattacgctttccattcttaaagtactataagtaattatagtataatgtaaacgtttatatattcaatatttttataaaaatcattttgacattaattcctttttaaatttccgtctatcatctatagaaacgtattctatgaatttataaaatgcttttacgtgtcctatcgtaggcgatagaaccgctaaaaagcctatcgaatttctacaaaagaatctgttatatggtatagggagagtataaaacattaaatgtccgtacttattaaagtattcagtagccaatcctaactctttcgaatacttattaatggctcttgttctgtacgaatctatttttttgaacaacggacctagtggtatatcttgttctatgtatctaaaataatgtctgactagatccgttagtttaatatccgcagtcatcttgtctagaatggcaaatctaactgcgggtttaggctttagtttagtttctatatctacatctatgtctttatctaacaccaaaaatataatagctaatattttattacaatcatccggatattcttctacgatctcactaactaatgtttctttggttatactagtatagtcactatcggacaaataaagaaaatcagatgatcgatgaataatacatttaaattcatcatctgtaagatttttgagatgtctcattagaatattattagggttagtactcattatcattcggcagctattacttattttattatttttcaccatatagatcaatcattagatcatcaaaatatgtttcaatcatcctaaagagtatggtgaatgactcttcccatctaatttctgaacgttcaccaatgtctctagccactttggcactaatagcgatcattcgcttagcgtcttctatattattaactggttgatttaatctatctagcaatggaccgtcggacagcgtcattctcatgttcttaatcaatgtacatacatcgccgtcatctaccaattcatccaacaacataagctttttaaaatcatcattataataggtttgatcgttgtcatttctccaaagaatatatctaataagtagagtcctcatgcttagttaacaactattttttatgttaaatcaattagtacaccgctatgtttaatacttattcatattttagtttttaggattgagaatcaatacaaaaattaatgcatcattaattttagaaatacttagtttccacgtagtcaatgaaacatttgaactcatcgtacaggacgttctcgtacaggacgtaactataaaccggtttatatttgttcaagatagatacaaatccgataactttttttacgaattctacgggatccactttaaaagtgtcataccgggttctttttatttttttaaacagatcaatggtgtgatgttgattaggtcttttacgaatttgatatagaatagcgtttacatattctccataatggtcaatcgccatttgttcgtatgtcataaattctttaattatatgacactgtgtattatttagttcatccttgttcattgttaggaatctatccaaaatggcaattatactagaactataggtgcgttgtatacacatattgatgtgtctgtttatacaatccatgatatttggatccatgctactaccttcgggtaaaattgtagcatcatataccatttctagtactttaggttcattattatccattgcagaggacgtcatgatcgaatcataaaaaaatatattatttttatgttattttgttaaaaataatcatcgaatacttcgtaagatactccttcatgaacataatcagttacaaaacgtttatatgaagtaaagtatctacgatttttacaaaagtccggatgcataagtacaaagtacgcgataaacggaataataatagatttatctagtctatctttttctatagctttcatagttagatacatggtctcagaagtaggattatgtaacatcagcttcgataaaatgactgggttatttagtcttacacattcgctcatacatgtatgaccgttaactacagagtctacactaaaatgattgaacaatagatagtctaccattgtttcgtattcagatagtacagcgtagtacatggcatcttcacaaattatatcattgtctaatagatatttgacgcatcttatggatcccacttcaacagccatcttaaaatcatattgctttcctttatcattaataatttctagaacatcatctctatcataaaagatacaaatattaactgtttgatccgtaataacattgctagtcaatagcaatttgttaataagatgcgctgggctcaatgtcttaataagaagtgtaagaggactatctccgaatttgttttgtttattaacatccgttgatggaagtaaaagatctataatgtctacattcttgactgttttagagcatacaatatggagaggtgtatttccatcatgatctggttttgagggactaattcctagtttcatcatccatgagattgtagaagcttttggattgtctgacataagatgtctatgaatatgatttttgccaaatttatccactatcctggcttcgaatccgatggacattatttttttaaacactctttctgaaggatctgtacacgccaacaacggaccacatccttcttcatcaaccgagttgttaatcttggctccatactgtaccaataaatttattctctctatgacttcatcatctgttcccgagagataatatagaggtgttttatgctgtttatcacacgcgtttggatctgcgccgtgcgtcagcagcatcgcgactattctattattattaattttagaagctatatgcaatggataatttccatcatcatccgtctcatttggagagtatcctctatgaagaagttcttcgacaaatcgttcatctagtcctttaattccacaatacgcatgtagaatgtgataattatttccagaaggttcgatagcttgtagcatattcctaaatacatctaaatttttactattatatttggcataaagagatagataatactcggccgacataatgttgtccattgtagtataaaaattaatatttctatttctatttctgtatatttgcaacaatttactctctataacaaatatcataacttagtttttttatgtcaagaaggcactggtttagttcatctataaatgtcacgccataactaccacgcatgccatactcagaattatgataaagatatttatccttggggtgtaggtaatggggattaatctttgttggatcagtctctaagttaacacatgtcacacatgatccatttatagttatatcacacgatgatgatttatgaattgattccggaagatcgctatcgtattttgtggttccacaattcatttccatacatgttattgtcacactaatattatgatgaactttatctagccgctgagtggtaaacaacagaacagatagtttattatctttaccaacaccctcagccgctgccacaaatctctgatccgtatccatgatggtcatgtttatttctagtccgtatccagtcaacactatgttagcatttctgtcgatatagctttcactcatatgacactcaccaataatagtagaattaatgtcgtaatttacaccaatagtgagttcggcggcaaagtaccaataccggtaatcttgtcgaggaggacatatagtattcttgtattctaccgaatacccgagagatgcgatacaaaagagcaagactaatttgtaaaccatcttactcaaaatatgtaacaatagtacgatgcaatgagtaagacaataggaaatctatcttatatacacataattattctatcaattttaccaattagttagtgtaatgttaacaaaaatgtgggagaatctaattagtttttctttacacaattgacgtacatgagtctgagttccttgtttttgctaattatttcatccaatttattattcttgacgatatcgagatcttttgtataggagtcaaacttgtattcaacatgcttttctataatcattttagctatttcggcatcatccaatagtacattttccagattagcagaatagatattaatgtcgtatttgaacagagcctgtaacatctcaatgtctttattatctatagccaatttaatgtccggaatgaagagaagggaattattggtgtttgtcgacgtcatatagtcgagcaagagaatcatcatatccacgtgtccattttttatagtgatgtgaatacaactaaggagaatagccagatcaaaagtagatggtatctctgaaagaaagtaggaaacaatacttacatcattaagcatgacggcatgataaaatgaagttttccatccagttttcccatagaacatcagtctccaatttttcttaacaaacagttttaccgtttgcatgttaccactatcaaccgcataatacaatgcggtgtttcccttgtcatcaaattgtgaatcatccagtccactgaatagcaaaatctttactattttggtatcttccaatgtggctgcctgatgtaatggaaattcattctctagaagatttttcaatgctccagcgttcaacaacgtacatactagacgcacgttattatcagctattgcataatacaaggcactatgtccatggacatccgccttaaatgtatctttactagagagaaagcttttcagctgcttagacttccaagtattaattcgtgacagatccatgtctgaaacgagacgctaattagtgtatattttttcattttttataattttgtcatattgcaccagaattaataatatctttaatagatctgattagtagatacatggctatcgcaaaacaacatatacacatttaataaaaataatatttattaagaaaattcagatttcacgtacccatcaatataaataaaataatgattccttacaccgtacccatattaaggagattccaccttacccataaacaatataaatccagtaatatcatgtctgatgatgaacacaaatggtgtattaaattccagtttttcaggagatgatctcgccgtagctaccataatagtagatgcctctgctacagttccttgttcgtcgacatctatctttgcattctgaaacattttataaatatataatgggtccctagtcatatgtttaaacgacgcattatctggattaaacatactaggagccatcatttcggctatcgacttaatatccctcttattttcgatagaaaatttagggagtttaagattgtacactttattccctaattgagacgaccaatagtctaattttgcagccgtgatagaatctgtgaaatgggtcatattatcacctattgccaggtacatactaatattagcatccttatacggaaggcgtaccatgtcatattctttgtcatcgattgtgattgtatttccttgcaatttagtaactacgttcatcatgggaaccgttttcgtaccgtacttattagtaaaactagcattgcgtgttttagtgatatcaaacggatattgccatatacctttaaaatatatagtattaatgattgcccatagagtattattgtcgagcatattagaatctactacattagacataccggatctacgttctactatagaattaattttattaaccgcatctcgtctaaagtttaatctatataggccgaatctatgatattgttgataatacgacggtttaatgcacacagtattatctacgaaactttgataagttagatcagtgtacgtatatttagatgttttcagcttagctaatcctgatattaattctgtaaatgctggacccagatctctttttctcaaatccatagtcttcaataattctattctagtattacctgatgcaggcaatagcgacataaacatagaaaacgaataaccaaacggtgagaagacaatattatcatcttgaatatttttatacgctactataccggcattggtaaatccttgtagacgataggcggacgctgaacacgctaacgatagtatcaataacgcaatcatgattttatggtattaataattaaccttatttttatgttcggtataaaaaaattattgatgtctacacatccttttgtaattgacatctatatatccttttgtataatcaactctaatcactttaacttttacagttttccctaccagtttatccctatattcaacatatctatccatatgcatcttaacactctctgccaagatagcttcagagtgaggatagtcaaaaagataaatatatagagcataatcattctcgtatactctgccctttattacatcacccgcattgggcaacgaataacaaaatgcaagcatcttgttaacgggctcgtaaattgggataaaaattatgtttttattgtcttatatctattttattcaagagaatattcaggaatttctttttccggttgtatctcgtcgcagtatatatcatttgtacattgtttcatattttttaatagtttacaccttttagtaggactagtatcgtacaattcatagctgtattttgaattccaatcacgcataaaaatatcttccaattgttgacgaagacctaatccatcatccggtgtaatattaatagatgctccacatgtatccgtaaagtaatttcctgtccaatttgaggtacctatataggccgttttatcggttaccatatatttggcatggtttaccctagaatacggaatgggaggatcagcatctggtacaataaatagctttacttctatatttatgtttttagattttagcatagcgatagatcttaaaaagtttctcatgataaacgaagatcgttgccagcaactaatcaatagcttaacggatacttgtctgtctatagcggatcttcttaattcatcttctatataaggccaaaacaaaattttacccgccttcgaataaataatagggataaagttcataacagatacataaacgaatttactcgcatttctaatacatgacaataaagcggttaaatcattggttctttccatagtacatagttgttgcggtgcagaagcaataaatacagagtgtggaacgccgcttacgttaatactaagaggatgatctgtattataatacgacggataaaagtttttccaattatatggtagattgttaactccaagataccagtatacctcaaaaatttgagtgagatccgctgccaagttcctattattgaagatcgcaatacccaattccttgacctgagttagtgatctccaatccatgttagcgcttcctaaataaatatgtgtattatcagatatccaaaattttgtatgaagaactcctcctaggatatttgtaatatctatgtatcgtacttcaactccggccatttgtagtctttcaacatcctttaatggtttgttagatttattaacggctactctaactcgtactcctcttttgggtaattgtacaatctcgtttaatattatcgtgccgaaattcgtacccacttcatccgataaactccaataaaaagatgatatatctagtgtttttgtggtattggatagaatttccctccacatgttaaatgtagacaaatatactttatcaaattgcatacctataggaatagtttctgtaatcactgcgattgtattatccggattcattttatttgttaaaagaataatcctatatcacttcactctattaaaaatccaagtttctatttctttcatgactgattttttaacttcatccgtttccttatgaagatgatgtttggcaccttcataaatttttatttctctattacaatttgcatgttgcatgaaataatatgcacctaaaacatcgctaatcttattgtttgttccctggagtatgagagtcggggggtgttaatcttggaaattatttttctaaccttgttggtagccttcaagacctgactagcaaatccagccttaattttttcatgattgactaatgggtcgtattggtatttataaactttatccatatctctagatactgattctggacatagctttccgactggcgcatttggtgtgatggttcccataagtttggcagctagcagattcagtcttgaaacagcatctgcattaactagaggagacattagaatcattgctgtaaacaagtttggattatcgtaagaggctagctcccatggaatgacccaataagtagatttaatagttaccacgtgctgtaccaaagtcatcaatcatcattttttcaccattacttcttccatgtccaatatgatcatgtgagaatactaaaattcctaacgatgatatgttttcagctagttcgtcataacgtccagaatgtttaccagctccatgacttatgaatactaatgccttaggatatgtaataggtttccaatatttacaatatatgtaatcattgtccagattgaacatacagtttgcactcatgattcacgttatataactatcaatattaacagttcgtttgatgatcatattatttttatgttttattgataattgtaaaaacatacaattaaatcaatatagaggaaggagacggctactgtcttttgtaagatagtcatggcgactaaattagattatgaggatgctgttttttactttgtggatgatgataaaatatgtagtcgcgactccatcatcgatctaatagatgaatatattacgtggagaaatcatgttatagtgtttaacaaagatattaccagttgtggaagactgtacaaggaattgatgaagttcgatgatgtcgctatacggtactatggtattgataaaattaatgagattgtcgaagctatgagcgaaggagaccactacatcaattttacaaaagtccatgatcaggaaagtttattcgctaccataggaatatgtgctaaaatcactgaacattggggatacaaaaagatttcagaatctagattccaatcattgggaaacattacagatttgatgaccgacgataatataaacatcttgatactttttctagaaaaaaaattgaattgatgatataggggtcttcataacgcataattattacgttagcattctatatccgtgttaaaaaaaattatcctatcatgtatttgagagttttatatgtagcaaacatgatagctgtgatgccaataagctttagatattcacgcgtgctagtgttagggatggtattatctggtggtgaaatgtccgttatataatctacaaaacaatcatcgcatatagtatgcgatagtagagtaaacatttttatagtttttactggattcatacatcgtctacccaattcggttataaatgaaattgtcgccaatcttacacccaaccccttgttatccattagcatagtattaacttcgttatttatgtcataaactgtaaatgattttgtagatgccatatcatacatgatattcatgtccctattataatcattactaactttatcacaatatatgttgataatatctatatatgatctagtctttgtgggcaactgtctatacaagtcgtctaaacgttgtttactcatatagtatcgaacagccatcattacatggtcccgttccgttgatagataatcgagtatgttagtggacttgtcaaatctatataccatattttctggaagtggatatacatagtcgtgatcaacattattgctagcctcatcttctatatcctgtactataccattatctatatcatctacataatctatgatattattacacataaacatcgacaacatactattgtttattatctaagtcctgttgatccaaacccttgatctcctctatttgtactatctagagattgtacttcttccagttctggataatatatacgttgatagattagctgagctattctatctccagtatttacattaaacgtacattttccattattaataagaatgactcctatgtttcccctataatcttcgtctattacaccacctcctatatcaatgccttttagtgacagaccagacctaggagctattctaccatagcagaacttaggcatggacatactaatatctgtcttaattaactgtctttctcctggagggatagtataatcgtaagcgctatacaaatcatatccggcagcacccggcgattgcctagtaggagatttagctctgttagtttccttaacaaatctaactggtgagttaatattcatgttgaacataaaactaatattttatttcaaaattatttaccatcccatatattccatgaataagtgtgatgattgtacacttctatagtatctatatacgatccacgataaaatcctcctatcaatagcagtttattatccactatgatcaattctggattatccctcggataaataggatcatctatcagagtccatgtattgctggattcacaataaaattccgcatttctaccaaccaagaataaccttctaccgaacactaacgcgcatgatttataatgaggataataagtggatggtccaaactgccactgatcatgattgggtagcaaatattctgtagttgtatcagtttcagaatgtcctcccattacgtatataacattgtttatggatgccactgctggattacatctaggtttcagaagactcggcatattaacccaagcagcatccccgtggaaccaacgctcaacagatgtgggatttggtagacctcctactacgtataatttattgttagcgggtatcccgctagcatacagtctggggctattcatcggaggaattggaatccaattgtttgatatataatttacagctatagcattgttatgtatttcattgttcatccatccaccgatgagatatactacttctccaacatgagtacttgtacacatatggaatatatctataatttgatccatgttcataggatactctatgaatggatacttgtatgatttgcgtggttgtttatcacaatgaaatattttggtacagtctagtatccattttacattatttatacctctgggagaaagataatttgacctgattacatttttgataaggagtagcagatttcctaatttatttcttcgcctcatataccacttaatgacaaaatcaactacataatcctcatctggaacatttagttcatcgctttctagaataagtttcatagatagataatcaaaattgtctatgatgtcatcttccagttccaaaaagtgtttggcaataaagtttttagtatgacataagagattggatagtccgtattctatacccatcatgtaacactcgacacaatattcctttctaaaatctcgtaagataaagtttatacaagtgtagatgataaattctacagaggttaatatagaagcacgtaataaattgacgacgttatgactatctatatatacctttccagtatatgagtaaataactatagaagttaaactgtgaatgtcaaggtctagacaaacccttgtaactggatctttatttttcgtgtatttttgacgtaaatgtgtgcgaaagtaaggagataactttttcaatatcgtagaattgactattatattgcctcctatggcatcaataattgttttgaatttcttagtcatagacaatgctaatatattcttacagtacacagtattgacaaatatcggcatttatgtttctttaaaagtcaacatctagagaaaaatgattatctttttgagacataactcccattttttggtattcacccacacgtttttcgaaaaaattagtttttccttccaatgatatattttccatgaaatcaaacggattggtaacattataaatttttttaaatcccaattcagaaatcaatctatccgcgacgaattctatatatgttttcatcatttcacaattcattcctataagtttaactggaagagccgcagtaagaaattcttgttcaatggatactgcatctgttataatagatctaacggtttcttcactcggtggatgcaataaatgtttaaacatcaaacatgcgaaatcgcagtgcagaccctcgtctctactaattagttcgttggaaaacgtgagtccgggcattaggccacgctttttaagccaaaatatggaagcgaatgatccagaaaagaaaattccttctactgcagcaaaggcaataagtctctctccataaccggcgctgtcatgtatccacttttgagcccaatcggccttcttttttacacaaggcatcgtttctatggcattaaagagatagtttttttcattactatctttaacataagtatcgatcaaaagactatacatttccgaatgaatgttttcaatggccatctgaaatccgtagaaacatctagcctcggtaatctgtacttctgtacaaaatcgttccgccaaattttcattcactattccgtcactggctgcaaaaaacgccaatacatgttttataaaatatttttcgtctggtgttagtttattccaatcattgatatctttagatatatctacttcttccactgtccaaaatgatgcctctgcctttttatacatgttccagatgtcatgatattggattgggaaaataacaaatctatttggatttggtgcaaggatgggttccataactaaattaacaataacaataaattttttttcagttatctatatgcctgtacttggattttttgtacatcgatatcgccgcaatcactacaataattacaagtattattgatagcattgttattagtactatcataattaaattatctacattcatgggtgctgaataatcgttattatcatcattatcattttgtaattgtgacatcatactagataaatcgtttgcgagattgttgtgggaagcgggcatggaggatgcattatcattattatttaacgccttccatttggattcacaaatgttacgcacattcaacattttatggaaactataattttgtgaaaacaaataacaagaaaactcgtcatcgttcaaatttttaacgatagtaaaccgattaaacgtcgagctaatttctaacgctagcgactctgttggatatgggtttccagatatatatcttttcagttcccctacgtatctataatcatctgtaggaaatggaagatatttccatttatctactgttcctaatatcatatgtggtggtgtagtagaaccattaagcgcgaaagatgttatttcgcatcgtattttaacttcgcaataatttctggttagataacgcactctaccagtcaagtcaatgatattagcctttacagatatattcatagtagtcgtaacgatgactccatcttttagatgcgatactcctttgtatgtaccagaatcttcgtacctcaaactcgatatatttaaacaagttaatgagatattaacgcgttttatgaatgatgatatataaccagaagttttatcctcggtggctagcgctataaccttatcattataataccaactagtgtgattaatatgtgacacgtcagtgtgggtacaaatatgtacattatcgtctacgtcgtattcgatacatccgcatacagccaacaaatataaaatgacaaatactctaacgccgttcgtacccatcttgatgcggtttaataaatgttttgatttcaatttattgtaaaaaaagattcggttttatactgttcgatattctcattgcttatattttcatctatcatctccacacagtcaaatccgtggttagcatgcacctcatcaaccggtaaaagactatcggactcttctatcattataactctagaatatttaatttggtcattattaatcaagtcaattatcttatttttaacaaacgtgagtattttactcattttttataaaaacttttagaaatatacagactctatcgtgtgtctatatcttctttttatatccaatgtatttatgtctgatttttcttcatttatcatatataatggtccaaattctacacgtgcttcggattcatccagatcattaaggttcttataattgtaacatccttctcttccctcttctacatcttccttcttattcttattcttagcgtcacagaatctaccacagcaggatcccatgacgagcgtcatattaaactaatccattttcaattataatatatgattagtaatgaccattaaaataaaaaatattcttcataaccggcaagaaagtgaaaagttcacattgaaactatgtcagtagtatacatcatgaaatgatgatatatatatactctattttggtggaggattatatgatataattcgtggataatcatttttaagacacatttctttattcgtaaatcttttcacgttaaatgagtgtccatattttgcaatttcttcatatgatggcggtgtacgtggacgaggctgctcctgttcttgttgtggtcgccgactgtcgtgtctgcgtttagatccctccattatcgcgattgcgtagatggagtactattttataccttgtaattaaatttttttattaattaaacgtataaaaacgttccgtatctgtatttaagagccagatttcgtctaatagaacaaatagctacagtaaaaataactagaataattgctacacccactagaaaccacggatcgtaatacggcaatcggttttcgataataggtggaacgtatattttatttaaggacttaacaattgtctgtaaaccacaatttgcttccgcggatcctgtattaactatctgtaaaagcatatgttgaccgggcggagccgaacattctccgatatctaatttctgtatatctataatattattaacctccgcatacgcattacagttcttttctagcttggataccgcactaggtacatcgtctagatctattcctatttcctcagcgatagctcttctatccttttccggaagcaatgaaatcacttcaataaatgattcaaccatgagtgtgaaactaagtcgagaattactcatgcatttgttagttattcggagcgcgcaatttttaaactgtcctataacctctcctatatgaatagcacaagtgacattagtagggatagaatgttgagctaatttttgtaaataactatctataaaaagattatacaaagttttaaactctttagtttccgccatttatccagtctgagaaaatgtctctcataataaatttttccaagaaactaattgggtgaagaatggaaacctttaatctatatttatcacagtctgttttggtacacatgatgaattcttccaatgccgtactaaattcgatatctttttcgatttctggatatgtttttaataaagtatgaacaaagaaatggaaatcgtaataccagttatgtttaactttgaaattgttttttattttcttgttaatgattccagccacttgggaaaagtcaaagtcgtttaatgccgatttaatacgttcattaaaaacaaactttttatcctttagatgaattattattggttcattggaatcaaaaagtaagatattatcgggtttaagatctgcgtgtaaaaagttgtcgcaacagggtagttcgtagattttaatgtataacagagccatctgtaaaaagataaactttatgtattgtaccaaagatttaaatcctaatttgatagctaactcggtatctactttatctgccgaatacagtgctaggggaaaaattataatgtttcctctttcatattcgtagttagttctcttttcatgttcgaaaaagtgaaacatgcggttaaaatagtttataacattaatattactgttaataactgccggataaaagtgggatagtaatttcacgaatttgatactgtcctttctctcgttaaacgcctttaaaaaaactttagaagaatatctcaatgagagttcctgaccatccatagtttgtatcaataatagcaacatatgaagaacacgtttatacagagtatgtaaaaatgttaatttatagtttaatcccatggcccacgcacacacgattaattttttttcatctccctttagattgttgtatagaaatttgggtactgtgaactccgccgtagtttccatgggactatataattttgtggcctcgaatacaaattttactacatagttatctatcttaaagactataccatatcctcctgtagatatgtgataaaaatcgtcgtttataggataaaatcgtttatccttttgttggaaaaaggatgaattaatgtaatcattctcttctatctttagtagtgtttccttattaaaattcttaaaataatttaacaatctaactgacggagcccaattttggtgtaaatctaattgggacattatattgttaaaatacaaacagtctcctaatataacagtatctgataatctatggggagacatccattgatattcaggggatgaatcattggcaacacccatttattgtacaaaaagccccaatttacaaacgaaagtccaggtttgatagagacaaacaattaactattttgtctctgtttttaacacctccacagtttttaatttctttagtaatgaaattattcacaatatcagtatcttctttatctaccagagattttactaacttgataaccttggctgtctcattcaatagggtagtaatatttgtatgtgtgatattgatatctttttgaattgtttcttttagaagtgattctttgatggtgccagcatacgaattacaataatgcagaaactcggttaacatgcaggaattatagtaagccaattccaattgttgcctgtgttgtattagagtgtcaatatgagcaatggtgtccttgcgtttctctgatagaatgcgagcagcgattttggcgttatcatttgacgatatttctggaatgacgaatcctgtttctactaactttttggtaggacaaagtgaaacaatcaagaagatagcttctcctcctatttgtggaagaaattgaactcctctagatgatctactgacgatagtatctccttgacagatattggaccgaattacagaagtacctggaatgtaaagccctgaaaccccctcattttttaagcagattgttgccgtaaatcctgcactatgcccaagatagagagctcctttggtgaatccatctctatgtttcagtttaaccaagaaacagtcagctggtctaaaatttccatctctatctaatacagcatctaacttgatgtcaggaactatgaccggtttaatgttatatgtaacattgagtaaatccttaagttcataatcatcactgtcatcagttatgtacgatccaaacaatgtttctaccggcatagtggatacgaagatgctatccatcagaatgtttccctgattagtattttctatatagctattcttctttaaacgattttccaaatcagtaactatgttcatttttttaggagtaggacgcctagccagtatggaagaggattttctagatcctctcttcaacatctttgatctcgatggaatgcaaaaccccatagtgaaacaaccaacgataaaaataatattgtttttcactttttataattttaccatctgactcatggattcattaatatctttataagagctactaacgtataattctttataactgaactgagatatatacaccggatctatggtttccataattgagtaaatgaatgctcggcaataactaatggcaaatgtatagaacaacgaaattatactagagttgttaaagttaatattttctatgagctgttccaataaattatttgttgtgactgcgttcaagtcataaatcatcttgatactatccagtaaaccgtttttaagttctggaatattatcatcccattgtaaagcccctaattcgactatcgaatatcctgctctgatagcagtttcaatatcgacggacgtcaatactgtaataaaggtggtagtattgtcatcatcgtgataaactacgggaatatggtcgttagtaggtacggtaactttacacaacgcgatatataactttccttttgtaccatttttaacgtagttgggacgtcctgcagggtattgttttgaagaaatgatatcgagaacagatttgatacgatatttgttggattcctgattattcactataatataatctagacagatagatgattcgataaatagagaaggtatatcgttggtaggataatacatccccattccagtattctcggatactctattgatgacactagttaagaacatgtcttctattctagaaaacgaaaacatcctacatggactcattaaaacttctaacgctcctgattgtgtctcgaatgcctcgtacaaggatttcaaggatgccatagattctttgaccaacgatttagaattgcgtttagcatctgatttttttattaaatcgaatggtcggctctctggtttgctaccccaatgataacaatagtcttgtaaagataaaccgcaagaaaatttatacgcatccatccaaataaccctagcaccatcggatgatattaatgtattattatagattttccatccacaattattgggccagtatactgttagcaacggtatatcgaatagattactcatgtaacctactagaatgatagttcgtgtactagtcataatatctttaatccaatctaaaaaatttaaaattagattttttacactgttaaagttaacaaaagtattacccgggtacgtggatatcatatatggcattggtccattatcagtaatagctccataaactgatacggcgatggtttttatatgtgtttgatctaacgaggaagaaattcgcgcccacaattcatctctagatatgtatttaatatcaaacggtaacacatcaatttcgggacgcgtatatgtttctaaatttttaatccaaatataatgatgacctatatgccctattatcatactgtcaactatagtacacctagggaacttacgatacatctgtttcctataatcgttaaattttacaaatctataacatgctaaaccttttgacgacagccattcattaatttctgatatggaatctgtattctcgataccgtatcgttctaaagccagtgctatatctccctgttcgtgggaacgctttcgtataatatcgatcaacggataatctgaagtttttggagaataatatgactcatgatctatttcgtccataaacaatctagacataggaattggaggcgatgatcttaattttgtgcaatgagtcgtcaatcctataacttctaatcttgtaatattcatcatcgacataatactatctatgttatcatcgtatattagtataccatgaccttcttcatttcgtgccaaaatgatatacagtcttaaatagttacgcaatatctcaatagtttcataattgttagctgttttcatcaaggtttgtatcctgtttaacatgatggcgttctataacgtctctattttctatttttaattttttaaatttttaacgatttactgtggctagatacccaatctctctcaaatatttttttagcctcgcttacaagctgtttatctatactattaaaactgacgaatccgtgattttggtaatgggttccgtcgaaatttgccgaagtgatatgaacatattcgtcgtcgactatcaacaattttgtattattctgaatagtgaaaaccttcacagatagatcattttgaacacacaacgcatctagacttttggcggttgccatagaatatacgtcgttcttatcccaattaccaactagaagtctgatcttaactcctctattaatggctgcttctataatggagttgtaaatgtcgggccaatagtagctattaccgtcgacacgtgtagtgggaactatggccaaatgttcaatatctatactagtcttagctgacctgagtttatcaataactacatcggtatctagatctctagaatatcccaataggtgttccggagaatcagtaaagaacactccacctataggattcttaatatgatacgcagtgctaactggcaaacaacaagccgcagagcataaattcaaccatgaattttttgcgctattaaaggctttaaaagtatcaaatcttctacgaagatctgtggccagcgggggataatcagaatatacacctaacgttttaatcgtatgtatagatcctccagtaaatgacgcgtttcctacataacatctttcatcatctgacacccaaaaacaaccgagtagtagtcccacattattttttttatctatattaacggttataaaatttatatccgggcagtgactttgtagctctcccagatttcttttccctcgttcatctagcaaaactattattttaatccctttttcagatgcctcttttagtttatcaaaaataagcgctcccctagtcgtactcagaggattacaacaaaaagatgctatgtatatatatttcttagctagagtgataatttcgttaaaacattcaaatgttgttaaatgatcggatctaaaatccatattttctggtagtgtttctaccagcctacattttgctcccgcaggtaccgatgcaaatggccacatttagttaacataaaaacttatacatcctgttctatcaacgattctagaatatcatcggctatatcgctaaaattttcatcaaagtcgacatcacaacctaactcagtcaatatattaagaagttccatgatgtcatcttcgtctatttctatatccgtatccattgtagattgttgaccgattatcgagtttaaatcattactaatactcaatccttcagaatacaatctgtgtttcattgtaaatttataggcggtgtatttaagttggtagattttcaattatgtattaatatagcaacagtagttcttgctcctccttgattctagcatcctcttcattattttcttctacgtacataaacatgtccaatacgttagacaacacaccgacgatggcggccgcagatctcgagttatgatctacttccttaccgtgcaataaattagaatatattttctacttttacgagaaattaattattgtatttattatttatgggtgaaaaacttactataaaaagcgggtgggtttggaattagtgaaagcttaaaaattgaaattttattttttttttttggaatataaataagctcgaagtcgacagatctaggcctggtaccaggaggaggaattcagcttaaagatgacttcgaaagtttatgatccagaacaaaggaaacggatgataactggtccgcagtggtgggccagatgtaaacaaatgaatgttcttgattcatttattaattattatgattcagaaaaacatgcagaaaatgctgttatttttttacatggtaacgcggcctcttcttatttatggcgacatgttgtgccacatattgagccagtagcgcggtgtattataccagatcttattggtatgggcaaatcaggcaaatctggtaatggttcttataggttacttgatcattacaaatatcttactgcatggtttgaacttcttaatttaccaaagaagatcatttttgtcggccatgattggggtgcttgtttggcatttcattatagctatgagcatcaagataagatcaaagcaatagttcacgctgaaagtgtagtagatgtgattgaatcatgggatgaatggcctgatattgaagaagatattgcgttgatcaaatctgaagaaggagaaaaaatggttttggagaataacttcttcgtggaaaccatgttgccatcaaaaatcatgagaaagttagaaccagaagaatttgcagcatatcttgaaccattcaaagagaaaggtgaagttcgtcgtccaacattatcatggcctcgtgaaatcccgttagtaaaaggtggtaaacctgacgttgtacaaattgttaggaattataatgcttatctacgtgcaagtgatgatttaccaaaaatgtttattgaatcggatccaggattcttttccaatgctattgttgaaggcgccaagaagtttcctaatactgaatttgtcaaagtaaaaggtcttcatttttcgcaagaagatgcacctgatgaaatgggaaaatatatcaaatcgttcgttgagcgagttctcaaaaatgaacaagcggccgccgccaccatgagcaagggcgaggaactgttcactggcgtggtcccaattctcgtggaactggatggcgatgtgaatgggcacaaattttctgtcagcggagagggtgaaggtgatgccacatacggaaagctcaccctgaaattcatctgcaccactggaaagctccctgtgccatggccaacactggtcactaccttcacctatggcgtgcagtgcttttccagatacccagaccatatgaagcagcatgactttttcaagagcgccatgcccgagggctatgtgcaggagagaaccatctttttcaaagatgacgggaactacaagacccgcgctgaagtcaagttcgaaggtgacaccctggtgaatagaatcgagctgaagggcattgactttaaggaggatggaaacattctcggccacaagctggaatacaactataactcccacaatgtgtacatcatggccgacaagcaaaagaatggcatcaaggtcaacttcaagatcagacacaacattgaggatggatccgtgcagctggccgaccattatcaacagaacactccaatcggcgacggccctgtgctcctcccagacaaccattacctgtccacccagtctgccctgtctaaagatcccaacgaaaagagagaccacatggtcctgctggagtttgtgaccgctgctgggatcacacatggcatggacgagctgtacaagtgagcggccgccctgctagcaagcttgctagcggccgctcgagatctgcggccgctacagacacgaatatgactaaaccgatgaccatttaaaaacccctctctagctttcacttaaactgtatcgatcattcttttagcacatgtataatataaaaacattattctatttcgaatttaggcttccaaaaatttttcatccgtaaaccgataataatatatatagacttgttaatagtcggaataaatagattaatgcttaaactatcatcatctccacgattagagatacaatatttacattctttttgctgtttcgaaactttatcaatacacgttaatacaaacccaggaaggagatattgaaactgaggctgttgaaaatgaaacggtgaatacaataattcagataatgtaaaatcatgattccgtattctgatgatattagaactgctaatggatgtcgatggtatgtatctaggagtatctattttaacaaagcatcgatttgctaatatacaattatccttttgattaattgttattttattcatattcttaaaaggtttcatatttatcaattcttctacattaaaaatttccatttttaatttatgtagccccgcaatactcctcattacgtttcattttttgtctataatatccattttgttcatctcggtacatagattatccaattgagaagcgcatttagtagttttgtacattttaagtttattgacgaatcgtcgaaaactagttatagttaacattttattatttgataccctgatattaatacccctgccgttactattatttataactgatgtaatccacgtaacattggaattaactatcgatagtaatgcatcgacgcttccaaaattgtctattataaactcaccgataatttttttattgcatgttttcatattcattaggattatcaaatctttaatcttattacgattgtatgcgttgatattacaagacgtcattctaaaagacggaggatctccatcaaatgccagacaatcacgtacaaagtacatggaaataggttttgttctattgcgcatcatagatttatatagaacacccgtagaaatactaatttgttttactctataaaatactaatgcatctatttcatcgttttgtataacgtctttccaagtgtcaaattccaaatttttttcattgatagtaccaaattcttctatctctttaactacttgcatagataggtaattacagtgatgcctacatgccgttttttgaaactgaatagatgcgtctagaagcgatgctacgctagtcacaatcaccactttcatatttagaatatatatatgtaaaaatatagtagaatttcattttgtttttttctatgctataaatgaattctcattttgcatctgctcatactccgttttatattaataccaaagaaggaagatatctggttctaaaagccgttaaagtatgcgatgttagaactgtagaatgcgaaggaagtaaagcttcctgcgtactcaaagtagataaaccctcatcgcccgcgtgtgagagaagaccttcgtccccgtccagatgcgagagaatgaataaccctggaaaacaagttccgtttatgaggacggacatgctacaaaatatgttcgcggctaatcgcgataatgtagcttctagacttttgtcctaaaatactattatatccttttcgatattaataaatccgtgtcgtccaggttttttatctctttcagtatgtgaatagataggtattttatctctattcatcatcgaatttaagagatccgataaacattgtttgtattctccagatgtcagcatctgatacaacaatatatgtgcacataaacctctggcacttatttcatgtaccttccccttatcactaaggagaatagtatttgagaaatatgtatacatgatattatcatgaattagatatacagaatttgtaacactctcgaaatcacacgatgtgtcggcgttaagatctaatatatcactcgataacacattttcatctagatacactagacattttttaaagctaaaatagtctttagtagtaacagtaactatgcgattattttcatcgatgatacatttcatcggcatattattacgcttaccatcaaagactataccatgtgtatatctaacgtattctagcatggttgccatacgcgcattaaacttttcaggatctttggatagatcttccaatctatctatttgagaaaacatttttatcatgttcaatagttgaaacgtcggatccactatatagatattatctataaagattttaggaactacgttcatggtatcctggcgaatattaaaactatcaatgatatgattatcgttttcatcttttatcaccatatagtttctaagatatgggattttacttaatataatattatttcccgtgataaattttattagaaaggccaaatctataagaaaagtcctagaattagtctgaagaatatctatatcgccgtatagtatatttggattaattagatatagagaatatgatccgtaacatatacaacttttattatggcgtctaagatattcttccatcaacttattaacatttttgactagggaagatacattatgacgtcccattacttttgccttgtctattactgcgacgttcatagaatttagcatatctcttgccaattcttccattgatgttacattataagaaattttagatgaaattacatttggagctttaatagtaagaactcctaatatgtccgtgtatgtggtcactaatacagattgtagttctataatcgtaaataatttacctatattatatgtttgagtctgtttagaaaagtagctaagtatacgatcttttatttctgatgcagatgtattaacatcggaaaaaaatctttttttattcttttttactaaagatacaaatatgtctttgttaaaaacagttattttctgaatatttctagcttgtaattttaacatatgatattcgttcacactaggtactctgcctaaataggtttctataatctttaatgtaatattaggaaaagtattctgatcaggattcctattcattttgaggatttaaaactctgattattgtctaatatggtctctacgcaaactttttcacagagcgatagagtttttgataactcgtttttcttaagaaatataaaactactgtctccagagctcgctctatcttttattttatctaattcgatacaaactcctgatactggttcagaaagtaattcattaattttcagtcctttatagaagatatttaatatagataatacaaaatcttcagtttttgatatcgatctgattgatcctagaactagatatattaataacgtgctcattaggcagtttatggcagcttgataattagatatagtatattccagttcatatttattagataccgcattgcccagattttgatattctatgaattcctctgaaaataaatccaaaataactagacattctattttttgtggattagtgtactctcttccctctatcatgttcactactggtgtccacgatgataaatatctagagggaatataatatagtccataggatgccaatctagcaatgtcgaataactgtaattttattcttcgctcttcattatgaattgattcttgaggtataaacctaacacaaattatattattagacttttcgtatgtaatgtctttcatgttataagtttttaatcctggaatagaatctattttaatgaggcttttaaacgcagagttctccaacgagtcaaagcataatactctgttgtttttcttatatacgatgttacgattttcttctttgaatggaataggtttttgaattagtttataattacaacataatagataaggaagtgtgcaaatagtacgcggaaaaaacataatagctcccctgttttcatccatggttttaagtaaatgatcactggcttctttagtcaatggatattcgaacattaaccgtttcatcatcattggacagaatccatatttcttaatgtaaagagtgatcaaatcattgtgtttattgtaccatcttgttgtaaatgtgtattcggttatcggatctgctcctttttctattaaagtatcgatgtcaatctcgtctaagaattcaactatatcgacatatttcatttgtatacacataaccattactaacgtagaatgtataggaagagatgtaacgggaacagggtttgttgattcgcaaactattctaatacataattcttctgttaatacgtcttgcacgtaatctattatagatgccaagatatctatataattattttgtaagatgatgttaactatgtgatctatataagtagtgtaataattcatgtattttgatatatgttccaactctgtctttgtgatgtctagtttcgtaatatctatagcatcctcaaaaaatatattcgcatatattcccaagtcttcagttctatcttctaaaaaatcttcaacgtatggaatataataatctattttacctcttctgatatcattaatgatatagtttttgacactatcttctgtcaattgattcttattcactatatctaagaaacggatagcgtccctaggacgaactactgccattaatatctctattatagcttctggacataattcatctattataccagaattaatgggaactattccgtatctatctaacatagttttaagaaagtcagaatctaagacttgatgttcatatattggttcatacatgaaatgatctctattgatgatagtgactatttcattctctgaaaattggtaactcattctatatatgctttccttgttgatgaaggatagaatatactcaatagaatttgtaccaacaaactgttctcttatgaatcgtatatcatcatctgaaataatcatgtaaggcatacatttaacaattagagacttgtctcctgttatcaatatactattcttgtgataatttatgtgtgaggcaaatttgtccacgttctttaattttgttatagtagatatcaaatccaatggagctacagttcttggcttaaacagatatagtttttctggaacaaattctacaacattattataaaggactttgggtagataagtgggatgaaatcctattttaattaatgcgatagccttgtcctcgtgcagatatccaaacgcttttgtgatagtatggcattcattgtctagaaacgctctacgaatatctgtgacagatatcatctttagagaatatactagtcgcgttaatagtactacaatttgtattttttaatctatctcaataaaaaaattaatatgtatgattcaatgtataactaaactactaactgttattgataactagaatcagaatctaatgatgacgtaaccaagaagtttatctactgccaatttagctgcattatttttagcatctcgtttagattttccatcggccttatcgaatactcttccgtcgatgtctacacaggcataaaatgtaggagagttactaggcccaactgattcaatacgaaaagaccaatctctcctagtaatttggcagtactcattaataacggtgacagggttagcatctttccaatcaataatttttttagccggaataacatcatcaaaagacttatgatcctctctcattgatttttcgcgggatacatcatctattatgacgtcagccatagcatcagcatccggcttatccgcctccgttgtcataaaccaacgaggaggaatatcgtcggagctgtacaccatagcactacgttgaagatcgtacagagctttattaacttctcgcttctccatattaagttgtctagttagttgtgcagcagtagctccttcgattccaatgtttttaatagccgcacacacaatctctgcgtcagaacgctcgtcaatatagatcttagacatttttagagagaactaacgcaaccagcaataaaactgaacctactttatcatttttttattcatcatcctctggtggttcgtcgttcctatcaaatgtagctctgattaacccgtcatctataggtgatgctggttctggagattctggaggagatggattattatctggaagaatctctgttatttccttgttttcatgtatcgattgcgttgtaacattaagattgcgaaatgctctaaatttgggaggcttaaagtgttgtttgcaatctctacacgcgtgtctaactagtggaggttcgtcagctgctctagtttgaatcatcatcggcgtagtattcctacttttacagttaggacacggtgtattgtatttctcgtcgagaacgttaaaataatcgttgtaactcacatcctttattttatctatattgtattctactcctttcttaatgcattttataccgaataagagatagcgaaggaattctttttcggtgccgctagtacccttaatcatatcacatagtgttttatattccaaatttgtggcaatagacggtttatttctatacgatagtttgtttctggaatcctttgagtattctataccaatattattctttgattcgaatttagtttcttcgatattagattttgtattacctatattcttgatgtagtactttgatgatttttccatggcccattctattaagtcttccaagttggcatcatccacatattgtgatagtaattctcggatatcagtagcggctaccgccattgatgtttgttcattggatgagtaactactaatgtatacattttccatttataacacttatgtattaactttgttcatttatattttttcattattatgttgatattaacaaaagtgaatatatatatgttaataattgtattgtggttatacggctacaattttataatgagtgaaagtcagtgtccgatgatcaatgacgatagctttactctgaaaagaaagtatcaaatcgatagtgcggagtcaacaataaaaatggataagaagaggataaagtttcagaatagagccaaaatggtaaaagaaataaatcagacaataagagcagcacaaactcattacgagacattgaaactaggatacataaaatttaagagaatgattatgactactactctagaagatatagcaccatctattccaaataatcagaaaacttataaactattctcggacatttcagccatcggcaaagcatcacagaatccgagtaagatggtatatgctctgctgctttacatgtttcccaatttgtttggagatgatcatagattcattcgttatagaatgcatccaatgagtaaaatcaaacacaagatcttctctcctttcaaacttaatcttattagaatattagtggaagaaagattctataataatgaatgcagatctaataaatggagaataattggaacacaagttgataaaatgttgatagctgaatctgataaatatacaatagatgcaaggtataacctaaaacccatgtatagaatcaagggagaatctgaagaagataccctctttatcaaacagatggtagaacaatgtgtgacatcccaggaattggtggaaaaagtgttgaagatactgtttagagatttgttcaagagtggagaatacaaagcgtacagatacgatgatgatgtagaaaatggatttattggattggatacactaaaattaaacattgttcatgatatagttgaaccatgtatgcctgttcgtaggccagtggctaagatactgtgtaaagaaatggtaaataaatactttgagaatccgctacatattattggtaaaaatcttcaagagtgcattgactttgttagtgaataggcatttcatctttctccaatactaattcaaattgttaaattaataatggatagtataaatagttattagttataagatagtaaaaataattattagaataagagtgtagtatcatagataactctcttctataaaaatggattttattcgtagaaagtatcttatatacacagtagaaaataatatagattttttaaaggatgatacattaagtaaagtaaacaattttaccctcaatcatgtactagctctcaagtatctagttagcaattttcctcaacacgttattactaaggatgtattagctaataccaatttttttgttttcatacatatggtacgatgttgtaaagtgtacgaagcggttttacgacacgcatttgatgcacccacgttgtacgttaaagcattgactaagaattatttatcgtttagtaacgcaatacaatcgtacaaggaaaccgtgcataaactaacacaagatgaaaaatttttagaggttgccgaatacatggacgaattaggagaacttataggcgtaaattatgacttagttcttaatccattatttcacggaggggaacccatcaaagatatggaaatcatttttttaaaactgtttaagaaaacagacttcaaagttgttaaaaaattaagtgttataagattacttatttgggcatacctaagcaagaaagatacaggcatagagtttgcggataatgatagacaaaatatatacactctatttcaacaaactggtagaatcgtccatagcaatctaacagaaacgtttagagattatatctttcccggagataagactagctattgggtgtggttaaacgaaagtatagctaatgatgcggatatcgttcttaatagacacgccattaccatgtatgataaaattcttagttatatatactctgagataaaacaaggacgcgttaataaaaacatgcttaagttagtttatatctttgagcctgaaaaagatatcagagaacttctgctagaaatcatatatgatattcctggagatatcctatctattattgatgcaaaaaacgacgattggaaaaaatattttattagtttttataaagctaattttattaacggtaatacatttattagtgatagaacgtttaacgaggacttattcagagttgttgttcaaatagatcccgaatatttcgataatgaacgaattatgtctttattctctacgagtgctgcggacattaaacgatttgatgagttagatattaataacagttatatatctaatataatttatgaggtgaacgatatcacattagatacaatggatgatatgaagaagtgtcaaatctttaacgaggatacgtcgtattatgttaaggaatacaatacatacctgtttttgcacgagtcggatcccatggtcatagagaacggaatactaaagaaactgtcatctataaaatccaagagtagacggctgaacttgtttagcaaaaacattttaaaatattatttagacggacaattggctcgtctaggtcttgtgttagatgattataaaggagacttgttagttaaaatgataaaccatcttaagtctgtggaggatgtatccgcattcgttcgattttctacagataaaaaccctagtattcttccatcgctaatcaaaactattttagctagttataatatttccatcatcgtcttatttcaaaggtttttgagagataatctatatcatgtagaagaattcttggataaaagcatccatctaaccaagacggataagaaatatatacttcaattgataagacacggtagatcatagaacagaccaaatatattattaataatttgtatatacatagatataattatcacacatttttgataaatgggaactgctgcaacaattcagactcccaccaaattaatgaataaagaaaatgcagaaatgattttggaaaaaattgttgatcatatagttatgtatattagtgacgaatcaagtgattcagaaaataatcctgaatatattgattttcgtaacagatacgaagactatagatctctcattataaaaagtgatcacgagtttgtaaagctatgtaaaaatcatgcggagaaaagttctccagaaacgcaacaaatgattatcaaacacatatacgaacaatatcttattccagtatctgaagtactattaaaacctataatgtccatgggtgacataattacatataacggatgtaaagacaatgaatggatgctagaacaactctctaccctaaactttaacaatctccgcacatggaactcatgtagcataggcaatgtaacgcgtctgttttatacattttttagttatctgatgaaagataaactaaatatataagtataatcccattctaatactttaacctgatgtattagcatcttattagaatattaacctaactaaaagacataacataaaaactcattacatagttgataaaaagcggtaggatataaatattatggctgccaccgttccgcgttttgacgacgtgtacaaaaatgcacaaagaagaattctagatcaagaaacattttttagtagaggtctaagtagaccgttaatgaaaaacacatatctatttgataattacgcgtatggatggataccagaaactgcaatttggagtagtagatacgcaaacctagatgctagtgactattatcccatttcgttgggattacttaaaaagttcgagtttctcatgtctctatataaaggtcctattcccgtatatgaagaaaaagtaaatactgaattcatagccaatggatcgttctctggtagatacgtatcatatcttcgaaagttttctgcccttccaacaaacgagtttattagttttttgttactgacttccattccaatctataatatcttgttctggtttaaaaacacacagtttgatattactaaacacacattattcagatacgtctatacagataatgccaaacacctggcgttggctaggtatatgcatcaaacaggagactataagcctttgtttagtcgtctcaaagagaattatatatttaccggtcccgttccaataagtatcaaagatatagatcaccctaatcttagtagagcaagaagtccatccgattatgagacattagctaatattagtactatattgtactttaccaagtatgatccggtattaatgtttttattgttttacgtacctgggtattcaattactacaaaaattactccagccgtagaatatctaatggataaactgaatctaacaaagagcgacgtacaactgttgtaaattattttatgcttcgtaaaatgtaggttttgaaccaaacattctttcaaagaatgagatgcataaaactttattatccaatagattgactatttcggacgtcaatcgtttaaagtaaacttcgtaaaatattctttgatcactgccgagtttaaaacttctatcgataattgtctcatatgttttaatatttacaagttttttggtccatggtacattagccggacaaatatatgcaaaataatatcgttctccaagttctatagtttctggattatttttattatattcagtaactaaatacatattagggttatctgcggatttataatttgagtgatgcattctactcaacataaataattctagaggagacgatctactatcaaattcggatcgtaaatctgtttctaaagaacggagaatatctatacatacctgattagaattcatccgtccttcagacaacatctcagacagtctggttttgtacatcttaatcatattcttatgaaacttggaaacatctcttctagtttcactagtacctttattaattctctcaggtacagattttgaattcgacgatgctgagtatttcatcgttgtatatttcttcttcgattgcataatcagattcttatataccgcctcaaactctattttaaaattattaaacaatactctattattaatcagtcgttctaactctttcgctatttctatagacttatctacatcttgactgtctatctctgtaaacacggagtcggtatctccatacacgctacgaaaacgaaatctgtaatctataggcaacgatgttttcacaatcggattaatatctctatcgtccatataaaatggattacttaatggattggcaaaccgtaacataccgttagataactctgctccatttagtaccgattctagatacaagatcattctacgtcctatggatgtgcaactcttagccgaagcgtatgagtatagagcactatttctaaatcccatcagaccatatactgagttggctactatcttgtacgtatattgcatggaatcatagatggccttttcagttgaactggtagcctgttttagcatctttttatatctggctctctctgccaaaaatgttcttaatagtctaggaatggttccttctatcgatctatcgaaaattgctatttcagagatgaggttcggtagtctaggttcacaatgaaccgtaatatatctaggaggtggatatttctgaagcaatagctgattatttatttcttcttccaatctattggtactaacaacgacaccgactaatgtttccggagatagatttccaaagatacacacattaggatacagactgttataatcaaagattaatacattattactaaacattttttgttttggagcaaataccttaccgccttcataaggaaacttttgttttgtttctgatctaactaagatagttttagtttccaacaatagctttaacagtggacccttgatgactgtactcgctctatattcgaataccatggattgaggaagcacatatgttgacgcacccgcgtctgtttttgtttctactccataatactcccacaaatactgacacaaacaagcatcatgaatacagtatctagccatatctaaagctatgtttagattataatccttatacatctgagctaaatcaacgtcatcctttccgaaagataatttatatgtatcattaggtaaagtaggacataatagtacgactttaaatccattttcccaaatatctttacgaattactttacatataatatcctcatcaacagtcacataattacctgtggttaaaacctttgcaaatgcagcggctttgcctttcgcgtctgtagtatcgtcaccgatgaacgtcatttctctaactcctctatttaatactttacccatgcaactgaacgcgttcttggatatagaatccaatttgtacgaatccaatttttcaaatttttgaatgaatgaatatagatcgaaaaatatagttccattattgttattaacgtgaaacgtagtattggccatgccgcctactcccttatgactagactgatttctctcataaatacagagatgtacagcttcctttttgtccggagatctaaagataattttctctcctgttaataactctagacgattagtaatatatctcagatcaaagttatgtccgttaaaggtaacgacgtagtcgaacgttagttccaacaattgtttagctattcgtaacaaaactatttcagaacatagaactagttctcgttcgtaatccatttccattagtgactgtatcctcaaacatcctctatcgacggcttcttgtatttcctgttccgttaacatctcttcattaatgagcgtaaacaataatcgtttaccacttaaatcgatataacagtaacttgtatgcgagattgggttaataaatacagaaggaaacttcttatcgaagtgacactctatatctagaaataagtacgatcttgggatatcgaatctaggtatttttttagcgaaacagttacgtggatcgtcacaatgataacatccattgttaatctttgtcaaatattgctcgtccaacgagtaacatccgtctggagatatcccgttagaaatataaaaccaactaatattgagaaattcatccatggtggcattttgtatgctgcgtttctttggctcttctatcaaccacatatctgcgacggagcattttctatctttaatatctagattataacttattgtctcgtcaatgtctatagttctcatctttcccaacggcctcgcattaaatggaggaggagacaatgactgatatatttcgtccgtcactacgtaataaaagtaatgaggaaatcgtataaatacggtctcgccatttcgacatctggatttcagatataaaaatctgttttcaccgtgactttcaaaccaattaatgcaccgaacatccatttatagaatttagaaatatattttcatttaaatgaatcccaaacattggggaagagccgtatggaccattatttttatagtactttcgcaagcgggtttagacggcaacatagaagcgtgtaaacgaaaactatatactatagttagcactcttccatgtcctgcatgtagacggcacgcgactatcgctatagaggacaataatgtcatgtctagcgatgatctgaattatatttattattttttcatcagattatttaacaatttggcatctgatcccaaatacgcgatcgatgtgacaaaggttaaccctttataaacttaacccattataaaacttatgattagtcacaactgaaataaccgcgtgattattttttggtataattctacacggcatggtttctgtgactatgaattcaacccccgttacattagtgaaatctttaacaaacagcaagggttcgtcaaagacataaaactcattgtttacaatcgaaatagaccccctatcacacttaaaataaaaaatatccttatcctttaccaccaaataaaattctgattggtcaatgtgaatgtattcacttaacagttccacaaatttatttattaactccgaggcacatacatcgtcggtattttttatggcaaactttactcttccagcatccgtttctaaaaaaatattaacgagttccatttatatcatccaatattattgaaatgacgttgatggacagatgatacaaataagaaggtacggtacctttgtccaccatctcctccaattcatgctctattttgtcattaactttaatgtatgaaaacagtacgccacatgcttccatgacagtgtgtaacactttggatacaaaatgtttgacattagtataattgtccaagactgtcaatctataatagatagtagctataatatattctatgatggtattgaagaagatgacaaccttggcatattgatcatttaacacagacatggtatcaacagatagcttgaatgaaagagaatcagtaattggaataagcgtcttctcgatagagtgtccgtataccaacatgtctgatattttgatgtattccattaaattatttagttttttctttttattctcgttaaacagcatttctgtcaacggaccccaacatcgttgaccgattaagttttgattgatttttccgtgtaaggcgtatctagtcagatcgtatagcctatccaataatccatcgtctgtgtgtagatcacatcgtacactttttaattctctatagaagagcgacagacatctggagcaattacagacagcaatttctttattctctacagatgtaagatacttgaagacattcctatgatgatgcagaattttggataacacggtattgatggtatctgttaccataattcctttgatggctgatagtgtcagagcacaagatttccaatctttgacaatttttagcaccattatctttgttttgatatctatatcagacagcatggtgcgtctgacaacacagggattaagacggaaagatgaaatgattctctcaacatcttcaatagataccttgctattttttctggcattatctatatgtgcgagaatatcctctagagaatcagtatcctttttgatgatagtggatctcaatgacatgggacgtttaaaccttcttattctatcaccagattgcatggtgatttgtcttctttcttttatcataatgtaatctctaaattcatcggcaaattgtctatatctaaaatcataatatgagatgtttacctctacaaatatctgttcgtccaatgttagagtatttacatcagttttgtattccaaattaaacatggcaacggatttaattttatattcctctattaagtcctcgtcgataataacagaatgtagataatcatttaatccgtcgtacatggttggaagatgcttgttgacaaaatctttaattgtcttgatgaaggtgggactatatctaacatcttgattaataaaatttataacattgtccataggatactttgtaactagttttatacacatctcttcatcggtaagtttagacagaatatcgtgaacaggtggtatattatattcatcagatatacgaagaacaatgtccaaatctatattgtttaatatattatatagatgtagcgtagctcctacaggaatatctttaactaagtcaatgatttcatcaaccgttagatctattttaaagttaatcatataggcattgatttttaaaaggtatgtagccttgactacattctcattaattaaccattccaagtcattgtgtgtaagaagattatattctatcataagcttgactacatttggtcccgataccattaaagaattcttatgatataaggaaacagattttaggtactcatctactctacaagaattttggagagccttaacgatatcagtgacgtttattatttcaggaggaaagaatctaacattgagaatatcggaattaatagcttccagatacagtgattttggcaatagtccgtgtaatccataatccagtaacacgagctggtgcttgctagacaccttttcaatgtttaatttttttgaaataagctttgataaagccttcctcgcaaattccggatacatgaacatgtcggcgacatgattaagtattgttttttcattatttttatattttctcaacaagttctcaataccccaatagatgatagaatatcacccaatgcgtccatgttgtctatttccaacaggtcgctatatccaccaatagaagtttttccaaaaaagattctaggaacagttctaccaccagtaatttgttcaaaataatcccgcaattcattttcgggtttaaattctttaatatcgacaatttcatacgctcctcttttgaaactaaacttatttagaatatccagtgcatttctacaaaaaggacatgtatacttgacaaaaattgtcactttgttattggccaacctttgttgtacaaattcctcggccattttaatatttaagtgatataaaactatctcgacttatttaactctttagtcgagatatatggacgcagatagctatatgatagccaactacagaaggcaaacgctataaaaaacataattacgacgagcatatttataaatatttttattcagcattacttgatatagtaatattaggcacagtcaaacattcaaccactctcgatacattaactctctcattttctttaacaaattctgcaatatcttcgtaaaaagattcttgaaactttttagaatatctatcgactctagatgaaatagcgttcgtcaacatactatgttttgtatacataaaggcgcccattttaacagtttctagtgacaaaatgctagcgatcctaggatcctttagaatcacatagattgacgattcgtctctcttagtaactctagtaaaataatcatacaatctagtacgcgaaataatattatccttgacttgaggagatctaaacaatctagttttgagaacatcgataagttcatcgggaatgacatacatactatctttaatagaactcttttcatccagttgaatggattcgtccttaaccaactgattaatgagatcttctattttatcattttccagatgatatgtatgtccattaaagttaaattgtgtagcgcttctttttagtctagcagccaatactttaacatcactaatatcgatatacaaaggagatgatttatctatggcattaagaattcgtttttcgacatccgtcaaaaccaattcctttttgcctgtatcatccagttttccatcctttgtaaagaaattattttctactagactattaataagactgataaggattcctccataattgcacaatccaaactttttaacaaaactagactttacgagatctacaggaatgcgtacttcaggttttttagcttgtgattttttcttttgcggacattttctagtaaccaactcatctaccatttcattgattttagcagtgaaataagctttcaatgcacgggcactgatactattgaaaacgagttgatcttcaaattccgccatttaagttcaccaaacaacttttaaatacaaatatatcaatagtagtagaataagaactataaaaaaaataataattaaccaaccccaacaaccggtattattagttgatgtggtagttttctcatcacttagaacagatttaacaatttctataaagtctgtcaaatcatcttccggagaccccataaatacaccaaatatagcggcgtacaacttatccatttatacattgaatattggcttttctttatcgctatcttcatcatattcatcatcaatatcaacaagtcccagattacgagccagatcttcttctacattttcagtcattgatacacgttcactatctccagagagtccgataacgttagccaccacttctctatcaatgattagtttcttgagcgcgaaagtaatttttgtttccgttccggatctatagaagacgataggtgtgataattgccttggccaattgtctttctcttttactgagtgattctagttcaccttctatagatctgagaatggatgattctccagtcgaaacatattctaccatggatccgtttaatttgttgatgaagatggattcatccttaaatgttttctctgtaatagtttccaccgaaagactatgcaaagaatttggaatgcgttccttgtgcttaatgtttccatagacggcttctagaagttgatacaacataggactagccgcggtaacttttatttttagaaagtatccatcgcttctatcttgtttagatttatttttataaagtttagtctctccttccaacataataaaagtggaagtcatttgactagataaactatcagtaagttttatagagatagacgaacaattagcgtattgagaagcatttagtgtaacgtattcgatacattttgcattagatttactaatcgattttgcatactctataacacccgcacaagtctgtagagaatcgctagatgcagtaggtcttggtgaagtttcaactctcttcttgattaccttactcatgattaaacctaaataattgtactttgtaatataatgatatatattttcactttatctcatttgagaataaaaatgtttttgtttaaccactgcatgatgtacagatttcggaatcgcaaaccaccagtggttttattttatccttgtccaatgtgaattgaatgggagcggatgcgggtttcgtacgtagatagtacattcccgtttttagaccgagactccatccgtaaaaatgcatactcgttagtttggaataactcggatctgctatatggatattcatagattgactttgatcgatgaaggctcccctgtctgcagccatttttatgatcgtcttttgtggaatttcccaaatagttttataaactcgcttaatatcttctggaaggtttgtattctgaatggatccaccatctgccataatcctattcttgatctcatcattccataattttctctcggttaaaactctaaggagatgcggattaactacttgaaattctccagacaatactctccgagtgtaaatattactggtatacggttccaccgactcattatttcccaaaatttgagcagttgatgcagtcggcataggtgccaccaataaactatttctaagaccgtatgttctgattttatcttttagaggttcccaattccaaagatccgacggtacaacattccaaagatcatattgtagaataccgttactggcgtacgatcctacatatgtatcgtatggtccttccttctcagctagttcacaactcgcctctaatgcaccgtaataaatggtttcgaagatcttcttatttagatcttgtgcttccaggctatcaaatggataatttaagagaataaacgcgtccgctaatccttgaacaccaataccgataggtctatgtctcttattagagatttcagcttctggaataggataataattaatatctataattttattgagatttctgacaattactttgaccacatccttcagtttgagaaaatcaaatcgcccatctattacaaacatgttcaaggcaacagatgccagattacaaacggctacctcattagcatccgcatattgtattatctcagtgcaaagattactacacttgatagttcctaaattttgttgattactctttttgttacacgcatccttataaagaatgaatggagtaccagtttcaatctgagattctataatcgctttccagacgactcgagcctttattatagatttgtatctcctttctctttcgtatagtgtatacaatcgttcgaactcgtctccccaaacattgtccaatccaggacattcatccggacacatcaacgaccactctccgtcatccttcactcgtttcataaagagatcaggaatccaaagagctataaatagatctctggttctatgttcctcgtttcctgtattctttttaagatcgaggaacgccataatatcagaatgccacggttccaagtatatggccataactccaggccgtttgtttcctccctgatctatgtatctagcggtgttattataaactctcaacattggaataataccgtttgatataccattggtaccggagatatagcttccactggcacgaatattactaattgatagacctattccccctgccattttagagattaatgcgcatcgttttaacgtgtcatagataccctctatgctatcatcgatcatgttaagtagaaaacagctagacatttggtgacgactagttcccgcattaaataaggtaggagaagcgtgcgtaaaccatttttcagaaagtagattgtacgtctcaatagctgagtctatatcccattgatgaattcctactgcgacacgcattaacatgtgctgaggtctttcaacgatcttgttgtttattttcaacaagtaggatttttccaaagttttaaaaccaaaatagttgtatgaaaagtctcgttcgtaaataataaccgagttgagtttatccttatatttgttaactatatccatggtgatacttgaaataatcggagaatgtttcccatttttaggattaacatagttgaataaatcctccatcacttcactaaatagtttttttgtttccttgtgtagatttgatacggctattctggcggctagaatggcataatccggatgttgtgtagtacaagtggctgctatttcggctgccagagtgtccaattctaccgttgttactccattatatattccttgaataaccttcatagctattttaataggatctatatgatccgtgtttaagccataacataattttctaatacgagacgtgattttatcaaacatgacattttccttgtatccatttcgtttaatgacaaacatttttgttggtgtaataaaaaaattatttaacttttcattaatagggatttgacgtatgtagcgtacaaaatgattgttcctggtatatagataaagagtcctatatatttgaaaatcgttacggctcgattaaactttaatgattgcatagtgaatatatcattaggatttaactccttgactatcatggcggcgccagaaattaccatcaaaagcattaatacagttataccgatcgcagttagaacggttatagcatccaccatttatatctaaaaattagatcaaagaatatgtgacaaagtcctagttgtatactgagaattgacgaaacaatgtttcttacatatttttttcttattagtaaccgacttaatagtaggaactggaaaactagacttgattattctataagtatagatacccttccaaataatattctctttgataaaagttccagaaaatgtagaattttttaaaaagttatcttttgctattaccaagattgtgtttagacgcttattattaatatgagtgatgaaatccacaccgcctctagatatcgcctttatttccacattagatggtaaatccaatagtgaaactatctttttaggaatgtatggactcgcgtttagaggagtaaacgtcttaggcgtcggaaaggatgattcatcaaacgaataaacaatttcacaaatggatgttaatgtattagtaggaaattttttgacgctattggaattgaagattctaatggatgatgttctacctatttcatccgataacatgttaatttccgacaccaacggttttaatatttcgatgatatacggtagtctctctttcggacttatatagcttattccacaatacgagtcattatatactccaaaaaacaaaataactagtataaaatctgtatcgaatgggaaaaacgaaattatcgacataggtatagaatccggaacattgaacgtattaatacttaattctttttctgtggtaagtaccgataggttattgacattgtatggttttaaatattctataacttgagacttgatagatattagtgatgaattgaaaattatttttatcaccacgtgtgtttcaggatcatcgtcgacgcccgtcaaccaaccgaacggagtaaaataaatatcattaatatatgctctagatattagtatttttatcaatcctttgattatcatcttctcgtaggcgaatgattccatgatcaagagtgatttaagaacatcctccggagtattaatgggcttagtaaacagtccatcgttgcaataataaaagttatccaagttaaaggatattatgcattcgtttaaagatatcacctcatctgacggagacaattttttggtaggttttagagactttgaagctacttgtttaacaaagttattcatcgtcgtctactattctatttaattttgtagttaatttatcacatatcacattaattgactttttggtccacttttccatacgtttatattcttttaatcctgcgttatccgtttccgttatatccagggatagatcttgcaagttaaatagaatgctcttaaataatgtcattttcttatccgctaaaaatttaaagaatgtataaacctttttcagagatttgaaactcttaggtggtgtcctagtacacaatatcataaacaaactaataaacattccacattcagattccaacagctgattaacttccacattaatacagcctattttcgctccaaatgtacattcgaaaaatctgaataaaacatcgatgtcacaatttgtattatccaatacagaatgtttgtgattcgtgttaaaaccatcggagaaggaatagaaataaaaattattatagtggtggaattcagttggaatattgcctccggagtcataaaaggatactaaacattgttttttatcataaattacacatttccaatgagacaaataacaaaatccaaacattacaaatctagaggtagaacttttaattttgtctttaagtatatacgataagatatgtttattcataaacgcgtcaaatttttcatgaatcgctaaggagtttaagaatctcatgtcaaattgtcctatataatccacttcggatccataagcaaactgagagactaagttcttaatacttcgattgctcatccaggctcctctctcaggctctattttcatcttgacgacctttggattttcaccagtatgtattcctttacgtgataaatcatcgattttcaaatccatttgtgagaagtctatcgccttagatactttttcccgtagtcgaggtttaaaaaaatacgctaacggtatactagtaggtaactcaaagacatcatatatagaatggtaacgcgtctttaactcgtcggttaactctttcttttgatcgagttcgtcgctactattgggtctgctcaggtgccccgactctactagttccaacatcataccgataggaatacaagacactttgccggcggttgtagatttatcatatttttccactacatatccgttacaatttgttaaaaatttagatacatctatattgctacataatccagctagtgaatatatatgacataataaattggtaaatcctagttctggtattttactaattactaaatctgtatatctttccatttatcatggaaaagaatttaccagatatcttcttttttccaaactgcgttaatgtattctcttacaaatattcacaagatgaattcagtaatatgagtaaaacggaacgtgatagtttctcattggccgtgtttccagttataaaacatagatggcataacgcacacgttgtaaaacataaaggaatatacaaagttagtacagaagcacgtggaaaaaaagtatctcctccatcactaggaaaacccgcacacataaacctaaccgcgaagcaatatatatacagtgaacacacaataagctttgaatgttatagttttctaaaatgtataacaaatacagaaatcaattcgttcgatgagtatatattaagaggactattagaagctggtaatagtttacagatattttccaattccgtaggtaaacgaacagatactataggtgtactagggaataagtatccatttagcaaaattccattggcctcattaactcctaaagcacaacgagagatattttcagcgtggatttctcatagacctgtagttttaactggaggaactggagtgggtaagacgtcacaggtacccaagttattgctttggtttaattatttatttggtggattctctactctagataaaatcactgactttcacgaaagaccagtcattctatctcttcctaggatagctttagttagattgcatagcaataccattttaaaatcattgggatttaaggtactagatggatctcctatttctttacggtacggatctataccggaagaattaataaacaaacaaccaaaaaaatatggaattgtattttctacccataagttatctctaacaaaactatttagttatggcactcttattatagacgaagttcatgagcatgatcaaataggagatattattatagcagtagcgagaaagcatcatacgaaaatagattctatgtttttaatgactgccacgttagaggatgacagggaacggctaaaagtatttttacctaatcccgcatttatacatattcctggagatacactgtttaaaattagcgaggtatttattcataataagataaatccatcttccagaatggcatacatagaagaagaaaagagaaatttagttactgctatacagatgtatactcctcctgatggatcatccggtatagtctttgtggcatccgttgcacagtgtcacgaatataaatcatatttagaaaaaagattaccgtatgatatgtatattattcatggtaaggtcttagatatagacgaaatattagaaaaagtgtattcatcacctaatgtatcgataattatttctactccttatttggaatccagcgttactatacgcaatgttacacacatttatgatatgggtagagtttttgtccccgctccttttggaggatcgcaacaatttatttctaaatctatgagagatcaacgaaaaggaagagtaggaagagttaatcctggtacatacgtctatttctatgatctgtcttatatgaagtctatacagcgaatagattcagaatttctacataattatatattgtacgctaataagtttaatctaacactccccgaagatttgtttataatccctacaaatttggatattctatggcgtacaaaggaatatatagactcgttcgatattagtacagaaacatggaataaattattatccaattattatatgaagatgatagagtatgctaaactttatgtactaagtcctattctcgctgaggagttggataactttgagaggacgggagaattaactagtattgtacgagaagccattttatctctaaatttacaaattaagattttaaattttaaacataaagatgatgatacgtatatacacttttgtaaaatattattcggtgtctataacggaacaaacgctactatatattatcatagacctctaacgggatatatgaatatgatttcagatactatatttgttcctgtagataataactaaaaatcaaactctaatgaccacatctttttttagagatgaaaaattttccacatctccttttgtagacacgactaaacattttgcagaaaaaagtttattagtgtttagataatcgtatacttcatcagtgtagatagtaaatgtgaacagataaaaggtattcttgctcaatagattggtaaattccatagaatatattaatcctttcttcttgagatcccacatcatttcaaccagagacgttttatccaatgatttacctcgtactataccacatacaaaactagattttgcagtgacgtcgtacctggtattcctaccaaacaaaattttacttttagttcttttagaaaattctaaggtagaatctctatttgccaatatgtcatctatggaattaccactagcaaaaaatgatagaaatatatattgatacatcgcagctggttttgatctactatactttaaaaacgaatcagattccataattgcctgtatatcatcagctgaaaaactatgttttacacgtattccttcggcatttctttttaatgatatatcttgtttagacaatgataaagttatcatgtccatgagagacgcgtctccgtatcgtataaatatttcattagatgttagacgcttcattaggggtatacttctataaggtttcttaatcagtccatcattggttgcgtcaagaactactatcggatgttgttgggtatctctagtgttacacatggccttactaaagtttgggtaaataactatgatatctctattaattatagatgcatatatttcattcgtcaaggatattagtatcgacttgctatcgtcattaatacgtgtaatgtaatcatataaatcatgcgatagccaaggaaaatttaaatagatgttcatcatataatcgtcgctataattcatattaatacgttgacattgactaatttgtaatatagcctcgccacgaagaaagctctcgtattcagtttcatcgataaaggataccgttaaatataactggttgccgatagtctcatagtctattaagtggtaagtttcgtacaaatacagaatccctaaaatattatctaatgttggattaatctttaccataactgtataaaatggagacggagtcataactattttaccgtttgtacttactggaatagatgaaggaataatctccggacatgctggtaaagacccaaatgtctgtttgaagaaatccaatgttccaggtcctaatctcttaacaaaaattacgatattcgatcccgatatcctttgcattctatttaccagcatatcacgaactatattaagattatctatcatgtctattctcccaccgttatataaatcgcctccgctaagaaacgttagtatatccatacaatggaatacttcatttctaaaatagtattcgttttctaattctttaatgtgaaatcgtatactagaaagggaaaaattatctttgagttttccgttagaaaagaaccacgaaactaatgttctgattgcgtccgattccgttgctgaattaatggatttacaccaaaaactcatataacttctagatgtagaagcattcgctaaaaaattagtagaatcaaaggatataagtagatgttccaacaagtgagcaattcccaagatttcatctatatcattctcgaatccgaaattagaaattcccaagtagatatcctttttcatccgatcgttgatgaaaatacgaactttattcggtaagacaatcatttactaaggagtaaaataggaagtaatgttcgtatgtcgttatcatcgtataaattaaaggtgtgttttttaccattaagtgacattataattttaccaatattggaattataatataggtgtatttgcgcactcgcgacggttgatgcatcggtaaatatagctgtatctaatgttctagtcggtatttcatcatttcgctgtctaataatagcgttttctctatctgtttccattacagctgcctgaagtttattggtcggataatatgtaaaataataagaaatacatacgaataacaaaaataaaataagatataataaagatgccatttagagatctaattttgtttaacttgtccaaattcctacttacagaagatgaggaatcgttggagatagtgtcttccttatgtagaggatttgaaatatcttataatgacttgataacttactttccagataggaaataccataaatatatttataaagtatttgaacatgtagatttatcggaggaattaagtatggaattccatgatacaactctgagagatttagtctatcttagattgtacaagtattccaagtgtatacggccgtgttataaattaggagataatctaaaaggcatagttgttataaaggacaggaatatttatattagggaagcaaatgatgacttgatagaatatctcctcaaggaatacactcctcagatttatacatattctaatgagcgcgtccccataactggttcaaaattaattctttgtggattttctcaagttacatttatggcgtatacaacgtcgcatataacaacaaataaaaaggtagatgttctcgtttccaaaaaatgtatagatgaactagtcgatccaataaattatcaaatacttcaaaatttatttgataaaggaagcggaacaataaacaaaatactcaggaagatattttattcggtaacaggtggccaaactccataggtagctttttctatttcggattttagaatttccaaattcaccagcgatttatcggttttggtgaaatccaaggatttattaatgtccacaaatgccatttgttttgtctgtggattgtatttgaaaatggaaacgatgtagttagatagatgcgctgcgaagtttcctattagggttccgcgcttcacgtcacccagcatacttgaatcaccatcctttaaaaaaaatgataagatatcaacatggagtatatcatactcgaattttaattcttctactgactcactgacattttcacaaatactacaatacggtttaccgaaaataatcagtacgttcttcatttatgggtatcaaaaacttaaaatcgttactgctggaaaataaatcactgacgatattagatgataatttatacaaagtatacaatggaatatttgtggatacaatgagtatttatatagccgtcgccaattgtgtcagaaacttagaagagttaactacggtattcataaaatacgtaaacggatgggtaaaaaagggagggcatgtaaccctttttatcgatagaggaagtataaaaattaaacaagacgttagagacaagagacgtaaatattctaaattaaccaaggacagaaaaatgttagaattagaaaagtgtacatccgaaatacaaaatgttaccggatttatggaagaagaaataaaggcagaaatgcaattaaaaatcgataaactcacatttcaaatatatttatctgattctgataacataaaaatatcattgaatgagatactaacacatttcaacaataatgagaatgttacattattttattgtgatgaacgagacgcagaattcgttatgtgtctcgaggctaaaacacatttctctaccacaggagaatggccgttgataataagtaccgatcaggatactatgctatttgcatctgctgataatcatcctaagatgataaaaaacttaactcaactgtttaaatttgttccctcggcagaggataactatttagcaaaattaacggcgttagtgaatggatgtgatttctttcctggactctatggggcatctataacacccaccaacttaaacaaaatacaattgtttagtgattttacaatcgataatatagtcactagtttggcaattaaaaattattatagaaagactaactctaccgtagacgtgcgtaatattgttacgtttataaacgattacgctaatttagacgatgtctactcgtatattcctccttgtcaatgcactgttcaagaatttatattttccgcattagatgaaaaatggaatgaatttaaatcatcttatttagaaagcgtgccgttaccctgccaattaatgtacgcgttagaaccacgcaaggagattgatgtttcagaagttaaaactttatcatcttatatagatttcgaaaatactaaatcagatatcgatgttataaaatctatatcctcgatcttcggatattctaacgaaaactgtaacacgatagtattcggcatctataaggataatttactactgagtataaataattcattttactttaacgatagtctgttaataaccaatactaaaagtgataatataataaatataggttactagattaaaaatggtgttccaactcgtgtgctctacatgcggtaaagatatttctcacgaacgatataaattgattatacgaaaaaaatcattaaaggatgtactcgtcagtgtaaagaacgaatgttgtaggttaaaattatctacacaaatagaacctcaacgtaacttaacagtgcaacctctattggatataaactaatatggatccggttaattttatcaagacatatgcgcctagaggttctattatttttattaattataccatgtcattaacaagtcatttgaatccatcgatagaaaaacatgtgggtatttattatggtacgttattatcggaacacttggtagttgaatctacctatagaaaaggagttcgaatagtcccattggatagtttttttgaaggatatcttagtgcaaaagtatacatgttagagaatattcaagttatgaaaatagcagctgatacgtcattaactttattgggtattccgtatggatttggtcatgatagaatgtattgttttaaattggtagctgactgttataaaaatgccggtattgatacatcgtctaaacgaatattgggcaaagatatttttctgagccaaaacttcacagacgataatagatggataaagatatatgattctaataatttaacattttggcaaattgattaccttaaagggtgagttaatatgcataactactcctccgttgttttttccctcgttctttttcttaacgttgtttgccatcactctcataatgtaaagatattctaaaatggtaaacttttgcatatcggacgcagaaattggtataaatgttgtaattgtattatttcccgtcaatggactagtcacagctccatcagttttatatcctttagagtatttctcactcgtgtctaacattctagagcattccatgatctgtttatcgttgatattggccggaaagatagattttttattttttattatattactattggcaattgtagatataacttctggtaaatatttttctaccttttcaatctcttctattttcaagccggctatatattctgctatattgttgctagtatcaataccttttctggctaagaagtcatatgtggtattcactatatcagttttaactggtagttccattagcctttccacttctgcagaataatcagaaattggttctttaccagaaaatccagctactataataggctcaccgatgatcattggcaaaatcctatattgtaccagattaatgagagcatatttcatttccaataattctgctagttcttgagacattgatttatttgatgaatctagttggttctctagatactctaccatttctgccgcatacaataacttgttagataaaatcagggttatcaaagtgtttagcgtggctagaatagtgggcttgcatgtattaaagaatgcggtagtatgagtaaaccgttttaacgaattatatagtctccagaaatctgtggcgttacatacatgagccgaatgacatcgaagattgtccaatatttttaatagctgctctttgtccattatttctatatttgactcgcaacaattgtagataccattaatcaccgattcctttttcgatgccggacaatagcacaattgtttagctttggactctatgtattcagaattaatagatatatctctcaatacagattgcactatacattttgaaactatgtcaaaaattgtagaacgacgctgttctgcagccatttaactttaaataatttacaaaaatttaaaatgagcatccgtataaaaatcgataaactgcgccaaattgtggcatatttttcagagttcagtgaagaagtgtctataaatgtagactcgacggatgagttaatgtatatttttgccgccttgggcggatctgtaaacatttgggcaattatacctctaagtgcatcagtgttttaccgaggagccgaaaatattgtgtttaatcttcctgtgtccaaggtaaaatcgtgtttgtgtagttttcacaatgatgccatcatagatatagaacctgatctggaaaataatctagtaaaactttctagttatcatgtagtaagtgtcgattgtaacaaggaactgatgcctattaggacagatactactatttgtctaagtatagatcaaaagaaatcttacgtgtttaattttcacaagtatgaagaaaaatgttgtggtagaaccgtcattcatctagaatggttgttgggctttatcaagtgtattagtcagcatcagcatctggctattatgtttaaagatgacaatattattatgaagactcctggtaatactgatgcgttttccagggaatattctatgactgaatgttctcaagaactacaaaagttttctttcaaaatagctatctcgtctctcaacaaactacgaggattcaaaaagagagtcaatgtttttgaaactagaatcgtaatggataatgacgataacattttaggaatgttgttttcggatagagttcaatcctttaagatcaacatctttatggcgtttttagattaatactttcaatgagataaatatgggtggcggagtaagtgttgagctccctaaacgggatccgcctccgggagtacccactgatgagatgttattaaacgtggataaaatgcatgacgtgatagctcccgctaagcttttagaatatgtgcatataggaccactagcaaaagataaagaggataaagtaaagaaaagatatccagagtttagattagtcaacacaggacccggtggtctttcggcattgttaagacaatcgtataatggaaccgcacccaattgctgtcgcacttttaatcgtactcattattggaagaaggatggaaagatatcagataagtatgaagagggtgcagtattagaatcgtgttggccagacgttcacgacactggaaaatgcgatgttgatttattcgactggtgtcagggggatacgttcgatagaaacatatgccatcagtggatcggttcagcctttaataggagtaatagaactgtagagggtcaacaatcgttaataaatctgtataataagatgcaaacattatgtagtaaagatgctagtgtaccaatatgcgaatcatttttgcattatttacgcgcacacaatacagaagatagcaaagagatgatcgattatattctaagacaacagtctgcggactttaaacagaaatatatgagatgtagttatcccactagagataagttagaagagtcattaaaatatgcggaacctcgagaatgttgggatccagagtgttcgaatgccaatgttaatttcttactaacacgtaattataataatttaggactttgcaatattgtacgatgtaataccagcgtgaacaacttacagatggataaaacttcctcattaagattgtcatgtggattaagcaatagtgatagattttctactgttcccgtcaatagagcaaaagtagttcaacataatattaaacactcgttcgacctaaaattgcatttgatcagtttattatctctcttggtaatatggatactaattgtagctatttaaatgggtgccgcggcaagcatacagacgacggtgaatacactcagcgaacgtatctcgtctaaattagaacaagaagcgaacgctagtgctcaaacaaaatgtgatatagaaatcggaaatttttatatccgacaaaaccatggatgtaacctcactgttaaaaatatgtgctctgcggacgcggatgctcagttggatgctgtgttatcagccgctacagaaacatatagtggattaacaccggaacaaaaagcatacgtgccagctatgtttactgctgcgttaaacattcagacgagtgtaaacactgttgttagagattttgaaaattatgtgaaacagacttgtaattctagcgcggtcgtcgataacaaattaaagatacaaaacgtaatcatagatgaatgttacggagccccaggatctccaacaaatttggaatttattaatacaggatctagcaaaggaaattgtgccattaaagcgttgatgcaattgacgactaaggccactactcaaatagcacctagacaagttgctggtacaggagttcagttttatatgattgttatcggtgttataatattggcagcgttgtttatgtactatgccaagcgtatgttgttcacatccaccaatgataaaatcaaacttattttagccaataaggaaaacgtccattggactacttacatggacacattctttagaacttctccgatggttattgctaccacggatatgcaaaactgaaaatatattgataatattttaatagattaacatggaagttatcgctgatcgtctagacgatatagtgaaacaaaatatagcggatgaaaaatttgtagattttgttatacacggtctagagcatcaatgtcctgctatacttcgaccattaattaggttgtttattgatatactattatttgttatagtaatttatatttttacggtacgtctagtaagtagaaattatcaaatgttgttggtggtgctagtcatcacattaactattttttattactttatactataatagtactagactgacttctaacaaacatctcacctgccataaataaatgcttgatattaaagtcttctatttctaacactattccatctgtggaaaataatactctgacattatcgctaattgacacatcggtgagtgatatgcctataaagtaataatcttctttgggcacatataccagtgtaccaggttctaacaacctatttactggtgctcctgtagcatactttttctttaccttgagaatatccatcgtttgcttggtcaatagcgatatgtgattttttatcaaccactcaaaaaagtaattggagtgttcatatcctctacgggctattgtctcatggccgtgtatgaaatttaagtaacacgactgtggtagatttgttctatagagccgattgccgcaaatagatagaactaccaatatgtctgtacaaatgttaaacattaattgattaacagaaaaaacaatgttcgttctgggaatagaaaccagatcaaaacaaaattcgttagaatatatgccacgtttatacatggaatataaaataactacagtttgaaaaataacagtatcatttaaacatttaacttgcggggttaatctcacaactttactgtttttgaactgttcaaaatatagcatcgatccgtgagaaatacgtttagccgcctttaatagaggaaatcccaccgcctttctggatctcaccaacgacgatagttctgaccagcaactcatttcttcatcatccacctgttttaacatataataggcaggagatagatatccgtcattgcaatattccttctcgtaggcacacaatctaatattgataaaatctccattctcttctctgcatttattatcttgtctcggtggctgattaggctgtggtcttggtttaggccttggtctatcgttgttgaatctattttggtcattaaatctttcatttcttcctggtatatttctatcacctcgtttggttggatttttgtctatattatcgtttgtaacatcggtacgggtattcatttatcacaaaaaaaacttctctaaatgagtctactgctagaaaacctcatcgaagaagataccatattttttgcaggaagtatatctgagtatgatgatttacaaatggttattgccggcgcaaaatccaaatttccaagatctatgctttctatttttaatatagtacctagaacgatgtcaaaatatgagttggagttgattcataacgaaaatatcacaggagcaatgtttaccacaatgtataatataagaaacaatttgggtctaggagatgataaactaactattgaagccattgaaaactatttcttggatcctaacaatgaagttatgcctcttattattaataatacggatatgactgccgtcattcctaaaaaaagtggtaggagaaagaataagaacatggttatcttccgtcaaggatcatcacctatcttgtgcattttcgaaactcgtaaaaagattaatatttataaagaaaatatggaatccgcgtcgactgagtatacacctatcggagacaacaaggctttgatatctaaatatgcgggaattaatgtcctgaatgtgtattctccttccacatccataagattgaatgccatttacggattcaccaataaaaataaactagagaaacttagtactaataaggaactagaatcgtatagttctagccctcttcaagaacccattaggttaaatgattttctgggactattggaatgtgttaaaaagaatattcctctaacagatattccgacaaaggattgattactataaatggagaatgttcctaatgtatactttaatcctgtgtttatagagcccacgtttaaacattctttattaagtgtttataaacacagattaatagttttatttgaagtattcgttgtattcattctaatatatgtattttttagatctgaattaaatatgttcttcatgcctaaacgaaaaatacccgatcctattgatagattacgacgtgctaatctagcgtgtgaagacgataaattaatgatctatggattaccatggatgacaactcaaacatctgcgttatcaataaatagtaaaccgatagtgtataaagattgtgcaaagcttttgcgatcaataaatggatcacaaccagtatctcttaacgatgttcttcgcagatgatgattcattttttaagtatttggctagtcaagatgatgaatcttcattatctgatatattgcaaatcactcaatatctagactttctgttattattattgatccaatcaaaaaataaattagaagctgtgggtcattgttatgaatctctttcagaggaatacagacaattgacaaaattcacagactttcaagattttaaaaaactgtttaacaaggtccctattgttacagatggaagggtcaaacttaataaaggatatttgttcgactttgtgattagtttgatgcgattcaaaaaagaatcctctctagctaccaccgcaatagatcctgttagatacatagatcctcgtcgcaatatcgcattttctaacgtgatggatatattaaagtcgaataaagtgaacaataattaattctttattgtcatcatgaacggcggacatattcagttgataatcggccccatgttttcaggtaaaagtacagaattaattagacgagttagacgttatcaaatagctcaatataaatgcgtgactataaaatattctaacgataatagatacggaacgggactatggacgcatgataagaataattttgaagcattggaagcaactaaactatgtgatgtcttggaatcaattacagatttctccgtgataggtatcgatgaaggacagttctttccagacattgttgaattagatcgataaaaattaattaattacccgggtaccaggcctagatctgtcgagatccggtggtggtgcaaatcaaagaactgctcctcagtggatgttgcctttacttctaggcctgtacggaagtgttacttctgctctaaaagctgctgcagggggggggggggggtgggggggccggttagggccgccatcccctcagagcgtcgggatatcgggtggcggctcgggacggaggacgcgctagtgttcttctgtgtggcagttcagaatgatggatcaagctagatcagcattctctaacttgtttggtggagaaccattgtcatatacccggttcagcctggctcggcaagtagatggcgataacagtcatgtggagatgaaacttgctgtagatgaagaagaaaatgctgacaataacacaaaggccaatgtcacaaaaccaaaaaggtgtagtggaagtatctgctatgggactattgctgtgatcgtctttttcttgattggatttatgattggctacttgggctattgtaaaggggtagaaccaaaaactgagtgtgagagactggcaggaaccgagtctccagtgagggaggagccaggagaggacttccctgcagcacgtcgcttatattgggatgacctgaagagaaagttgtcggagaaactggacagcacagacttcaccagcaccatcaagctgctgaatgaaaattcatatgtccctcgtgaggctggatctcaaaaagatgaaaatcttgcgttgtatgttgaaaatcaatttcgtgaatttaaactcagcaaagtctggcgtgatcaacattttgttaagattcaggtcaaagacagcgctcaaaactcggtgatcatagttgataagaacggtagacttgtttacctggtggagaatcctgggggttatgtggcgtatagtaaggctgcaacagttactggtaaactggtccatgctaattttggtactaaaaaagattttgaggatttatacactcctgtgaatggatctatagtgattgtcagagcagggaaaatcacctttgcagaaaaggttgcaaatgctgaaagcttaaatgcaattggtgtgttgatatacatggaccagactaaatttcccattgttaacgcagaactttcattctttggacatgctcatctggggacaggtgacccttacacacctggattcccttccttcaatcacactcagtttccaccatctcggtcatcaggattgcctaatatacctgtccagacaatctccagagctgctgcagaaaagctgtttgggaatatggaaggagactgtccctctgactggaaaacagactctacatgtaggatggtaacctcagaaagcaagaatgtgaagctcactgtgagcaatgtgctgaaagagataaaaattcttaacatctttggagttattaaaggctttgtagaaccagatcactatgttgtagttggggcccagagagatgcatggggccctggagctgcaaaatccggtgtaggcacagctctcctattgaaacttgcccagatgttctcagatatggtcttaaaagatgggtttcagcccagcagaagcattatctttgccagttggagtgctggagactttggatcggttggtgccactgaatggctagagggatacctttcgtccctgcatttaaaggctttcacttatattaatctggataaagcggttcttggtaccagcaacttcaaggtttctgccagcccactgttgtatacgcttattgagaaaacaatgcaaaatgtgaagcatccggttactgggcaatttctatatcaggacagcaactgggccagcaaagttgagaaactcactttagacaatgctgctttccctttccttgcatattctggaatcccagcagtttctttctgtttttgcgaggacacagattatccttatttgggtaccaccatggacacctataaggaactgattgagaggattcctgagttgaacaaagtggcacgagcagctgcagaggtcgctggtcagttcgtgattaaactaacccatgatgttgaattgaacctggactatgagaggtacaacagccaactgctttcatttgtgagggatctgaaccaatacagagcagacataaaggaaatgggcctgagtttacagtggctgtattctgctcgtggagacttcttccgtgctacttccagactaacaacagatttcgggaatgctgagaaaacagacagatttgtcatgaagaaactcaatgatcgtgtcatgagagtggagtatcacttcctctctccctacgtatctccaaaagagtctcctttccgacatgtcttctggggctccggctctcacacgctgccagctttactggagaacttgaaactgcgtaaacaaaataacggtgcttttaatgaaacgctgttcagaaaccagttggctctagctacttggactattcagggagctgcaaatgccctctctggtgacgtttgggacattgacaatgagttttaaatgtgatacccatagcttccatgagaacagcagggtagtctggtttctagacttgtgctgatcgtgctaaattttcagtagggctacaaaacctgatgttaaaattccatcccatcatcttggtactactagatgtctttaggcagcagcttttaatacagggtagataacctgtacttcaagttaaagtgaataaccacttaaaaaatgtccatgatggaatattcccctatctctagaattttaagtgctttgtaatgggaactgcctctttcctgttgttgttaatgaaaatgtcagaaaccagttatgtgaatgatctctctgaatcctaagggctggtctctgctgaaggttgtaagtggtcgcttactttgagtgatcctccaacttcatttgatgctaaataggagataccaggttgaaagaccttctccaaatgagatctaagcctttccataaggaatgtagctggtttcctcattcctgaaagaaacagttaactttcagaagagatgggcttgttttcttgccaatgaggtctgaaatggaggtccttctgctggataaaatgaggttcaactgttgattgcaggaataaggccttaatatgttaacctcagtgtcatttatgaaaagaggggaccagaagccaaagacttagtatattttcttttcctctgtcccttcccccataagcctccatttagttctttgttatttttgtttcttccaaagcacattgaaagagaaccagtttcaggtgtttagttgcagactcagtttgtcagactttaaagaataatatgctgccaaattttggccaaagtgttaatcttaggggagagctttctgtccttttggcactgagatatttattgtttatttatcagtgacagagttcactataaatggtgtttttttaatagaatataattatcggaagcagtgccttccataattatgacagttatactgtcggttttttttaaataaaagcagcatctgctaataaaacccaacagatactggaagttttgcatttatggtcaacacttaagggttttagaaaacagccgtcagccaaatgtaattgaataaagttgaagctaagatttagagatgaattaaatttaattaggggttgctaagaagcgagcactgaccagataagaatgctggttttcctaaatgcagtgaattgtgaccaagttataaatcaatgtcacttaaaggctgtggtagtactcctgcaaaattttatagctcagtttatccaaggtgtaactctaattcccattttgcaaaatttccagtacctttgtcacaatcctaacacattatcgggagcagtatcttccataatgtataaagaacaaggtagtttttacctaccacagtgtctgtatcggagacagtgatctccatatgttacactaagggtgtaagtaattatcgggaacagtgtttcccataattttcttcatgcaatgacatcttcaaagcttgaagatcgttagtatctaacatgtatcccaactcctataattccctatcttttagttttagttgcagaaacattttgtggtcattaagcattgggtgggtaaattcaaccactgtaaaatgaaattactacaaaatttgaaatttagcttgggtttttgttacctttatggtttctccaggtcctctacttaatgagatagtagcatacatttataatgtttgctattgacaagtcattttaactttatcacattatttgcatgttacctcctataaacttagtgcggacaagttttaatccagaattgaccttttgacttaaagcagagggactttgtatagaaggtttgggggctgtggggaaggagagtcccctgaaggtctgacacgtctgcctacccattcgtggtgatcaattaaatgtaggtatgaataagttcgaagctccgtgagtgaaccatcattataaacgtgatgatcagctgtttgtcatagggcagttggaaacggcctcctagggaaaagttcatagggtctcttcaggttcttagtgtcacttacctagatttacagcctcacttgaatgtgtcactactcacagtctctttaatcttcagttttatctttaatctcctcttttatcttggactgacatttagcgtagctaagtgaaaaggtcatagctgagattcctggttcgggtgttacgcacacgtacttaaatgaaagcatgtggcatgttcatcgtataacacaatatgaatacagggcatgcattttgcagcagtgagtctcttcagaaaacccttttctacagttagggttgagttacttcctatcaagccagtacgtgctaacaggctcaatattcctgaatgaaatatcagactagtgacaagctcctggtcttgagatgtcttctcgttaaggagatgggccttttggaggtaaaggataaaatgaatgagttctgtcatgattcactattctagaacttgcatgacctttactgtgttagctctttgaatgttcttgaaattttagactttctttgtaaacaaatgatatgtccttatcattgtataaaagctgttatgtgcaacagtgtggagattccttgtctgatttaataaaatacttaaacactgaaaaaaaaaaaaaaaaaaaaaaaaaaaaaaaaaaaaaaaaaaaaaaaaaaaaaaaaaaaaaaaaaaaaaaaaaaaaaaaaagtaccttctgaggcggaaagaaccagccggatctcgacttcgagcttatttatattccaaaaaaaaaaaataaaatttcaatttttaagctttcactaattccaaacccacccgctttttatagtaagtttttcacccataaataataaatacaataattaatttctcgtaaaagtagaaaatatattctaatttattgcacggtaaggaagtagatcataactcgagcatgggagatcccgtcgttttacaacgtcgtgactgggaaaaccctggcgttacccaacttaatcgccttgcagcacatccccctttcgccagctggcgtaatagcgaagaggcccgcaccgatcgcccttcccaacagttgcgcagcctgaatggcgaatggcgctttgcctggtttccggcaccagaagcggtgccggaaagctggctggagtgcgatcttcctgaggccgatactgtcgtcgtcccctcaaactggcagatgcacggttacgatgcgcccatctacaccaacgtgacctatcccattacggtcaatccgccgtttgttcccacggagaatccgacgggttgttactcgctcacatttaatgttgatgaaagctggctacaggaaggccagacgcgaattatttttgatggcgttaactcggcgtttcatctgtggtgcaacgggcgctgggtcggttacggccaggacagtcgtttgccgtctgaatttgacctgagcgcatttttacgcgccggagaaaaccgcctcgcggtgatggtgctgcgctggagtgacggcagttatctggaagatcaggatatgtggcggatgagcggcattttccgtgacgtctcgttgctgcataaaccgactacacaaatcagcgatttccatgttgccactcgctttaatgatgatttcagccgcgctgtactggaggctgaagttcagatgtgcggcgagttgcgtgactacctacgggtaacagtttctttatggcagggtgaaacgcaggtcgccagcggcaccgcgcctttcggcggtgaaattatcgatgagcgtggtggttatgccgatcgcgtcacactacgtctgaacgtcgaaaacccgaaactgtggagcgccgaaatcccgaatctctatcgtgcggtggttgaactgcacaccgccgacggcacgctgattgaagcagaagcctgcgatgtcggtttccgcgaggtgcggattgaaaatggtctgctgctgctgaacggcaagccgttgctgattcgaggcgttaaccgtcacgagcatcatcctctgcatggtcaggtcatggatgagcagacgatggtgcaggatatcctgctgatgaagcagaacaactttaacgccgtgcgctgttcgcattatccgaaccatccgctgtggtacacgctgtgcgaccgctacggcctgtatgtggtggatgaagccaatattgaaacccacggcatggtgccaatgaatcgtctgaccgatgatccgcgctggctaccggcgatgagcgaacgcgtaacgcgaatggtgcagcgcgatcgtaatcacccgagtgtgatcatctggtcgctggggaatgaatcaggccacggcgctaatcacgacgcgctgtatcgctggatcaaatctgtcgatccttcccgcccggtgcagtatgaaggcggcggagccgacaccacggccaccgatattatttgcccgatgtacgcgcgcgtggatgaagaccagcccttcccggctgtgccgaaatggtccatcaaaaaatggctttcgctacctggagagacgcgcccgctgatcctttgcgaatacgcccacgcgatgggtaacagtcttggcggtttcgctaaatactggcaggcgtttcgtcagtatccccgtttacagggcggcttcgtctgggactgggtggatcagtcgctgattaaatatgatgaaaacggcaacccgtggtcggcttacggcggtgattttggcgatacgccgaacgatcgccagttctgtatgaacggtctggtctttgccgaccgcacgccgcatccagcgctgacggaagcaaaacaccagcagcagtttttccagttccgtttatccgggcaaaccatcgaagtgaccagcgaatacctgttccgtcatagcgataacgagctcctgcactggatggtggcgctggatggtaagccgctggcaagcggtgaagtgcctctggatgtcgctccacaaggtaaacagttgattgaactgcctgaactaccgcagccggagagcgccgggcaactctggctcacagtacgcgtagtgcaaccgaacgcgaccgcatggtcagaagccgggcacatcagcgcctggcagcagtggcgtctggcggaaaacctcagtgtgacgctccccgccgcgtcccacgccatcccgcatctgaccaccagcgaaatggatttttgcatcgagctgggtaataagcgttggcaatttaaccgccagtcaggctttctttcacagatgtggattggcgataaaaaacaactgctgacgccgctgcgcgatcagttcacccgtgcaccgctggataacgacattggcgtaagtgaagcgacccgcattgaccctaacgcctgggtcgaacgctggaaggcggcgggccattaccaggccgaagcagcgttgttgcagtgcacggcagatacacttgctgatgcggtgctgattacgaccgctcacgcgtggcagcatcaggggaaaaccttatttatcagccggaaaacctaccggattgatggtagtggtcaaatggcgattaccgttgatgttgaagtggcgagcgatacaccgcatccggcgcggattggcctgaactgccagctggcgcaggtagcagagcgggtaaactggctcggattagggccgcaagaaaactatcccgaccgccttactgccgcctgttttgaccgctgggatctgccattgtcagacatgtataccccgtacgtcttcccgagcgaaaacggtctgcgctgcgggacgcgcgaattgaattatggcccacaccagtggcgcggcgacttccagttcaacatcagccgctacagtcaacagcaactgatggaaaccagccatcgccatctgctgcacgcggaagaaggcacatggctgaatatcgacggtttccatatggggattggtggcgacgactcctggagcccgtcagtatcggcggaattccagctgagcgccggtcgctaccattaccagttggtctggtgtcaaaaataataataaccgggcaggggggatccaattctgtgagcgtatggcaaacgaaggaaaaatagttatagtagccgcactcgatgggacatttcaacgtaaaccgtttaataatattttgaatcttattccattatctgaaatggtggtaaaactaactgctgtgtgtatgaaatgctttaaggaggcttccttttctaaacgattgggtgaggaaaccgagatagaaataataggaggtaatgatatgtatcaatcggtgtgtagaaagtgttacatcgactcataatattatattttttatctaaaaaactaaaaataaacattgattaaattttaatataatacttaaaaatggatgttgtgtcgttagataaaccgtttatgtattttgaggaaattgataatgagttagattacgaaccagaaagtgcaaatgaggtcgcaaaaaaactgccgtatcaaggacagttaaaactattactaggagaattattttttcttagtaagttacagcgacacggtatattagatggtgccaccgtagtgtatataggatctgctcccggtacacatatacgttatttgagagatcatttctataatttaggagtgatcatcaaatggatgctaattgacggccgccatcatgatcctattttaaatggattgcgtgatgtgactctagtgactcggttcgttgatgaggaatatctacgatccatcaaaaaacaactgcatccttctaagattattttaatttctgatgtgagatccaaacgaggaggaaatgaacctagtacggcggatttactaagtaattacgctctacaaaatgtcatgattagtattttaaaccccgtggcgtctagtcttaaatggagatgcccgtttccagatcaatggatcaaggacttttatatcccacacggtaataaaatgttacaaccttttgctccttcatattcagctgaaatgagattattaagtatttataccggtgagaacatgagactgactcgagttaccaaattagacgctgtaaattatgaaaaaaagatgtactaccttaataagatcgtccgtaacaaagtagttgttaactttgattatcctaatcaggaatatgactattttcacatgtactttatgctgaggaccgtgtactgcaataaaacatttcctactactaaagcaaaggtactatttctacaacaatctatatttcgtttcttaaatattccaacaacatcaactgaaaaagttagtcatgaaccaatacaacgtaaaatatctagcaaaaattctatgtctaaaaacagaaatagcaagagatccgtacgcggtaataaatagaaacgtactactgagatatactaccgatatagagtataatgatttagttactttaataaccgttagacataaaattgattctatgaaaactgtgtttcaggtatttaacgaatcatccataaattatactccggttgatgatgattatggagaaccaatcattataacatcgtatcttcaaaaaggtcataacaagtttcctgtaaattttctatacatagatgtggtaatatctgacttatttcctagctttgttagactagatactacagaaactaatatagttaatagtgtactacaaacaggcgatggtaaaaagactcttcgtcttcccaaaatgttagagacggaaatagttgtcaagattctctatcgccctaatataccattaaaaattgttagatttttccgcaataacatggtaactggagtagagatagccgatagatctgttatttcagtcgctgattaatcaattagtagagatgagataagaacattataataatcaataatatatcttatatcttatatcttatatcttatatcttgtttagaaaaatgctaatattaaaatagctaacgctagtaatccaatcggaagccatttgatatctataatagggtatctaatttcctgatttaaatagcggacagctatattctcggtagctactcgtttggaatcacaaacattatttacatctaatttactatctgtaatggaaacgtttcccaatgaaatggtacaatccgatacattgcattttgttatatttttttttaaagaggctggtaacaacgcatcgcttcgtttacatggctcgtaccaacaataatagggtaatcttgtatctattcctatccgtactatgcttttatcaggataaatacatttacatcgtatatcgtctttgttagcatcacagaatgcataaatttgttcgtccgtcatgataaaaatttaaagtgtaaatataactattatttttatagttgtaataaaaagggaaatttgattgtatactttcggttctttaaaagaaactgacttgataaaaatggctgtaatctctaaggttacgtatagtctatatgatcaaaaagagattaatgctacagatattatcattagtcatgttaaaaatgacgacgatatcggtaccgttaaagatggtagactaggtgctatggatggggcattatgtaagacttgtgggaaaacggaattggaatgtttcggtcactggggtaaagtaagtatttataaaactcatatagttaagcctgaatttatttcagaaattattcgtttactgaatcatatatgtattcactgcggattattgcgttcacgagaaccgtattccgacgatattaacctaaaagagttatcgggacacgctcttaggagattaaaggataaaatattatccaagaaaaagtcatgttggaacagtgaatgtatgcaaccgtatcaaaaaattactttttcaaagaaaaaggtttgtttcgtcaacaagttggatgatattaacgttcctaattctctcatctatcaaaagttaatttctattcatgaaaagttttggccattattagaaattcatcaatatccagctaacttattttatacagactactttcccatccctccgttgattattagaccggctattagtttttggatagatagtatacccaaagagaccaatgaattaacttacttattaggtatgatcgttaagaattgtaacttgaatgctgatgaacaggttatccagaaggcggtaatagaatacgatgatattaaaattatttctaataacactaccagtatcaatttatcatatattacatccggcaaaaataatatgattagaagttatatcgtcgcccgacgaaaagatcagaccgctagatctgtaattggtcccagtacatctatcaccgttaatgaggtaggaatgcccgcatatattagaaatacacttacagaaaagatatttgttaatgcctttacagtggataaagttaaacaactattagcgtcaaaccaagttaaattttactttaataaacgattaaaccaattaacaagaatacgccaaggaaagtttattaaaaataaaatacatttattgcctggtgattgggtagaagtagctgttcaagaatatacaagtattatttttggaagacagccgtctctacatagatacaacgtcatcgcttcatctatcagagctaccgaaggagatactatcaaaatatctcccggaattgccaactctcaaaatgctgatttcgacggggatgaggaatggatgatattagaacaaaatcctaaagctgtaattgaacaaagtattcttatgtatccgacgacgttactcaaacacgatattcatggagcccccgtttatggatctattcaagatgaaatcgtagcagcgtattcattgtttaggatacaagatctttgtttagatgaagtattgaacatcttggggaaatatggaagagagttcgatcctaaaggtaaatgtaaattcagcggtaaagatatctatacttacttgataggtgaaaagattaattatccgggtctcttaaaggatggtgaaattattgcaaacgacgtagatagtaattttgttgtggctatgaggcatctgtcattggctggactcttatccgatcataagtcgaacgtggaaggtatcaactttattatcaagtcatcttatgtttttaagagatatctatctatttacggttttggggtgacattcaaagatctgagaccaaattcgacgttcactaataaattggaggccatcaacgtagaaaaaatagaacttatcaaagaagcatacgccaaatatctcaacgatgtaagagacgggaaaatagttccattatctaaagctttagaggcggactatgtggaatccatgttatccaacttgacaaatcttaatatccgagagatagaagaacatatgagacaaacgctgatagatgatccagataataacctcctgaaaatggccaaagcgggttataaagtaaatcccacagaactaatgtatattctaggtacgtatggacaacaaaggattgatggtgaaccagcagagactcgagtattgggtagagttttaccttactatcttccagactctaaggatccagaaggaagaggttacattcttaattctttaacaaaaggattaacgggttctcaatattacttttcgatgctggttgccagatctcaatctactgatatcgtctgtgaaacatcacgtaccggaacactggctagaaaaatcattaaaaagatggaggatatggtggtcgacggatacggacaagtagttataggtaatacgctcatcaagtacgccgccaattataccaaaattctaggctcagtatgtaaacctgtagatcttatctatccagatgagtccatgacttggtatttggaaattagtgctctgtggaataaaataaaacagggattcgtttactctcagaaacagaaacttgcaaagaagacattggcgccgtttaatttcctagtattcgtcaaacccaccactgaggataatgctattaaggttaaggatctgtacgatatgattcataacgtcattgatgatgtgagagagaaatacttctttacggtatctaatatagattttatggagtatatattcttgacgcatcttaatccttctagaattagaattacaaaagaaacggctatcactatctttgaaaagttctatgaaaaactcaattatactctaggtggtggaactcctattggaattatttctgcacaggtattgtctgagaagtttacacaacaagccctgtccagttttcacactactgaaaaaagtggtgccgtcaaacaaaaacttggtttcaacgagtttaataacttgactaatttgagtaagaataagaccgaaattatcactctggtatccgatgatatctctaaacttcaatctgttaagattaatttcgaatttgtatgtttgggagaattaaatccaaacatcactcttcgaaaagaaacagataaatatgtagtagatataatagtcaatagattatacatcaagagagcagaaataaccgaattagtcgtcgaatatatgattgaacgatttatctcctttagcgtcattgtaaaggaatggggtatggagacattcattgaggacgaggataatattagatttactgtctacctaaatttcgttgaaccggaagaattgaatcttagtaagtttatgatggttcttccgggggcagccaacaagggaaagattagtaaattcaagattcctatctctgattatacgggatatgacgacttcaatcaaacaaaaaagctcaataagatgactgtagaactcatgaatctaaaagaattgggttctttcgatttggaaaacgtcaacgtgtatcctggagtatggaatacatacgatatcttcggtatcgaggccgctcgtgaatacttgtgcgaagccatgttaaacacctatggagaagggttcgattatctgtatcagccttgtgatcttctcgctagtttactatgtgctagttacgaaccagaatcagtgaataaattcaagttcggcgcagctagtactcttaagagagctacgttcggagacaataaagcattgttaaacgcggctcttcataaaaagtcagaacctattaacgataatagtagctgccacttttttagcaaggtccctaatataggaactggatattacaaatactttatcgacttgggtcttctcatgagaatggaaaggaaactatctgataagatatcttctcaaaagatcaaggaaatggaagaaacagaagacttttaattcttatcaataacatatttttctatgatctgtcttttaaacgatggattttccacaaatgcgcctctcaagtccctcatagaatgatacacgtataaaaaatatagcataggcaatgactccttatttttagacattagatatgccaaaatcatagccccgcttctatttactcccgcagcacaatgaaccaacacgggctcgtttcgttgatcacatttagataaaaaggcggttacgtcgtcaaaatatttactaatatcggtagttgtatcatctaccaacggtatatgaataatattaatattagagttaggtaatgtatatttatccatcgtcaaatttaaaacatatttgaacttaacttcagatgatggtgcatccatagcatttttataatttcccaaatacacattattggttacccttgtcattatagtgggagatttggctttgtgcatatctccagttgaacgtagtagtaagtatttatacaaacttttcttatccatttataacgtacaaatggataaaactactttatcggtaaacgcgtgtaatttagaatacgttagagaaaaggctatagtaggcgtacaagcagccaaaacatcaacacttatattctttgttattatattggcaattagtgcgctattactctggtttcagacgtctgataatccagtctttaatgaattaacgagatatatgcgaattaaaaatacggttaacgattggaaatcattaacggatagcaaaacaaaattagaaagtgatagaggtagacttctagccgctggtaaggatgatatatttgaattcaaatgtgtggatttcggcgcctattttatagctatgcgattggataagaaaacatatctgccgcaagctattaggcgaggtactggagacgcgtggatggttaaaaaggcggcaaaggtcgatccatctgctcaacaattttgtcagtatttgataaaacacaagtctaataatgttattacttgtggtaatgagatgttaaatgaattaggttatagcggttattttatgtcaccgcattggtgttccgattttagtaatatggaatagtgttagataaatgcggtaacgaatgttcctgtaaggaaccataacagcttagatttaacgttaaagatgagcataaacataataaacaaaattacaatcaaacttataacattaatatcaaacaatccaaaaaatgaaatcagtggagtagtaaacgcgtacataactcctggataacgtttagcagctgccgttcctattctagaccaaaaattcggtttcatgttttcgaaacggtattctgcaacaagtcgaggatcgtgttctacatatttggcggcattatccagtatctgcctattgatcttcatttcgttttcgattctggctatttcaaaataaaatcccgatgatagacctccagactttataatttcatctacgatgttcagcgccgtagtaactctaataatataggctgataagctaacatcataccctcctgtatatgtgaatatggcatgatttttgtccattacaagctcggttttaactttattgcctgtaataatttctctcatctgtaggatatctatttttttgtcatgcattgccttcaagacgggacgaagaaacgtaatatcctcaataacgttatcgttttctacaataactacatattctacctttttattttctaactcggtaaaaaaattagaatcccatagggctaaatgtctagcgatatttcttttcgtttcctctgtacacatagtgttacaaaaccctgaaaagaagtgagtatacttgtcatcatttctaatgtttcctccagtccactgtataaacgcataatccttgtaatgatctggatcatccttgactaccacaacatttcttttttctggcataacttcgttgtcctttacatcatcgaacttctgatcattaatatgctcatgaacattaggaaatgtttctgatggaggtctatcaataactggcacaacaataacaggagttttcaccgccgccatttagttattgaaattaatcatatacaactctttaatacgagttatattttcgtctatccattgtttcacattgacatatttcgacaaaaagatataaaatgcgtattccaatgcttctctgtttaatgaattactaaaatatacaaacacgtcactgtctggcaataaatgatatcttagaatattgtaacaatttattttgtattgcacatgttcgtgatctatgagttcttcttcgaatggcataggatctccgaatctgaaaacgtataaataggagttagaataataatatttgagagtattggtaatatataaactctttagcggtataattagtttttttctctcaatttctatttttagatgtgatggaaaaatgactaattttgtagcattagtatcatgaactctaatcaaaatcttaatatcttcgtcacacgttagctctttgaagtttttaagagatgcatcagttggttctacagatggagtaggtgcaacaattttttgttctacacatgtatgtactggagccattgttttaactataatggtgcttgtatcgaaaaactttaatgcagatagcggaagctcttcgccgcgactttctacgtcgtaattgggttctaacgccgatctctgaatggatactagttttctaagttctaatgtgattctctgaaaatgtaaatccaattcctccggcattatagatgtgtatacatcggtaaataaaactatagtatccaacgatcccttctcgcaaattctagtcttaaccaaaaaatcgtatataaccacggagatggcgtatttaagagtggattcttctaccgttttgttcttggatgtcatataggaaactataaagtccgcactactgttaagaatgattactaacgcaactatatagtttaaattaagcattttggaaacataaaataactctgtagacgatacttgactttcgaataagtttgcagacaaacgaagaaagaacagacctctcttaatttcagaagaaaactttttttcgtattcctgacgtctagagtttatatcaataagaaagttaagaattagtcggttaatgttgtatttcattacccaagtttgagatttcataatattatcaaaagacatgataatattaaagataaagcgctgactatgaacgaaatagctatatggttcgctcaagaatatagtcttgttaaacgtggaaacgataactgtatttttaatcacgtcagcggcatctaaattaaatataggtatatttattccacacactctacaatatgccacaccatcttcataataaataaattcgttagcaaaattattaattttagtgaaatagttagcgtcaactttcatagcttccttcaatctaatttgatgctcacacggtgcgaattccactctaacatcccttttccatgcctcaggttcatcgatctctataatatctagttttttgcgtttcacaaacacaggctcgtctctcgcgatgagatctgtatagtaactatgtaaatgataactagatagaaagatgtagctatatagatgacgatcctttaagagaggtataataactttaccccaatcagatagactgttgttatggtcttcggaaaaagaatttttataaatttttccagtattttccaaatatacgtacttaacatctaaaaaatccttaatgataataggaatggataatccgtctattttataaagaaatacatatcgcacattatacttttttttggaaatgggaataccgatgtgtctacataaatatgcaaagtctaaatattttttagagaatcttagttggtccaaattcttttccaagtacggtaatagatttttcatattgaacggtatcttcttaatctctggttctagttccgcattaaatgatgaaactaagtcactatttttataactaacgattacatcacctctaacatcatcatttaccagaatactgatcttcttttgtcgtaaatacatgtctaatgtgttaaaaaaaagatcatacaagttatacgtcatttcatctgtggtattcttgtcattgaaggataaactcgtactaatctcttctttaacagcctgttcaaatttatatcctatatacgaaaaaatagcaaccagtgtttgatcatccgcgtcaatattctgttctatcgtagtgtataacaatcgtatatcttcttctgtgatagtcgatacgttataaaggttgataacgaaaatatttttatttcgtgaaataaagtcatcgtaggattttggacttatattcgcgtctagtagatatgcttttatttttggaatgatctcaattagaatagtctctttagagtccatttaaagttacaaacaactaggaaattggtttatgatgtataatttttttagtttttatagattctttattctatacttaaaaaatgaaaataaatacaaaggttcttgagggttgtgttaaattgaaagcgagaaataatcataaattatttcattatcgcgatatccgttaagtttgtatcgtaatggcgtggtcaattacgaataaagcggatactagtagcttcacaaagatggctgaaatcagagctcatctaaaaaatagcgctgaaaataaagataaaaacgaggatattttcccggaagatgtaataattccatctactaagcccaaaaccaaacgagccactactcctcgtaaaccagcggctactaaaagatcaaccaaaaaggaggaagtggaagaagaagtagttatagaggaatatcatcaaacaactgaaaaaaattctccatctcctggagtcagcgacattgtagaaagcgtggccgctgtagagctcgatgatagcgacggggatgatgaacctatggtacaagttgaagctggtaaagtaaatcatagtgctagaagcgatctctctgacctaaaggtggctaccgacaatatcgttaaagatcttaagaaaattattactagaatctctgcagtatcgacggttctagaggatgttcaagcagctggtatctctagacaatttacttctatgactaaagctattacaacactatctgatctagtcaccgagggaaaatctaaagttgttcgtaaaaaagttaaaacttgtaagaagtaaatgcgtgcacttttttataaagatggtaaactctttaccgataataattttttaaatcctgtatcagacgataatccagcgtatgaggttttgcaacatgttaaaattcctactcatttaacagatgtagtagtatatgaacaaacgtgggaggaggcgttaactagattaatttttgtgggaagtgattcaaaaggacgtagacaatacttttacggaaaaatgcatgtacagaatcgcaacgctaaaagagatcgtatttttgttagagtatataacgttatgaaacgaattaattgttttataaacaaaaatataaagaaatcgtccacagattccaattatcagttggcggtttttatgttaatggaaactatgttttttattagatttggtaaaatgaaatatcttaaggagaatgaaacagtagggttattaacactaaaaaataaacacatagaaataagtcccgatgaaatagttatcaagtttgtaggaaaggacaaagtttcacatgaatttgttgttcataagtctaatagactatataaaccgctattgaaactgacggatgattctagtcccgaagaatttctgttcaacaaactaagtgaacgaaaggtatacgaatgtatcaaacagtttggtattagaatcaaggatctccgaacgtatggagtcaattatacgtttttatataatttttggacaaatgtaaagtccatatctcctcttccgtcaccaaaaaagttaatagcattaactatcaaacaaactgctgaagtggtaggtcatactccatcaatttcaaaaagagcttatatggcaacgactattttagaaatggtaaaggataaaaattttttagatgtagtatctaaaactacgttcgatgaattcctatctatagtcgtagatcacgttaaatcatctacggatggatgatatagatctttacacaaataattacaagaccgataaatggaaatggataagcgtatgaaatctctcgcaatgacagctttcttcggagagctaagcacattagatattatggcattgataatgtctatatttaaacgccatccaaacaataccattttttcagtggataaggatggtcagtttatgattgatttcgaatacgataattataaggcttctcaatatttggatctgaccctcactccgatatctggagatgaatgcaagactcacgcatcgagtatagccgaacaattggcgtgtgcggatattattaaagaggatattagcgaatatatcaaaactactccccgtcttaaacgatttataaaaaaataccgcaatagatcagatactcgtatcagtcgagatacagaaaagcttaaaatagctctagctaaaggcatagattacgaatatataaaagacgcttgttaataagtaaatgaaaaaaaactagtcgtttataataaaacacgatatggatgccaacgtagtatcattttctactattgcgacgtatatagacgctttagcgaagaatgcttcggaattagaacagaggtctaccgcatacgaaataaataatgaattggaactagtatttattaagccgccattgattactttgacaaatgtagtgaatatctctacgattcaggaatcgtttattcgatttaccgttactaataaggaaggtgttaaaattagaactaagattccattatctaaggtacatggtctagatgtaaaaaatgtacagttagtagatgctatagataacatagtttgggaaaagaaatcattagtgacggaaaatcgtcttcacaaagaatgcttgttgagactatcgacagaggaacgtcatatatttttggattacaagaaatatggatcctctatccgactagaattagtcaatcttattcaagcaaaaacaaaaaactttacgatagactttaagctaaaatattttctaggatccggtgcccagtctaaaagttctttgttgcacgctattaatcatccaaagtcaaggcctaatacatctctggaaatagaattcacacctagagacaatgaaacagttccatatgatgaactaataaaggaattgacgactctctcgcgtcatatatttatggcttctccagagaatgtaattctttctccgcctattaacgcgcctataaaaacctttatgttgcctaaacaagatatagtaggtttggatctggaaaatctatatgccgtaactaagactgacggcattcctataactatcagagttacatcaaacgggttgtattgttattttacacatcttggttatattattagatatcctgttaagagaataatagattccgaagtagtagtctttggtgaggcagttaaggataagaactggaccgtatatctcattaagctaatagagcctgtgaatgcaatcaatgatagactagaagaaagtaagtatgttgaatctaaactagtggatatttgtgatcggatagtattcaagtcaaagaaatacgaaggtccgtttactacaactagtgaagtcgtcgatatgttatctacatatttaccaaagcaaccagaaggtgttattctgttctattcaaagggacctaaatctaacattgattttaaaattaaaaaggaaaatactatagaccaaactgcaaatgtagtatttaggtacatgtccagtgaaccaattatctttggagaatcgtctatctttgtagagtataagaaatttagcaacgataaaggctttcctaaagaatatggttctggtaagattgtgttatataacggcgttaattatctaaataatatctattgtttggaatatattaatacacataatgaagtgggtattaagtccgtggttgtacctattaagtttatagcagaattcttagttaatggagaaatacttaaacctagaattgataaaaccatgaaatatattaactcagaagattattatggaaatcaacataatatcatagtcgaacatttaagagatcaaagcatcaaaataggagatatctttaacgaggataaactatcggatgtgggacatcaatacgccaataatgataaatttagattaaatccagaagttagttattttacgaataaacgaactagaggaccgttgggaattttatcaaactacgtcaagactcttcttatttctatgtattgttccaaaacatttttagacgattccaacaaacgaaaggtattggcgattgattttggaaacggtgctgacctggaaaaatacttttatggagagattgcgttattggtagcgacggatccggatgctgatgctatagctagaggaaatgaaagatacaacaaattaaactctggaattaaaaccaagtactacaaatttgactacattcaggaaactattcgatccgatacatttgtctctagtgtcagagaagtattctattttggaaagtttaatatcatcgactggcagtttgctatccattattcttttcatccgagacattatgctaccgtcatgaataacttatccgaactaactgcttctggaggcaaggtattaatcactaccatggacggagacaaattatcaaaattaacagataaaaagacttttataattcataagaatttacctagtagcgaaaactatatgtctgtagaaaaaatagctgatgatagaatagtggtatataatccatcaacaatgtctactccaatgactgaatacattatcaaaaagaacgatatagtcagagtgtttaacgaatacggatttgttcttgtagataacgttgatttcgctacaattatagaacgaagtaaaaagtttattaatggcgcatctacaatggaagatagaccgtctacaaaaaactttttcgaactaaatagaggagccattaaatgtgaaggtttagatgtcgaagacttacttagttactatgttgtttatgtcttttctaagcggtaaataataatatggtatgggttctgatctcccagttctaaatgcattaaataattccaatagagcgatttttgttcctataggaccttccaactgtggatactctgtattgttaatagatatattaatacttttgtcgggtaacagaggttctacgtcttctaaaaataaaagttttataacatctggcctgttcataaataaaaacttggcgattctatatatactcttattatcaaatctagccattgtcttatagatgtgagctactgtaggtgtaccatttgattttctttctaatactatatatttctctcgaagaagttcttgcacatcatctgggaataaaatactactgttgagtaaatcagttattttttttatatcgatattgatggacatttttatagttaaggataataagtatcccaaagtcgataacgacgataacgaagtatttatacttttaggaaatcacaatgactttatcagattaaaattaacaaaattaaaggagcatgtatttttttctgaatatattgtgactccagatacatatggatctttatgcgtcgaattaaatgggtctagttttcagcacggcggtagatatatagaggtggaggaatttatagatgctggaagacaagttagatggtgttctacatccaatcatatatctaaagatatacccgaagatatgcacactgataaatttgtcatttatgatatttatacgtttgattcgttcaagaataaacgattggtattcgtacaggtacctccgtcgttaggagatgatagtcatttgactaatccgttattgtcaccgtattatcgtaattcagtagccagacaaatggtcaatgatatgatttttaatcaagattcatttttaaaatatttattagaacatctgattagaagccactatagagtttctaaacatataacaatagttagatacaaggataccgaagaattaaatctaacgagaatatgttataatagagataagtttaaggcgtttgtattcgcttggtttaacggcgtttcggaaaatgaaaaggtactagatacgtataaaaaggtatctaatttgatataatgaattcagtgactgtatcacacgcgccatatactattacttatcacgatgattgggaaccagtaatgagtcaattggtagagttttataacgaagtagccagttggctgctacgagacgagacgtcgcctattcctgataagttctttatacagttgaaacaaccgcttagaaataaacgagtatgtgtgtgtggtatagatccgtatccgaaagatggaactggtgtaccgttcgaatcaccaaattttacaaaaaaatcaattaaggagatagcttcatctatatctagattaaccggagtaattgattataaaggttataaccttaatataatagacggggttataccctggaattattacttaagttgtaaattaggagaaacaaaaagtcacgcgatttactgggataagatttccaagttactgctgcagcatataactaaacacgttagtgttctttattgtttgggtaaaacagatttctcgaatatacgggccaagttagaatccccggtaactaccatagtcggatatcatccagcggctagagaccgccaattcgagaaagatagatcatttgaaattatcaacgttttactggaattagacaacaaggcacctataaattgggctcaagggtttatttattaatgctttagtgaaattttaacttgtgttctaaatggatgcggctattagaggtaatgatgttatctttgttcttaagactataggtgtcccgtcagcgtgcagacaaaatgaagatccaagatttgtagaagcatttaaatgcgacgagttagaaagatatattgagaataatccagaatgtacactattcgaaagtcttagggatgaggaagcatactctatagtcagaattttcatggatgtagatttagacgcgtgtctagacgaaatagattatttaacggccattcaagattttattatcgaggtgtcaaactgtgtagctagattcgcgtttacagaatgcggcgccattcatgaaaatgtaataaaatccatgagatctaatttttcattgactaagtctacaaatagagataaaacaagttttcatattatctttttagatacgtataccactatggatacattgatagctatgaaacgaacactattagaattaagtagatcatctgaaaatccactaaccagatcgatagacactgccgtatataggagaaaaacaactcttcgggttgtaggtactaggaaaaatccaaattgcgacactattcatgtaatgcaaccaccgcatgataatatagaagattacctattcacttacgtggatatgaacaacaatagttattacttttctctacaacaacgattggaggatttagttcctgataagttatgggaaccagggtttatttcattcgaagacgctataaaaagagtttcaaaaatattcattaattctataataaactttaatgatctcgatgaaaataattttacaacggtaccactggtcatagattacgtaacaccttgtgcattatgtaaaaaacgatcgcataaacatccgcatcaactatcgttggaaaatggtgctattagaatttacaaaactggtaatccacatagttgtaaagttaaaattgttccgttggatggtaataaactgtttaatattgcacaaagaattttagacactaactctgttttattaaccgaacgaggagaccatatagtttggattaataattcatggaaatttaacagcgaagaacccttgataacaaaactaattttgtcaataagacatcaactacctaaggaatattcaagcgaattactctgtccaagaaaacgaaagactgtagaagctaacatacgagacatgttagtagattcagtggagaccgatacctatccggataaacttccgtttaaaaatggtgtattggacctggtagacggaatgttttactctggagatgatgctaaaaaatatacgtgtactgtatcaaccggatttaaatttgacgatacaaagttcgtcgaagacagtccagaaatggaagagttaatgaatatcattaacgatatccaaccattaacggatgaaaataagaaaaatagagagctatatgaaaaaacattatctagttgtttatgcggtgctaccaaaggatgtttaacattcttttttggagaaactgcaactggaaagtcgacaaccaaacgtttgttaaagtctgctatcggtgacctgtttgttgagacgggtcaaacaattttaacagatgtattggataaaggacctaatccatttatcgctaacatgcatttgaaaagatctgtattctgtagcgaactacctgattttgcctgtagtggatcaaagaaaattagatctgacaatattaaaaagttgacagaaccttgtgtcattggaagaccgtgtttctccaataaaattaataatagaaaccatgcgacaatcattatcgatactaattacaaacctgtttttgataggatagataacgcattaatgagaagaattgccgtcgtgcgattcagaacacacttttctcaaccttctggtagagaggctgctgaaaataatgacgcgtacgataaagtcaaactattagacgaggggttagatggtaaaatacaaaataatatatatagatttgcatttctatacttgttggtgaaatggtacaaaaaatatcatgttcctattatgaaactatatcctacacccgaagagattcctgactttgcattctatctcaaaataggtactctgttggtatctagctctgtaaagcatattccattaatgacggacctctccaaaaagggatatatattgtacgataatgtggtcactcttccgttgactactttccaacagaaaatatccaagtattttaattctagactatttggacacgatatagagagcttcatcaatagacataagaaatttgccaatgttagtgatgaatatctgcaatatatattcatagaggatatttcatctccgtaaatatatgctcatatatttatagaagatatcacatatctaaatgaataccggaatcatagatttatttgataatcatgttgatagtataccaactatattacctcatcagttagctactctagattatctagttagaactatcatagatgagaacagaagcgtgttattgttccatattatgggatcaggtaaaacaataatcgctttgttgttcgccttggtagcttccagatttaaaaaggtttacattctagtgccgaacatcaacatcttaaaaattttcaattataatatgggtgtagctatgaacttgtttaatgacgaattcatagctgagaatatctttattcattccacaacaagtttttattctcttaattataacgataacgtcattaattataacggattatctcgctacaataactctatttttatcgttgatgaggcacataatatctttgggaataatactggagaacttatgaccgtgataaaaaataaaaacaagattccttttttactattgtctggatctcccattactaacacacctaatactctgggtcatattatagatttaatgtccgaagagacgatagattttggtgaaattattagtcgtggtaagaaagtaattcagacacttcttaacgaacgcggtgtgaatgtacttaaggatttgcttaaaggaagaatatcatattacgaaatgcctgataaagatctaccaacgataagatatcacggacgtaagtttctagatactagagtagtatattgtcacatgtctaaacttcaagagagagattatatgattactagacgacagctatgttatcatgaaatgtttgataaaaatatgtataacgtgtcaatggcagtattgggacaacttaatctgatgaataatttagatactttatttcaggaacaggataaggaattgtacccaaatctgaaaataaataatggcgtgttatacggagaagaattggtaacgttaaacattagttccaaatttaaatactttattaatcggatacagacactcaacggaaaacattttatatacttttctaattctacatatggcggattggtaattaaatatatcatgctcagtaatggatattctgaatataatggttctcagggaactaatccacatatgataaacggcaaaccaaaaacatttgctatcgttactagtaaaatgaaatcgtctttagaggatctattagatgtgtataattctcctgaaaacgatgatggtagtcaattgatgtttttgttttcatcaaacattatgtccgaatcctatactctaaaagaggtaaggcatatttggtttatgactatcccagatactttttctcaatacaaccaaattcttggacgatctattagaaaattctcttacgccgatatttctgaaccagttaatgtatatcttttagccgccgtatattccgatttcaatgacgaagtgacgtcattaaacgattacacacaggatgaattaattaatgttttaccatttgacatcaaaaagctgttgtatctaaaatttaagacgaaagaaacgaatagaatatactctattcttcaagagatgtctgaaacgtattctcttccaccacatccatcaattgtaaaagttttattgggagaattggtcagacaatttttttataataattctcgtattaagtataacgataccaagttacttaaaatggttacatcagttataaaaaataaagaagacgctaggaattacatagatgatattgtaaacggtcacttctttgtatcgaataaagtatttgataaatctcttttatacaaatacgaaaacgatattattacagtaccgtttagactttcctacgaaccatttgtttggggagttaactttcgtaaagaatataacgtggtatcttctccataaaactgatgagatatataaagaaataaatgtcgagctttgttaccaatggatacctttccgttacattggaaccacacgagctgacgttagacataaaaactaatattaggaatgccgtatataagacgtatctccatagagaaattagtggtaaaatggccaagaaaatagaaattcgtgaagacgtggaattacctctcggcgaaatagttaataattctgtagttataaacgttccgtgtgtaataacctacgcgtattatcacgttggggatatagtcagaggaacattaaacatcgaagatgaatcaaatgtaactattcaatgtggagatttaatctgtaaactaagtagagattcgggtactgtatcatttagcgattcaaagtactgcttttttcgaaatggtaatgcgtatgacaatggcagcgaagtcactgccgttctaatggaggctcaacaaggtatcgaatctagttttgtttttctcgcgaatatcgtcgactcataaaaaagagaatagcggtaagtataaacacgaatactatggcaataattgcgaatgttttattctcttcgatatatttttgataatatgaaaaacatgtctctctcaaatcggacaaccatctcataaaatagttctcgcgcgctggagaggtagttgccgctcgtataatctctccagaataatatacttgcgtgtcgtcgttcaatttatacggatttctatagttctctgttatataatgcggtttgccctcatgattagacgacgacaatagtgttctaaatttagatagttgatcagaatgaatgtttattggcgttggaaaaattatccatacagcgtctgcagagtggttgatagttgttcctagatatgtaaaataatccaacttactaggcagcaaattgtctagataaaatactgaatcaaacggtgcagacgtattggcggatctaatggaatccaattgattaactatcttttgaaaatatacatttttatgatccaatacttgtaagaatatagaaataatgataagtccatcatcgtgtttttttgcctcttcataagaactatattttttcttattccaatgaacaagattaatctctccagagtatttgtacacatctatcaagtgattggatccataatcgtcttcctttccccaatatatatgtagtgatgataacacatattcattggggagaaaccctccacttatatatcctcctttaaaattaatccttactagttttccagtgttctggatagtggttggtttcgactcattataatgtatgtctaacggcttcaatcgcgcgttagaaattgcttttttagtttctatattaataggagatagttgttgcggcatagtaaaaatgaaatgataactgtttaaaaatagctcttagtatgggaattacaatggatgaggaagtgatatttgaaactcctagagaattaatatctattaaacgaataaaagatattccaagatcaaaagacacgcatgtgtttgctgcgtgtataacaagtgacggatatccgttaataggagctagaagaacttcattcgcgttccaggcgatattatctcaacaaaattcagattctatctttagagtatccactaaactattacggtttatgtactacaatgaactaagagaaatctttagacggttgagaaaaggttctatcaacaatatcgatcctcactttgaagagttaatattattgggtggtaaactagataaaaaggaatctattaaagattgtttaagaagagaattaaaagaggaaagtgatgaacgtataacagtaaaagaatttggaaatgtaattctaaaacttacaacacgggataaattatttaataaagtatatataagttattgcatggcgtgttttattaatcaatcgttggaggatttatcgcatactagtatttacaatgtagaaattagaaagattaaatcattaaatgattgtattaacgacgataaatacgaatatctgtcttatatttataatatgctagttaatagtaaatgaacttttacagatctagtataattagtcagattattaagtataatagacgactagctaagtctattatttgcgaggatgactctcaaattattacactcacggcattcgttaaccaatgcctatggtgtcataaacgagtatccgtgtccgctattttattaactactgataacaaaatattagtatgtaacagacgagatagttttctctattctgaaataattagaactagaaacatgtttagaaagaaacgattatttctgaattattccaattatttgaacaaacaggaaagaagtatactatcgtcatttttttctctagatccagctactactgataatgatagaatagacgctatttatccgggtggcatacccaaaaggggtgagaatgttccagagtgtttatccagggaaattaaagaagaagttaatatagacaattcttttgtattcatagacactcggttttttattcatggcatcatagaagataccattattaataaattttttgaggtaatcttctttgtcggaagaatatctctaacgagtgatcaaatcattgatacatttaaaagtaatcatgaaatcaaggatctaatatttttagatccgaattcaggtaatggactccaatacgaaattgcaaaatatgctctagatactgcaaaacttaaatgttacggccatagaggatgttattatgaatcattaaaaaaattaactgaggatgattgattaaaaaatataaattaatttaccatcgtgtatttttataacgggattgtccggcatatcatgtagatagttaccgtctacatcgtatactcgaccatctacgcctttaaatcctctatttattgacattaatctattagaattggaataccaaatattagtaccctcaattagtttattggtaatattttttttagacgatagatcgatggctcttgaaaccaaggttttccaaccggactcattgtcgatcggtgagaagtctttttcattagcatgaatccattctaatgatgtatgtttaaacactctaaacaattggacaaattcttttgatttgctttgaatgatttcaaataggtcttcgtctacagtaggcataccattagataatctagccattataaagtgcacgtttacatatctacgttctggaggagtaagaacgtgactattgagacgaatggctcttcctactatctgacgaagagacgcctcgttccatgtcatatctaaaatgaagatatcattaattgagaaaaaactaataccctcgcctccactagaagagaatacgcatgttttaatgcattctccgttagtgtttgattcttggttaaactcagccaccgccttgattctagtatcttttgttctagatgagaactctatattagagataccaaagactttgaaatatagtaataagatttctattcctgactgattaacaaatggttcaaagactagacatttaccatgggatgctaatattcccaaacatacatctataaatttgacgcttttctcttttaattcagtaaatagagagatatcagccgcactagcatcccctttcaatagttctccctttttaaaggtatctaatgcggatttagaaaactctctatctcttaatgaatttttaaaatcattatatagtgttgctatctcttgcgcgtattcgcccggatcacgattttgtctttcaggaaagctatcgaacgtaaacgtagtagccatacgtctcagaattctaaatgatgatatacctgtttttatttcagcgagtttagccttttgataaatttcttcttgctttttcgacatattaacgtatcgcattaatactgttttcttagcgaatgatgcagacccttctacgtcatcaaaaatagaaaactcgttattaactatatacgaacatagtcctcctagtttggagactaattctttttcatcgactagacgtttattctcaaatagcgattggtgttgtaaggatcctggtcgtagtaagttaaccaacatggtgaattcttgcacactattgacgataggtgtagccgataaacaaatcatcttatggttttttaacgcaatggtcttagataaaaaattatatactgaacgagtaggacggatcttaccatcttctttgattaatgatttagaaatgaagttatgacattcatcaataatgacgcatattctactcttggaattaatagttttgatattagtaaaaaatttatttctaaaattttgatcatcgtaattaataaaaatacaatccttcgttatctctggagcgtatctgagtatagtgttcatccaaggatcttctatcaaagcctttttcaccaataagataatagcccaattcgtataaatatccttaagatgtttgagaatatatacagtagtcattgttttaccgacacccgtttcatggaacaataaaagagaatgcatactgtctaatcctaagaaaactcttgctacaaaatgttgataatccttgaggcgtactacgtccgaccccatcatttcaacgggcatattagtagttctgcgtaaggcataatcgatataggccgcgtgtgatttactcatttatgagtgataagtaataactatgttttaaaaatcacagcagtagtttaactagtcttctctgatgtttgttttcgatactttttgaatcagaagtcatactagaataaagcaacgagtgaacgtaatagagagcttcgtatactctattcgaaaactctaagaacttattaatgaattccgtatccactggattgtttaaaatactaaattgaacactgttcacatccttccaagaagaagacttagtgacggacttaacatgagacataaataaatccaaattttttttacaaacatcactagccaccataatggcgctatctttcaaccagctatcgcttacgcattttagcagtctaacatttttaaagagactacaatatattctcatagtatcgattacacctctaccgaataaagttggaagtttaataatacaatatttttcgtttacaaaatcaaataatggtcgaaacacgtcgaaggttaacatcttataatcgctaatgtatagattgttttcagtgagatgattattagatttaatagcatctcgttcacgtttgaacagtttattgcgtgcgctgaggtcggcaactacggcgtccgctttagtactcctcccataatactttacgctattaatctttaaaatttcatagactttatctagatcgctttctggtaacatgatatcatgtgtaaaaagttttaacatgtcggtcggcattctatttagatcattaactctagaaatctgaagaaagtaattagctccgtattccagactaggtaatgggcttttacctagagacagattaagttctggcaatgtttcataaaatggaagaaggacatgcgttccctcccggatattttttacaatttcatccatttacaactctatagtttgttttcattattattagttattatctcccataatcttggtaatacttaccccttgatcgtaagataccttatacaggtcattacatacaactaccaattgtttttgtacataatagattggatggttgacatccatggtggaataaactactcgaacagatagtttatctttccccctagatacattagccgtaatagttgtcggcctaaagaatatctttggtgtaaagttaaaagttagggttcttgttccattattgctttttgtcagtagttcattataaattctcgagatgggtccgttctctgaatatagaacatcatttccaaatctaacttctagtctagaaataatatcggtcttattcttaaaatctattcccttgatgaagggatcgttaatgaacaaatccttggcctttgattcggctgatctattatctccgttatagacgttacgttgactagtccaaagacttacaggaatagatgtatcgatgatgttgatactatgtgatatgtgagcaaagattgttctcttagtggcatcactatatgttccagtaatggcggaaaactttttagaaatgttatatataaaagaattttttcgtgttccaaacattagcagattagtatgaagataaacactcatattatcaggaacattatcaatttttacatacacatcagcatcttgaatagaaacgataccatcttctggaacctctacgatctcggcagactccggataaccagtcggtgggccatcgctaacaataactagatcatccaacaatctactcacatatgcatctatataatctttttcatcttgtgagtaccctggatacgaaataaatttattatccgtatttccataataaggtttagtataaacagagagagatgttgccgcatgaacttcagttacagtcgccgttggttggtttatttgacctattactctcctaggtttctctataaacgatggtttaatttgtacattcttaaccatatatccaataaagctcaattcaggaacataaacaaattctttgttgaacgtttcaaagtcgaacgaagagtcacgaataacgatatcggatactggattgaaggttaccgttacggtaatttttgaatcggatagtttaagactgctgaatgtatcttccacatcaaacggagttttaatataaacgtatactgtagatggttctttaatagtgtcattaggagttaggccaatagaaatatcattaagttcactagaatatccagagtgtttcaaagcaattgtattattgatacaattattatataattcttcgccctcaatttcccaaataacaccgttacacgaagagatagatacgtgattaatacatttatatccaacatatggtacgtaactgaatcttcccatacctttaacttctggaagttccaaactcagaaccaaatgattaagcgcagtaatatactgatccctaatttcgaagctagcgatagcctgattgtctggaccatcgtttgtcataactccggatagagaaatatattgcggcatatacaaagttggaatttgactatcgactgcgaagacattagaccgtttaatagagtcatccccaccgatcaaagaattaatgatagtattattcattttctatttaaaatggaaaaagcttacaataaactccgtagagaaatatctataatttgtgagttttccttaaagtaacagcttccgtaaacgccgtctttatctcttagtaggtttattgtatttatgaccttttccttatcttcatagaatactaaaggcaacaaagaaatttttggttcttctctaagagctacgtgagacttaaccatagaagccaacgaatccctacatattttagaacagaaataccctacttcaccacccttgtatgtctcaatactaataggtctaaaaaccaaatcttgattacaaaaccaacacttatcaattacactatttgtcttaatagacacatctgccatagatttataatactttggtagtatacaagcgagtgcttcttctttagcgggcttaaagactgctttaggtgctgaaataaccacatctggaaggcttactcgcttagccatttaattacggaactatttttttatacttctaatgagcaagtagaaaacctctcatctacaaaaacgtactcgtgtccataatcctctaccatagttacacgttttttagatctcatatgtgctaaaaagttttcccatactaattggttactattatttttcgtataatttttaacagtttgaggttttagatttttagttacagaagtgatatcgaatattttatccaaaaagaatgaataattaattgtcttagaaggagtgttttcttggcaaaagaataccaagtgcttaaatatttctactacttcattaatcttttctgtactcagattcagtttctcatcttttacttgattgattatttcaaagactaacttataatcctttttatttattctctcgttagccttaagaaaactagatacaaaatttgcatctacatcatccgtggatatttgatttttttccatgatatccaagagttccgagataatttctccagaacattgatgagacaataatctccgcaatacatttctcaaatgaataagtttattagacacgtggaagtttgactttttttgtacctttgtacatttttgaaataccgactcgcaaaaaatacaatattcatatccttgttcagatactataccgttatgtctacaaccgctacataatcgtagattcatgttaacactctacgtatctcgtcgtccaatattttatataaaaacattttatttctagacgttgccagaaaatcctgtaatatttttagttttttgggctgtgaataaagtatcgccctaatattgttaccgtcttccgccaatatagtagttaaattatccgcacatgcagaagaacaccgcttaggcggattcagtacaatgttatatttttcgtaccaactcatttaaatatcataatctaaaatagttctgtaatatgtctagcgctaatatattgatcataatcctgtgcataaattaagatacaacaatgtctcgaaatcatcgacatggcttcttccatagttagaagatcgtcgtcaaagttagcaacgtgattcatcaacatttgctgttttgaggcagcaaatactgaaccgtcgccattcaaccattcataaaaaccatcgtctgaatccattgataatttcttgtactggtttttgagagctcgcatcaatctagcatttctagctcccggattgaaaacagaaagaggatcgtacatccagggtccattttctgtaaatagaatcgtataatgtcccttcaagaagatatcagacgatccacaatcaaagaattggtctccgagtttgtaacaaactgcggactttaacctatacatgataccgtttagcataatttctggtgatacgtcaatcggagtatcatctattagagatctaaagccggtgtaacattctccaccaaacatattcttattctgacgtcgttctacataaaacatcattgctccattaacgataacaggggaatgaacagcactacccatcacattagttcccaatggatcaatgtgtgtaactccagaacatcttccatagcctatgttaggaggagcgaacaccactcttccactattgccatcgaatgccatagaataaatatccttggaattgatagaaatcggactgtcggatgttgtgatcatcttcataggattaacaactatgtatggtgccgcctgaagtttcatatcgtaactgatgccgtttataggtctagccacagaaaccaacgtaggtctaaatccaactatagacaaaatagaagccaatatctgttcctcatctgtcataacttgagagcatccagtatgaataatcttcattagatggggatctaccgcatcatcatcgttacaataaaaaattcccattctaatgttcataattgcttttctaatcatggtatgcatgtttgctctctgaatctctgtggaaattagatctgatacacctgtaatcactatcggattatcctccgtaagacgattaaccaacaacatataattataagactttacttttctaaattcataaagttgctggattaggctataggtgtctccatgtacatacgcgttctcgagcgcaggaagtttaataccgaatagtgccatcagaataggatgaatatagtaattagtttctggttttctataaataaaagacaaatcttgtgaactagacatatcggtaaaatgcatggattggaatcgtgtagtcgacagaagaatatgatgattagatggagagtatattttatctaactctttgagttggtcaccgattctaggactagctcgagaatgaataagtactaaaggatgagtacatttcacagaaacactagcattgttcaatgtgctctttacatgggtaaggagttgaaatagctcgtttctatttgttctgacaatatttagtttattcataatgttaagcatatcctgaatagtaaagttagatgtgtcatacttgttagtagttagatatttagcaattgcattcccatcatttctcaatctcgtactccaatcatgcgtggatgctacttcgtcgatggaaaccatacaatcctttttgataggctgttgagattgatcatttcctgcacgtttaggtttggtacgttgatttctagcccctgcggatataaagtcatcgtctacaatttgggacaatgaattgcatacactacaagacaaagatttatcagaagtgtgaatatgatcttcatctaccaaagaaagagtttgattagtataactagattttagtcctgcgttagatgttaaaaaaacatcgctattgaccacggcttccattatttatattcgtagtttttactcgaaagcgtgattttaatatccaatcttattacttttggaatcgttcaaaacctttgactagttgtagaatttgatctattgccctacgcgtatactcccttgcatcatatacgttcgtcaccagatcgtttgtttcggcctgaagttggtgcatatctctttcaacattcgacatgagatccttaagggccatatcgtctagattttgttgagatgctgctcctggatttggattttgttgtgctgttgtacatactgtaccaccagtaggtgtaggagtacatacagtggccacaataggaggttgagaaagtgtaaccgttggagtagtacaagaaatacttccatccgattgttgtgtacatgtagttgttggtaacgtctgagaaggttgggtagatggcggcgtcgtcgttttttgatctttattaaatttagagataatatcctgaacagcattgctcggcgtcaacgctggaaggagtgaactcgccggcgcatcagtatcttcagacagccaatcaaaaagattagacatatcagatgatgtattagtttgttgtcgtggttttggtgtaggagcagtactactaggtagaagaataggagccgatgtagctgttggaaccggctgtggagttatatgaatagttggttgtagcggttggataggctgtctgctggcggccatcatattatctctagctagttgttctcgcaactgtctttgataatacgactcttgagactttagtcctatttcaatcgcttcatcctttttcgtatccggatccttttcttcagaataatagattgacgactttggtgtagaggattctgccagcctctgtgagaacttgttaaagaagtccatttaaggctttaaaattgaattgcgattataagattaaatggcagacacagacgatattatcgactatgaatccgatgatctcaccgaatacgaggatgatgaagaagaggaagaagatggagagtcactagaaactagtgatatagatcccaaatcttcttataagattgtagaatcagcatccactcatatagaagatgcgcattccaatcttaaacatatagggaatcatatatctgctcttaaacgacgctatactagacgtataagtctatttgaaatagcgggtataatagcagaaagctataacttgcttcaacgaggaagattacctctagtttcagaattttctgacgaaacgatgaagcaaaatatgctacatgtaattatacaagagatagaggagggttcttgtcctatagtcatcgaaaagaacggagaattgttgtcggtaaacgattttgacaaagatggtctaaaattccatctagactatattatcaaaatttggaaacttcaaaaacgatattagaatttatacgaatatcgttctctaaatgtcacaatcaagtctcgcatgttcagcaatttattgtcgtactttatatcgtgttcattaacgatatcttgcaaaatagtaatgattctatcttccttcgatagatattcttcagagattattgtcttatattctttcttgttatcagatatgaatttgataagactttgaacattattgatacccgtctgtttaattttttctacagatattttagttttggcagattctatcgtatctgtcaatagacatccaacatcgacattcgacgtcaattgtctataaatcaacgtataaattttagaaataacattagcgaattgttgtgcgttgatgtcgttattctgaaacagtatgattttaggtagcattttcttaacaaagagaacgtatttattgttactcagttgaacagatgatatatccagattactaacgcatctgattccgtataccaaactttcagaagaaatggtatacaattgtttgtattcattcaatgtctctttttcagaaattagtttagagtcgaatactgcaataattttcaagagatagttttcatcagataagattttatttagtgtagatatgataaaactattgttttgttggagaacttgatacgccgcgttctctgtagtcgacgctctcaaatgggaaacaatctccattatttttttggaatcggatactatatcttcggtatcttgacgcagtctagtatacatagagttaagagagattagagtttgtacattaagcaacatgtctctaaatgtggctacaaacttttcctttttcacatcatctagtttattatataccgatttcacaacggcaccagatttaaggaaccagaatgaaaaactctgataactacaatatttcatcatagttacgattttatcatcttctatagttggtgtaatagcgcatacctttttctccaagactggaaccaacgtcataaaaatgtttaaatcaaaatccatatcaacatctgatgcgctaagaccagtctcgcgttcaagattatctttactaatggtgacgaactcatcgtataaaactctaagtttgtccattatttatttacagatttagttgtttaatttatttgtgctcttccagagttgggatagtatttttctaacgtcggtattatattattaggatctacgttcatatgtatcataatattaatcatccacgttttgataaatctatctttagcttctgaaataacgtatttaaacaaaggagaaaaatatttagctacggcatcagacgcaataacattttttgtaaatgtaacgtatttagacgacagatcttcgttaaaaagttttccatctatgtagaatccatcggttgttaacaccattcccgcgtcagattgaataggagtttgaatagtttgttttggaaatagatccttcaataacttatagttgggtgggaaaaaatcgattttatcactagactctttcttttttactatcattacctcatgaactatttcttgaatgagtatatgtattttctttcctatatcggacgcgttcattggaaaatataccatgtcgttaactataagaatatttttatcctcgtttacaaactgaataatatcagatgtagttcgtaaacgaactatatcatcaccagcacaacatctaactatatgatatccactagtttcctttagccgtttattatcttgttccatattagcagtcattccatcatttaagaaggcgtcaaaaataatagggagaaatgacattttggattctgttacaactttaccaaaattaaggatatacggacttactatctttttctcaacgtcaatttgatgaacacacgatgaaaatgtgcttctatgagattgatcatgtagaaaacaacaagggatacaatatttccgcatatcatgaaatatattaagaaatcccaccttattatatttccccaaaggatccatgcacgtaaacattatgccgttatcattaataaagacttctttctcatcggatctgtaaaagttgttactgatttttttcattccaggatctagataattaataatgatgggttttctattcttattctttgtattttggcatatcctagaccagtaaacagtttccactttggtaaaatcagcagacttttgaacgctattaaacatggcattaatggcaataactaaaaatgtaaaatatttttctatgttaggaatatggtttttcactttaatagatatatggtttttggccaaaatgatagatatttttttatccgaggatagtaaaatattattagtcgccgtctctataaaaatgaagctagtctcgatatccaattttattctagaattgataggagtcgccaaatgtaccttatacgttatatctcccttgatgcgttccatttgtgtatctatatcggacacaagatctgtaaatagttttacgttattaatcatcacggtatcgccgtcgctagataacgctaatgtaccatccaagtcccaaatggagagatttaactgttcatcgtttagaataaaatgattaccggtcatattaataaagtgttcatcgtatctagataacaacgacttataattaatgtccaagtcttgaactcgctgaatgatcttttttaacccagttagttttagattggtacgaaatatattgttaaactttgattctacagtaatgtccaaatctagttgtggaaatacttccatcaacattgtttcaaacttgataatattattatctacatcttcgtacgatccaaattccggaatagatgtatcgcacgctctggccacccagataaccaaaaagtcacacgctccaggatatacattgtataaaaagctatcgttttttagtagggtttttttctgcgtgtatacgaagggattaaaaatagtattatcaacgtaactatattccaaattattcttatgagaatagataataatatcgtccttaatatctaacaaatttcctaaatatccctttaattgagtcattcgaagcgtcaatagaatatgtctcttaactatttccggctgttgtatatttaaatgacttcgtaaaaaataatatatgggcgacttctcatctatgtaatcatatggagtgagatatagggctcgttctacctcctgccccttacccacctgtaataccaattgcggacttactatatatcgcatatttatatcgtggggtaaagtgaaaatctactaccgatgatgtaagtcttacaatgttcgaaccagtaccagatcttaatttggaggcctccgtagaactaggggaggtaaatatagatcaaacaacacctatgataaaggagaatagcggttttatatcccgcagtagacgtctattcgcccatagatctaaggatgatgagagaaaactagcactacgattctttttacaaagactttattttttagatcatagagagattcattatttgttcagatgcgttgacgctgtaaaagacgtcactattaccaaaaaaaataacattatcgtggcgccttatatagcacttttaactatcgcatcaaaaggatgcaaacttacagaaacaatgattgaagcattctttccagaactatataatgaacatagtaagaaatttaaattcaactctcaagtatccatcatccaagaaaaactcggataccagtttggaaactatcacgtttatgattttgaaccgtattactctacagtagctctggctattcgagatgaacattcatctggcatttttaatatccgtcaagagagttatctggtaagttcattatctgaaataacatatagattttatctaattaatctaaaatctgatcttgttcaatggagtgctagtacgggcgctgtaattaatcaaatggtaaatactgtattgattacagtgtatgaaaagttacaactggtcatagaaaatgattcacaatttacatgttcattggctgtggaatcaaaacttccaataaaattacttaaagatagaaatgaattatttacaaaattcattaacgagttaaaaaagaccagttcattcaagataagcaaacgcgataaggatacgctactaaaatattttacttaggactggagttagaatttatagacgactcatttcgtttatcattgttactattattactattactatcattattagtgttggcattattagtattcttcttgtcatcttgttcagaaatatacagcaatgctatacctaatactaaatacattatcatgctcgcaatggctctaacaacaacgaaccaaaatgaatttggtcgtagcttttgttcacaaaaatacataaagaaatgtctacataaatctatggcgccattggctacttgaaatagcgccagtcctcctacagattttaatatagctgtataacatgacatttattcatcatcaaaagagacagagtcaccatctgtcatatttagattttttttcatgtgttcaaagtatcctctactcatttcattataatagtttatcatacttagaattttaggacggatcaatgagtaagacttgactagatcgtcagtagtaatttgtgcatcgtctattctgcatccgcttcgtcgaataatgtatagcatcgctttgagattctccatagctatcaagtctttatacaatgacatggaaatatctgtgaatactttatacttctccaacatcgatgccttaacatcatcgcctactttagcattgaaaatacgttctattgtgtagatggatgtagcaagatttttaaacaacaatgccatcttacacgatgattgcctcaagtctccaatcgtttgtttagaacgattagctacagagtccaatgcttggctgactagcatattattatctttagaaattgtattcttcaatgaggcgtttatcatatctgtgatttcgttagtcatattacagtctgactgggttgtaatgttatccaacatatcacctatggatacggtacacgtaccagcatttgtaataatcctatctaagatgttgtatggcattgcgcagaaaatatcttctcctgtaatatctccactctcgataaatctactcagattattcttaaatgccttattctctggagaaaagatatcagtgtccatcatttcattaatagtatacgcagaaaagataccacgagtatcaattctatccaagatacttatcggttccgagtcacagataatggtttcctctccttcgggagatcctgcatagaaatatctaggacaatagtttctatactgtctgtaactctgataatctctaaagtcactaactgataccatgaaattgagaagatcaaacgctgaagtaattaatttttctgcctcgtttttactacaactagttttcatcaatgtagtgacgatgtattgtttagttacttttggtctaatactgatgatagagatattattgcttcccataatggatcttctagtagtcaccttaaagcccattgatgcgaatagcagatagataaagtcttggtatgactcctttctaatatagtacggactacctttgtcacccaactttatacccacataagccataacaacctctttaatagccgtttcatgaggtttatcagccatgagcctgagtagttggaagaatctcatgaatcccgtctcagaaagtcctatatgcatgatagatttatctttcctgggaaactctcgtatagtcatagatgaaatactctttaaagtttctgaaataagattagtaacagtcttacctccgactactctaggtaacaaacaaactctaataggtgttttctctgcggagataatatcagaaaggatagagcaataagtagtattattgtgattataaagaccgaatacataacaggtagaatttataaacatcatgtcctgaaggtttttagacttgtattcctcgtaatccataccgtcccaaaacatggatttggtaactttgatagccgtagatctttgttccttcgccaacaggttaaagaaattaataaagaatttgttgtttctatttatgtccacaaattgcacgtttggaagcgccacggttacattcactgcagcattttgaggatcgcgagtatgaagtacgatgttattgtttactggtatatctggaaagaaatctaccagtctaggaataagagattgatatcgcatagaaatagtaaagtttataatctcatcatcgaagagcattttgttaccattgtaataaatatccactctgtcatatgtataaatgaagtactgttcaaacatgatgagatgtttatatgttggcatagtagtgagatcgacgtttggtaatggcaatgtattaagattaactccataatgtctagcagcatctgcgatgttataagcgtcgtcaaagcggggtcgatcttgtattgttatatattgtctaacacctataagattatcaaaatcttgtctgcttaatacaccgttaacaatttttgccttgaattcttttattggtgcattaataacatccttatagaggatgttaaacaaataagtgttatcaaagttaagatctggatatttcttttctgctagaacatccattgagtcggagccatctggtttaatataaccaccgataaatctagctctgtattctgtatccgtcaatctaatattaagaaggtgttgagtgaaaggtggaagatcgtaaaagctgtgagtattaatgataggattagtttccgaactaatgttaattggggtattaataatatctatatttccagcgttaagtgtaacattaaacagttttaattcacgtgacgtggtatcaattaaataattaatgcccaatttggatatagcagcctgaagctcatcttgtttagttacggatcctaatgagttattaagcaatatatcgaacggatgaacgaaggttgttttaagttggtcacatactttgtaatctagacatagatgcggaagaacggtagaaactatacgaaataaatattcagagtcctctaattgatcaagagtaactattgacttaataggcatcatttatttagtattaaatgacgaccgtaccagtgacggatatacaaaacgatttaattacagagttttcagaagataattatccatctaacaaaaattatgaaataactcttcgtcaaatgtctattctaactcacgttaacaacgtggtagatagagaacataatgccgccgtagtgtcatctccagaggaaatatcctcacaacttaatgaagatctatttccagatgatgattcaccggccactattatcgaacgagtacaacctcatactactattattgacgatactccacctcctacgtttcgtagagagttattaatatcggaacaacgtcaacaacgagaaaaaagatttaatattacagtatcgaaaaatgctgaagcaataatggaatctagatctatgataacttctatgccaacacaaacaccatccttgggagtagtttatgataaagataaaagaattcagatgttagaggatgaagtggttaatcttagaaatcaacgatctaatacaaaatcatctgataatttagataattttaccaaaatactatttggtaagactccgtacaaatcaacagaagttaataagcgtatagccatcgttaattatgcaaatttgaacgggtcccccttatcagtcgaggacttggatgtttgttcggaggatgaaatagatagaatctataaaacgattaaacaatatcacgaaagtagaaaacgaaaaattatcgtcactaacgtgattattattgtcataaacattatcgagcaggcattgctaaaactcggatttgaagaaatcaaaggactgagtaccgatatcacttcagaaattatcgatgtggagatcggagatgactgcgatgctgtagcatctaaactaggaatcggtaacagtccggttcttaatattgtattgtttatactcaagatattcgttaaacgaattaaaattatttaatttaatacattcccatatccagacaacaatcgtctggattaatctgttcctgtcgtctcataccggacgacatattaatctttttattagtgggcatctttttagatggtttctttttcccagcattaactgagtcgatacctagaagatcgtgattgatctctccgaccattccacgaacttctaattggccgtctctgacggtaccataaactattttaccagcattagtaacagcttggacaatctgaccatccatcgcattgtacgatgtagtagtaactgttgttctacgtctaggagcaccagaagtatttttggagcccttggatgttgatgtagaagaagacgaggattttgattttggtttacatgtaatacattttgaactctttgattttgtatcacatgcgccggcagtcacatctgtttgagaattaagattattgttgcctcctttgacggctgcatctccaccgatttgcgctagtagatttttaagctgtggtgtaatcttattaactgtttcgatataatcatcgtaactgcttctaacggctaaattttttttatccgccatttagaagctaaaaatatttttatttatgcagaagatttaactagattatacaatgaactaatatgatccttttccagattatttacaaacttggtattttttggttctggaggaggcgaatttaaattcggacttggattcggattttgtaagttcttgatcttattatacatcgagtataggatggcgacagtaactgctacacaaataccgatcaaaagaagaataccaatcatttattgacaataacttcactattgatcaagtatgcaatatatcatcttttcactaaataagtagtaataatgattcaacaatgtcgagatatatggacgataataatttagttcatggaaatatcgctatgattggtgtgaatgactccgctaactctgtggggtgcgcagtgctttccccacatagaataaattagcattccgactgtgataataataccaagtataaacgccataatactcaatactttccatgtacgagtgggactggtagacttactaaagtcaataaaggcgaagatacacgaaagaatcaaaagaatgattccagcgattagcacgccggaaaaataatttccaatcataagcatcatgtccatttaactaataaaaattttaaatcgccgaatgaacaaagtggaatataaaccatataaaaacaatagtttgtactgcaaaaataatatctatttttgttttcgaagatatggtaaaattaaatagtagtacacagcatgttataactaacagcagcaacggctcgtaattacttatcatttactagacgaaaaggtggtgggatattttcttgctcaaataatacgaatatatcacccatccattttatgcgatgtttatatactctaatctttaatagatctatagacgacgggtttaccaacaatatagattttatcgattcatctaatttaaacccttccttaaacgtgaatgatctattatctggcataacgatgaccctacctgatgaatcggacaatgtactgggccatgtagaataaattatcaacgaattatcgtctacgaacatttatatcatttgttttaattttaggacgcgaataaatggatataaaatagaaaataacagatattacaaccagtgttatggccgcgcccaaccaggtaggcagttttattttatcttttactacaggttctcctggatgtacgtcaccaacggcggacgtagttctagtacaattagacgtaagttccgcttgggaattttttaacgctaaagagttaacgttaatcgtgcacccaacgtatttacatctagttcgttgaacatcttgattataatataaccattttctatctctagattcgtcagtgcactcatgtaaccaacataccctaggtcctaaatatttatctccggaattagattttggataattcgcgcaccaacaatttctatttcctttatgatcgttacaaaagacgtataatgccgtatccccaaaagtaaaataatcaggacgaataattctaataaactcagaacaatatctcgcatccatatgtttggagcaaatatcggaataagtagacatagccggtttccgttttgcacgtaaccattctaaacaattggggtttccaggatcgtttctacaaaatccagtcatgaaatcgtcacaatgttctgtcttgtaattattattaaatatttttggacagtgtttggtatttgtcttagaacaacattttgccacgctatcactatcgcccaggagataatccttttttataaaatgacatcgttgcccggatgctatataatcagtagcgtgttttaaatccttaatatattcaggagttacctcgttctgataatagattaatgatccaggacgaaatttgaaagaactacatggttctccatgaattaatacatattgtttagcaaattcaggaactataaaactactacaatgatctatcgacataccatctatcaaacaaaacttgggtttaatttctcccggagatgtttcataatagtacgtataactttcttctgcaaacttaacagctctattatattcaggataattaaaacctaattccatatatttgtctcgtatatctgctattcctggtgctattttgattctattaagagtaacagctgcccccattcttaataatcgtcagtatttaaactgttaaatgttggtatatcaacatctaccttatttcccgcagtataaggtttgttgcaggtatactgttcaggaatggttacatttatacttcttctatagtcctgtctttcgatgttcatcacatatgcaaagaacagaataaacaaaataatgtaagaaataatattaaatatctgtgaattcgtaaatacattgattgccataataattacagcagctacaatacacacaatagacattcccacagtgttgccattacctccacgatacatttgagttactaagcaataggtaataactaagctagtaagaggcaatagaaaagatgagataaatatcatcaatatagagattagaggagggctatatagagccaagacgaacaaaatcaaaccgagtaacgttctaacatcattatttttgaagattcccaaataatcattcattcctccataatcgttttgcatcatacctccatctttaggcataaacgattgctgctgttcctctgtaaataaatctttatcaagcactccagcacccgcagagaagtcgtcaagcatattgtaatatcttaaataactcatttatatattaaaaaatgtcactattaaagatggagtataatctttatgccgaactaaaaaaaatgacttgtggtcaacccctaagtctttttaacgaagacggggatttcgtagaagttgaaccgggatcatcctttaagtttctgatacctaagggattttacgcctctccttccgtaaagacgagtctagtattcgagacattaacaacgaccgataataaaatcactagtatcaatccaacaaatgcgccaaagttatatcctcttcaacgcaaagtcgtatctgaagtagtttctaatatgaggaaaatgatcgaatcaaaacgtcctctatacatcactcttcacttggcgtgtggatttggtaagactattaccacgtgttatcttatggctacacacggtagaaaaaccgtcatttgcgtacccaataaaatgttaatacatcaatggaagacacaggtagaggcagtcggattggaacataagatatccatagatggagtaagtagtctattaaaggaactaaagactcaaagtccggatgtattaatagtagtcagtagacatctgacaaacgatgccttttgtaaatatatcaataagcattatgatttgttcatcttggatgaatcacatacgtataatctgatgaacaatacagcagttacaagatttttagcgtattatcctccgatgatgtgttattttttaactgctacacctagaccatctaaccgaatttattgtaacagtattattaatattgccaagttatccaatctaaaaaaaactatctatgcagtagatagtttttttgagccatattccacagataatattagacatatggtaaaacgactagatggaccatctaataaatatcatatatataccgagaagttattatctgtagacgagcctagaaatcaacttattcttgataccctggtagaagaattcaagtcaggaactattaatcgcattttagttattactaaactacgtgaacatatggtattattctacaaacgattattagattttttcggaccagaggttgtatttataggagacgcccaaaatagacgtactccagatatggtcaaatcaatcaaggaactaaatagatttatattcgtatccaccttattttattccggtactggtttagatattcctagtttggattcgttgttcatttgctcggcagtaatcaacaatatgcaaatagagcaattactagggagggtatgtcgagaaacagaactattagataggacggtatatgtatttcctaacacatccatcaaagaaataaagtacatgataggaaatttcatgcaacgaattattagtctgtctgtagataaactaggatttaaacaaaaaagttatcggaaacatcaagaatccgatcccacttctgcatgtacaacatcatccagagaagaacgtgtattaaatagaatatttaactcgcaaaatcgttaagaagtttaagcgacgatccgcatgctgcgcaggccagtgtattacccctcatagtattaatataatccaatgatacttttgtgatgtcggaaatcttaaccaatttagactgacaggcagaacacgtcatgcaatcatcatcgtcatcgataactgtagtcttgggcttctttttgcgactcttcattccggaacgcacattggtgctatccatttaggtagtaaaaaataagtcagaatatgccctataacacgatcgtgcaaaacctggtatatcgtctctatctttatcacaatatagtgtatcgacatttttattattattgacctcgtttatcttggaacatggaatgggaacatttttgttatcaacggccatctttgccttaattccagatgttgtaaaattataactaaacagtctatcatcgacacaaatgaaattcttgtttagacgtttgtagtttacgtatgcggctcgttcgcgtctcattttttcagatattgcaggtactataatattaaaaataagaatgaaataacataggattaaaaataaagttatcatgacttctagcgctgatttaactaacttaaaagaattacttagtctgtacaaaagtttgagattttcagattctgcggctatagaaaagtataattctttggtagaatggggaacatctacttactggaaaataggcgtgcaaaaggtagctaatgtcgagacgtcaatatctgattattatgatgaggtaaaaaataaaccgtttaatattgatccgggctattacattttcttaccggtatattttgggagcgtctttatttattcgaagggtaaaaatatggtagaacttggatctggaaactcttttcaaataccagatgatatgcgaagtgcgtgtaacaaagtattagacagcgataacggaatagactttctgagatttgttttgttaaacaatagatggataatggaagatgctatatcaaaatatcagtctccagttaatatatttaaactagctagtgagtacggattaaacatacccaaatatttagaaattgaaatagaggaagacacattatttgacgacgagttatactctattatagaacgctctttcgatgataaatttccaaaaatatccatatcgtatattaagttgggagaacttagacggcaagttgtagactttttcaaattctcattcatgtatattgagtccatcaaggtagatcgtataggagataatatttttattcctagcgttataacaaaatcaggaaaaaagatattagtaaaagatgtagaccatttaatacgatccaaggttagagaacatacatttgtaaaagtaaaaaagaaaaacacattttccattttatacgactatgatggaaacggaacagaaactagaggagaagtaataaaacgaattatagacactataggacgagactattatgttaacggaaagtatttctctaaggttggtagtgcaggcttaaagcaattgactaataaattagatattaatgagtgcgcaactgtcgatgagttagttgatgagattaataaatccggaactgtaaaacgaaaaataaaaaaccaatcagcatttgatttaagcagagaatgtttgggatatccagaagcggattttataacgttagttaataacatgcggttcaaaatagaaaattgtaaggttgtaaatttcaatattgaaaatactaattgtttaaataacccgagtattgaaactatatatggaaactttaaccagttcgtctcaatctttaatgtcgtcaccgatgtcaaaaaaagattattcgagtgaaataatatgcgcctttgatataggtgcaaaaaatcctgccagaactgttttagaagtcaaggataactccgttagggtattggatatatcaaaattagactggagttctgattgggaaaggcgcatagctaaagatttgtcacaatatgaatacactacagttcttctagaacgtcagcctagaaggtcgccgtatgttaaatttatctattttattaaaggctttttatatcatacatcggctgccaaagttatttgcgtctcgcctgtcatgtctggtaattcatatagagatcgaaaaaagagatcggtcgaagcatttcttgattggatggacacattcggattgcgagactccgttccggatagacgcaaattagacgatgtagcggatagtttcaatttggctatgagatacgtattagataaatggaatactaattatacaccttataataggtgtaaatctagaaattacataaaaaaaatgtaataacgttagtaacgccattatggataatctatttacctttctacatgaaatagaagatagatatgccagaactatttttaactttcatctaataagttgcgatgaaataggagatatatatggtcttatgaaagaacgcatttcctcagaggatatgtttgataatatagtgtataataaagatatacatcctgccattaagaaactagtgtattgcgacatccaacttactaaacacattattaatcagaatacgtatccggtatttaacgattcttcacaagtgaaatgttgtcattatttcgacataaactcagataatagcaatattagctctcgtacagtagagatatttgagagggaaaagtcatctcttgtatcatatattaaaactaccaataagaagagaaaggtcaattacggcgaaataaagaaaactgttcatggaggcactaatgcaaattacttttccggtaaaaagtctgacgagtatctgagtactacagttagatccaacattaatcaaccttggatcaaaaccatctctaagaggatgagagttgatatcattaatcactctatagtaacgcgtggaaaaagctctatattacaaactatagaaattatttttactaatagaacatgtgtgaaaatattcaaggattctactatgcacattattctatccaaggacaaggatgaaaaggggtgtatacacatgattgacaaattattctatgtctattataatttatttctgttgttcgaagatatcatccaaaacgagtactttaaagaagtagctaatgttgtaaaccacgtactcacggctacggcattagatgagaaattattcctaattaagaaaatggctgaacacgatgtttatggagttagcaatttcaaaatagggatgtttaacctgacatttattaagtcgttggatcataccgttttcccctctctgttagatgaggatagcaaaataaagttttttaaggggaaaaagctcaatattgtagcattacgatctctggaggattgtataaattacgtgactaaatccgagaatatgatagaaatgatgaaggaaagatcgactattttaaatagcatagatatagaaacggaatcggtagatcgtctaaaagaattgcttctaaaatgaaaaaaaacactaattcagaaatggatcaacgactagggtataagtttttggtgcctgatcctaaagccggagttttttatagaccgttacatttccaatatgtatcgtattctaattttatattgcatcgattgcatgaaatcttgaccgtcaagcggccactcttatcgtttaagaataatacagaacgaattatgatagaaattagcaatgttaaagtgactcctccagattactcacctataatcgcgagtattaaaggtaagagttatgacgcattagccacgttcactgtaaatatctttaaagaggtaatgaccaaagagggtatatccatcactaaaataagtagttatgagggaaaagattctcatttgataaaaattccgctactaataggatacgggaataaaaatccacttgatacagccaagtatcttgttcctaatgtcataggtggagtctttatcaataaacaatctgtcgaaaaagtaggaattaatctagtagaaaagattacaacatggccaaaatttagggttgttaagccaaactcattcactttctcgttttcctccgtatcccctcctaatgtattaccgacaagatatcgccattacaagatatctctggatatatcacaattggaagcgttgaatatatcatcgacaaagacatttataacggtcaatattgttttgctgtctcaatatttatctagagtgagtctagaattcattagacgtagtttatcatacgatatgcctccagaagttgtctatctagtaaacgcgataatagatagtgctaaacgaattactgaatctattactgactttaatattgatacatacattaatgacctggtggaagctgaacacattaaacaaaaatctcagttaacgatcaacgagttcaaatatgaaatgctgcataactttttacctcatatgaactatacacccgatcaactaaagggattttatatgatatctttactaagaaagtttctctactgtatcttccacacttctagatatccagatagagattcgatggtttgtcatcgcatcctaacgtacggcaaatattttgagacgttggcacatgatgaattagagaattacataggcaacatccgaaacgatatcatgaacaatcacaagaacagaggcacttacgcggtaaacattcatgtactaacaactcccggacttaatcacgcgttttctagcttattgagtggaaagttcaaaaagtcagacggtagttatcgaacacatcctcactattcatggatgcagaatatttctattcctaggagtgttggattttatccggatcaagtaaagatttcaaagatgttttctgtcagaaaataccatccaagtcaatatctttacttttgttcatcagacgttccggaaagaggtcctcaggtaggtttagtatctcaattgtctgtcttgagttccattacaaatatactaacgtctgagtatttggatttggaaaagaaaatttgtgagtatatcagatcatattataaagatgatataagttactttgaaacaggatttccaatcactatagaaaatgctctagtcgcatctcttaatccaaatatgatatgtgattttgtaactgactttagacgtagaaaacggatgggattcttcggtaacttggaggtaggtattactttagttagggatcacatgaatgaaattcgcattaatattggagcgggaagattagtcagaccattcttggttgtggataacggagagctcatgatggatgtgtgtccggagttagaaagcagattagacgacatgacattctctgacattcagaaagagtttccgcatgtcatcgaaatggtagatatagaacaatttacttttagtaacgtatgtgaatcggttcaaaaatttagaatgatgtcaaaggatgaaagaaagcaatacgatttatgtgactttcctgccgaatttagagatggatatgtagcatcttcattagtgggaatcaatcacaattctggacccagagctattcttggatgtgctcaagctaaacaagctatctcttgtctgagctcggatatacgaaataaaatagacaatggaattcatttgatgtatccagagaggccaatcgtgattagtaaggctttagaaacttcaaagattgcggctaattgcttcggccaacatgttactatagcattaatgtcgtacaaaggtatcaatcaagaggatggaattatcatcaaaaaacaatttattcagagaggcggtctcgatattgttacagccaagaaacatcaagtagaaattccattggaaaactttaataacaaagaaagagataggtctaacgcctattcaaaattagaaagtaatggattagttagactgaatgctttcttggaatccggagacgctatggcacgaaatatctcatcaagaactcttgaagatgattttgctagagataatcagattagcttcgatgtttccgagaaatataccgatatgtacaaatctcgcgttgaacgagtacaagtagaacttactgacaaagttaaggtacgagtattaaccatgaaagaaagaagacccattctaggagacaaatttaccactagaacgagtcaaaagggaacagtcgcgtatgtcgcggatgaaacggaacttccatacgacgaaaatggtatcacaccagatgtcattattaattctacatccatcttctctagaaaaactatatctatgttgatagaagttattttaacagccgcatattctgctaagccgtacaacaataagggagaaaaccgacctgtctgttttcctagtagtaacgaaacatccatcgatacatatatgcaattcgctaaacaatgttatgagcattcaaatccgaaattgtccgatgaagaattatcggataaaatcttttgtgaaaagattctctatgatcctgaaacggataagccttatgcatccaaagtattttttggaccaatttattacttgcgtctgaggcatttaactcaggacaaggcaaccgttagatgtagaggtaaaaagacgaagctcattagacaggcgaatgagggacgaaaacgtggaggaggtatcaagttcggagaaatggagagagactgtttaatagcgcatggtgcagccaatactattacagaagttttgaaagattcggaagaagattatcaagatgtgtatgtttgtgaaaattgtggagacatagcagcacaaatcaagggtattaatacatgtcttagatgttcaaaacttaatctctctcctctcttaacaaaaattgataccacgcacgtatctaaagtatttcttactcaaatgaacgccagaggcgtaaaagtcaaattagatttcgaacgaaggcctccttcgttttataaaccattagataaagttgatctcaagccgtcttttctggtgtaatattctagtttggtagtagatacatatcaatatcatcaaattcgagatccgaattataaaatgggcgtggattgttaactatagaatcggacgtctgatattcgaaaatctgtggagtttcaggttttggtggaggtgtaactgctacttgggatactgaagtctgatattcagaaagctgtggatgttctggttcggcatccaccgatggtgtcacatcactaatcggttcggtaacgtctgtggatggaggtgctacttctacagaacctgtagcctcagttgtcaacggagatacatttttaatgcgagaaaatgtataatttggtaatggtttcttatgtggatctgaagaagaggtaagatatctactagaaagataccgatcacgttctagttctcttttgtagaacttaactttttctttctccgcatctagttgatattccaacctcttcacgttactacgttcagattccaattcacgttcgcatgggttacctccgcagtttttacgagcgatttcacgttcagccttcatgcgtctctccctctctctatcgagtttatcagagcagtctttctgaaggcgatcgaactccataaatttctccaacgctttgattgtttccatagatttccgaagttcagcttttaggactgtgattctttttctttcgaattcacagctggatgtacaaccgtttccattaccgccatctctaagtttcttttctagatcggcaacatttcatccccatgccttttacattcctcgagtctactgtcgtcgaaatatcgttccagctccttttcgacatcaataactttagcacgttgtctctcaagctctcttttgtagttatctgattccctggcacgtttaagatcttcatgcaattgagtcagctcttaacttcctctcttgcttcttcgtcatagtacgcgcaatcactgtgagatccattgttaccacgtctacactcggcgagctcgcgtttaagagattcaatttcccgtttgtattggtccatgtttccattgctaccaccattagatttacaggctgctagttgtcgttcgagatcagaaatacgggttttcttggaattgatttcgtcgatgtacttggcatcgaaacacttattaagttctttttccaattctacgattttatttctttcgcgagtcaattccctcctgtagtaactatctgttttgtcagattcacgctctctacgtagactttcttgcaagttactaatttgttccctagcacgtccgagtttagttttatatgctgaatagagttctgattcatcctttgagcagatctctagcgatcgtttaagattcctaattctagtctttagcctatttacctcctcagaagatgttccgttaccgttgcgtttacactcgttaagctgtctatcaagatccatgattctatctctaagacgttgcatctctctttccatatcagcattgctttcattattacgtctgcagtcactcaactgtctttcaatatctgagattctatctctaagacgtcgcatctctctctgtttcggcattggtttcattattacgtttacagtcgttcaactgtctttcaagatctgatattctagattggagtctgctaatctctgtagcattttcacggcattcactcagttgtctttcaagatctgaaattttagattggagtctgctaatctctgtaagatttcctcctccgctctcgatgcagtcggtcaacttattctctagttctctaatacgcgaacgcagtgcatcaacttcttgcgtgtcttcctggttgcgtgtacattcatcgagatctctaacgcgtcgtcgttcttcctcaagttctctgcgtactacagaaagcgtgtccctatcttgttgatatttagcaatttctgattctagagtactgattttgcttacgtagttactaatagttgtcttggccttatcaagatcctccttgtatttgtcgcattccttgatatccctacgaagtctggacagttcccattcgacattacgacgtttatcgatttcagctcggagatcgtcatcgcgttgttttagccacatacgactgagttcaagttctcgttgacaagatccatctacttttccattcctaatagtatccagttccttttctagttctgaacgcatttctcgttccctatcaagcgattctctcaattctcggatagtcttcttatcaatttctaataaatctgaaccatcatctgtcccattttgaatatccctgtgttctttgatctcttttgtaagtcggtcgattctttcggttttataaacagaatccctttccaaagtcctaatcttactgagtttatcactaagttctgcattcaattcggtgagttttctcttggcttcttccaactctgttttaaactctccactatttccgcattcttcctcgcatttatctaaccattcaattagtttattaataactagttggtaatcagcgattcctatagccgttcttgtaattgtgggaacataattaggatcttctaatggattgtatggcttgatagcatcatctttatcattattagggggatggacaaccttaattggttggtcctcatctcctccagtagcgtgtggttcttcaataccagtgttagtaataggcttaggcaaatgcttgtcgtacgcgggcacttcctcatccatcaagtatttataatcgggttctacttcagaatattcttttctaagagacgcgacttcgggagttagtagaagaactctgtttctgtatctatcaacgctggaatcaatactcaagttaaggatagcgaatacctcatcgtcatcatccgtatcttctgaaacaccatcatatgacatttcatgaagtctaacgtattgataaatagaatcagatttagtattaaacagatccttaacctttttagtaaacgcatatgtatattttagatctccagatttcataatatgatcacatgccttaaatgtcagtgcttccatgatataatctggaacactaatgggtgacgaaaaagatacagcaccatatgctacgttgataaataaatctgaaccactaagtagataatgattaatgttaagaaagaggaaatattcagtgtataggtatgtcttggcgtcatatcttgtactaaacacgctaaacagtttgttaatgtgatcaatttccaatagattaattagagcagcgggaataccaacaaacatattaccacatccgtattttctatgaatatcacatatcatgttaaaaaatcttgatagaagagcgaatatctcgtctgacttaatgagtcgtagttcagcagcaacataagtcataactgtaaatagaacatactttcctgtagtgttgattctagactccacatcaacaccattattaaaaatagttttatatacatctttaatctgctctccgttaatcgtcgaacgttctagtatacggaaacactttgatttcttatctgtagttaatgacttagtgatatcacgaagaatattacgaattacatttcttgtttttcttgagagacctgattcagaactcaactcatcgttccatagtttttctacctcagtggcgaaatctttggagtgcttggtacatttttcaataaggttcgtgacctccatttattataaaaaatttattcaaaacttaactacaatcgggtaattataagatcgtagatctcccatgtggcggaatactaccatctatcgcatgtggatggacagtaggtaatggccatgggaacagtaatgtttgcatatttatctttcttgctagtattactgcatattgtcccaatgtttcgatgtgatgttctaacctatcaactgccgctgtatcacaacaatagtgtccgatgaaattaagattatgatccaatgtgtttaatatatgattatcaagtcttatacgatccgcgtcttttttgacaggatcaggttcttctacaggaagaagtttcggcctcttatgatattcatgtctgggaaacggtggtctagggtgaggctccggtatcggagtgggttttggattataatcatcatcgtctatgacatcatcttcgacttcgatatttattttgctatcttgatgatgtcctgtatcagttgcattttcagcactcgactgaatattagcgcattcattgtctattattaccatatttctaaacccaaaatgtatgtgttgaacatcagtactatcgttgatgagtcttatagcatgaattcgcttatcgttatcgggtttatcttctgtcaccttagcaattccttttttattaaactctacataatcatatccatttctattgtttgttctaatataaacgagtatagcatcattgctaaatttttcaatagtatcaaaaacagaatatcctaaaccatataatatatattcaggaacactcaaactaaatgtccaggattctcctaaatacgtaaactttaatagtgcgaaatcattcaaaaatctaccacttatagatagatagtacataaatgcgtatagtagtctacctatctctttattatgaaaaccggcattacgatcatatatgtcgtgatatacctgtgatccgtttacgttaaaccataaatacatgggtgatcctataaacatgaatttatttctaattctcagagctatagttaattgaccgtgtaatatttgcttacatgcatacttgatacgcttattaataagatttttatcattgctcgttatttcagaatcgtatatataaggagtaccatcgtgattcttaccagatattatacaaaatactatatataaaatatattgacccacgttagtaatcatataaatgtttaacgttttaaattttgtattcaatgatccattatcatacgctatcatggtcttgtaatattcattctttaaaatataatattgtgttagccattgcattggagctcctaatggagattttctattctcatccattttaggataggctttcataaagtccctaataacttcgtgaataatgtttctatgttttctactgatgcatgtatttgcttcgatttttttatcccatgtttcatctatcatagatttaaacgcagtaatgctcgcaacattaacatcttgaaccgttggtacaattccgttccataaatttataatgttcgccatttatataactcattttttgaatatacttttaattaacaaaagagttaagttactcatatggacgccgtccagtctgaacatcaatctttttagccagagatatcatagccgctcttagagtttcagcgtgattttccaacctaaatagaacttcatcgttgcgtttacaacacttttctatttgttcaaactttgttgttacattagtaatctttttttccaaattagttagccgttgtttgagagtttcctcattgtcgtcttcatcggctttaacaattgcttcgcgtttagcctctggctttttagcagcctttgtagaaaaaaattcagttgctggaattgcaagatcgtcatctccggggaaaagagttccgtccatttaaagtacagattttagaaactgacactctgcgttatttatatttggtacaacacatggattataaatattgatgttaataacatcagaaaatgtaaagtctatacattgttgcatcgtgttaaattttctaatggatctagtattattgggtccaacttctgcctgaaatccaaatatggaagcggatacaaaaccgtttcctggataaaccacacatctccacttttgctttacatcagaaattgtgtcgttgacatcttgaactctcctatctaatgccggtgttccacctatagattttgaatattcgaatgctgcatgagtagcattaaattccttaatattgccataattttcatatattgagtaaccctggataaaaagtaaacacaccgcagccgtcgctaccacaataaaaaaaattgatagagagttcatttataatctattagaagctgacaaaatttttttacacgcatcagacaatgctttaataaatagttcaacatctacttttgtcatatcgaaccgatggtatgattctaacctagaattacatccgaaaaagttgactatgttcatagtcattaagtcattaacaaacaacattccagactctggattataagacgatactgtttcgtcacaattacctaccttaatcatgtgattatgaatattggctattagagcaccttctaagaaatctataatatctttgaaacacgatttaaaatcaaaccacgaatatacttctacgaagaaagttagtttacccataggagaaataactataaatggagatctaaatacaaaatccggatctatgatagttttaacattattatattctctattaaatacctccacatctaaaaatgttaattttgaaactatgtcttcgtttattaccgtacctgaactaaacgctataagctctattgtttgagaactctttaaacgatattcttgaaatacatgtaacaaagtttcctttaactcggtcggtttatctaccatagttacagaatttgtatccttatctataatataataatcaaaatcgtataaagttatataattatcgcgttcagattgtgatcttttcaaatagactaaaaaccccatttctctagtaagtatcttatgtatatgtttgtaaaatatcttcatggtgggaatatgctctaccgcagttagccattcctcattgacagcggtagatgtattagacaaaactattccaatgtttaacaagggccattttacgagattattaaatccttgtttgataaatgtagccaatgagggttcgagttcaacgacgattgaattctcttcccgcggatgctgcatgatgaacgacgggatgttgttcgattgatttggaattctttttcgactttttgtttatattaaatattttaaaatttatagcggatagcaattcatgtaccacggataatgtagacgcgtattgcgcatcgatatctttattattagataaatttatcaataaatgtgagaagtttgcctcgttaaggtcttccatttaaatattatataaacatttgtgtttgtatcttattcgtcttttatggaatagttttttactagtaaagctgcaattacacactttgtccgtaaaacataaatataaacaccagcttttatcaatcgttccaaaaagtcgacggcggacatttttaacatggcatctattttaaatacacttaggtttttggaaaaaacatcattttataattgtaacgattcaataactaaagaaaagattaagattaaacataagggaatgtcatttgtattttataagccaaagcattctaccgttgttaaatacttgtctggaggaggtatatatcatgatgatttggttgtattggggaaggtaacaattaataatctaaagatgatgctattttacatggatttatcatatcatggagtgacaagtagtggagcaatttacaaattgggatcgtctatcgatagactttctctaaataggactattgttacaaaagttaataattatgatgatacattttttgacgacgatgattgatcgctattgcacaattttgtttttgtactttctaatatagtgtttaggttctttttcatatgagaatattgatttactaaaatatctatgtttaacttttgttctatgacgtccttatcggcggtatcggtacatatacgtaattcaccttcacaaaatacggagtcttcgataataatagccaatcgattattggatctagctgtctgtatcatattcaacatgtttaatatatcctttcgtttcccctttacaggcatcgatcgtagcatattttccgcgtctgatatggaaatgttaaaactacaaaaatgcgtaatgttagcccgtcctaatattggtacgtgtctataagtttggcatagtagaataatagacgtgtttaaatgccttccaaagtttaagaattctattagagtattgcattttgatagtttatcgcctacatcatcaaaaataagtaaaaagtgtgctgattttttatgattttgtgcgacagcaatacatttttctatgttacttttagttcgtatcagattatattctagagattcctgactactaacgaaattaatatgatttggccaaatgtatccatcataatctgggttataaacgggtgtaaacaagaatatatgtttatattttttaactagtgtagaaaacagagatagtaaatagatagtttttccagatccagatcctcctgttaaaaccattctaaacggcatttttaataaattttctcttgaaaattgtttttcttggaaacaattcataattatatttacagttactaaattaatttgataataaatcaaaatatggaaaactaaggttgttagtagggaggagaacaaagaaggcacatcgtgatataaataacatttattatcatgatgacaccagaaaacgacgaagagcagacatctgtgttctccgctactgtttacggagacaaaattcagggaaagaataaacgcaaacgcgtgattggtctatgtattagaatatctatggttatttcactactatctatgattaccatgtccgcgtttctcatagtgcgcctaaatcaatgcatgtctgctaacgaggctgctattactgacgccgctgttgccgttgctgctgcatcatctactcatagaaaggttgcgtctagcactacacaatatgatcacaaagaaagctgtaatggtttatattaccagggttcttgttatatattacattcagactaccagttattctcggatgctaaagcaaattgcactgcggaatcatcaacactacccaataaatccgatgtcttgactacctggctcattgattatgttgaggatacatggggatctgatggtaatccaattacaaaaactacatccgattatcaagattctgatgtatcacaagaagttagaaagtatttttgtgttaaaacaatgaactaatatttatttttgtacattaataaatgaaatcgcttaatagacaaactgtaagtaggtttaagaagttgtcggtgccggccgctataatgatgatactctcaaccattattagtggcataggaacatttctgcattacaaagaagaactgatgcctagtgcttgcgccaatggatggatacaatacgataaacattgttatttagatactaacattaaaatgtctacagataatgcggtttatcagtgtcgtaaattacgagctagattgcctagacctgatactagacatctgagagtattgtttagtattttttataaagattattgggtaagtttaaaaaagaccaatgataaatggttagatattaataatgataaagatatagatattagtaaattaacaaattttaaacaactaaacagtacgacggatgctgaagcgtgttatatatacaagtctggaaaactggttaaaacagtatgtaaaagtactcaatctgtactatgtgttaaaaaattctacaagtgacaacaaaaaatgaattaataataagtcgttaacgtacgccgccatggacgccgcgtttgttattactccaatgggtgtgttgactataacagatacattgtatgatgatctcgatatctcaatcatggactttataggaccatacattataggtaacataaaaactgtccaaatagatgtacgggatataaaatattccgacatgcaaaaatgctactttagctataagggtaaaatagttcctcaggattctaatgatttggctagattcaacatttatagcatttgtgccgcatacagatcaaaaaataccatcatcatagcatgcgactatgatatcatgttagatatagaagataaacatcagccattttatctattcccatctattgatgtttttaacgctacaatcatagaagcgtataacctgtatacagctggagattatcatctaatcatcaatccttcagataatctgaaaatgaaattgtcgtttaattcttcattctgcatatcagacggcaatggatggatcataattgatgggaaatgcaatagtaattttttatcataaaagttgtaaagtaaataataaaacaataaatattgaactagtagtacgtatattgagcaatcagaaatgatgctggtacctcttatcacggtgaccgtagttgcgggaacaatattagtatgttatatattatatatttgtaggaaaaagatacgtactgtctataatgacaataaaattatcatgacaaaattaaaaaagataaagagttctaattccagcaaatctagtaaatcaactgatagcgaatcagactgggaggatcactgtagtgctatggaacaaaacaatgacgtagataatatttctaggaatgagatattggacgatgatagcttcgctggtagtttaatatgggataacgaatccaatgttatggcgcctagcacagaacacatttacgatagtgttgctggaagcacgctgctaataaataatgatcgtaatgaacagactatttatcagaacactacagtagtaattaatgaaacggagactgttgaagtacttaatgaagataccaaacagaatcctaactattcatccaatcctttcgtaaattataataaaaccagtatttgtagcaagtcaaatccgtttattacagaacttaacaataaatttagtgagaataatccgtttagacgagcacatagcgatgattatcttaataagcaagaacaagatcatgaacacgatgatatagaatcatcggtcgtatcattggtgtgattagtttcctttttataaaattgaagtaatatttagtattattgctgccgtcacgttgtacaaatggagatattccctgtattcggcatttctaaaattagcaattttattgctaataatgactgtagatattatatagatacagaacatcaaaaaattatatctgatgagatcaatagacagatggatgaaacggtacttcttaccaacatcttaagcgtagaagttgtaaatgacaatgagatgtaccatcttattcctcatagattatcgacgattatactctgtattagttctgtcggaggatgtgttatctctatagataatgacatcaatggcaaaaatattctaacctttcccattgatcatgctgtaatcatatccccactgagtaaatgtgtcgtagttagcaagggtcctacaaccatattggttgttaaagcggatatacctagcaaacgattggtaacatcgtttacaaacgacatactatatgtaaacaatctgtcactgattaattatttgccgttgtctgtattcattattagacgagtcaccgactatttggatagacacatatgcgatcagatatttgctaataataagtggtattcccttataaccatcgacgataagcaatatcctattccatcaaactgtataggtatgtcctctgccaagtacataaattctagcatcgagcaagatactttaatccatgtttgtaacctcgagcatccgttcgactcagtatacaaaaaaatgcagtcgtacaattctctacctatcaaggaacaaatattgtacggtagaattgataatataaatatgagcattagtatttctgtggattaatagatttctagtatggggatcattaatcatctctaatctctaaatacctcataaaacgaaaaaaaagctattatcaaatactgtacggaatggattcattctcttctctttttatgaaactctgttgtatatctactgataaaactggaagcaaaaaatctgatagaaagaataagaataagatcaaggattatatggaacacgattattataaaataacaatagttcctggttcctcttccacgtctactagctcgtggtattatacacatgcctagtaatagtctctttgcgttgacggaaagcagactagaaataacaggctaaaatgttcagacaccataatagttcccaacccagataataacagagttccatcaacacattcctttaaactcaatcccaaacccaaaaccgttaaaatgtatccggccaattgatagtagataatgaggtgtacagcgcatgataatttacacagtaaccaaaatgaaaatactttagtaattataagaaatatagacggtaatgtcatcatcaacaatccgataatatgcctgagagtaaacattgacggataaaacaaaaatgctccgcataactctatcatggcaataacacaaccaaatacttgtaagattcctaaattagtagaaaatacaacgaatatcgatgtataagtgatctcgagaaataataagaataaagtaatgcccgtaaagataaacatcaacattgtttggtaatcattaaaccaattagtatgaagttgaactaatttcacagtagattttattccagtgttatcctcgcatgtataagtacctggtaagatatctttatattccataatcaatgagacatcactatctgataacgaatgaagtctagcactagtatgccatttacttaatattgtcgtcttggaagttttattataagttaaaatatcatggttatccaatttccatctaatatactttgtcggattatctatagtacacggaataatgatggtatcattacatgctgtatactctatggtctttgtagttgttataacaaccaacgtatagaggtatatcaacgatattctaactcttgacattttttatttatttaaaatgatacctttgttatttattttattctattttgctaacggtattgaatggcataagtttgaaacgagtgaagaaataatttctacttacttattagacgacgtattatacacgggtgttaatggggcggtatacacattttcaaataataaactaaacaaaactggtttaactaataataattatataacaacatctataaaagtagaggatgcggataaggatacattagtatgcggaaccaataacggaaatcccaaatgttggaaaatagacggttcagacgacccaaaacatagaggtagaggatacgctccttatcaaaatagcaaagtaacgataatcagtcacaacggatgtgtactatctgacataaacatatcaaaagaaggaattaaacgatggagaagatttgacggaccatgtggttatgatttattcacggcggataacgtaattccaaaagatggtttacgaggagcattcgtcgataaagacggtacttatgacaaagtttacattcttttcactgatactatcggctcaaagagaattgtcaaaattccgtatatagcacaaatgtgcctaaacgacgaaggtggtccatcatcattgtctagtcatagatggtcgacgtttctcaaagtcgaattagaatgtgatatcgacggaagaagttatagacaaattattcattctagaactataaaaacagataatgatacgatactatatgtattcttcgatagtccttattccaagtccgcattatgtacctattctatgaataccattaaacaatctttttctacgtcaaaattggaaggatatacaaagcaattgccgtctccagctcctggtatatgtttaccagctggaaaagttgttccacataccacgtttgaagtcatagaacaatataatgtactagatgatattataaagcctttatctaaccaacctatcttcgaaggaccgtctggtgttaaatggttcgatataaaggagaaggaaaatgaacatcgggaatatagaatatacttcataaaagaaaattctatatattcgttcgatacaaaatctaaacaaactcgtagctcgcaagtcgatgcgcgactattttcagtaatggtaactgcgaaaccgttatttatagcagatatagggataggagtaggaatgccacaaatgaaaaaaatacttaaaatgtaatcttaatcgagtacaccacacgacaatgaacaaacataagacagattatgctggttatgcttgctgcgtaatatgcggtctaattgtcggaattatttttacagcgacactattaaaagttgtagaacgtaaattagttcatacaccattaatagataaaacgataaaagatgcatatattagagaagattgtcctactgactggataagctataataataaatgtatccatttatctactgatcgaaaaacctgggaggaaggacgtaatgcatgcaaagctctaaattcaaattcggatctaattaagatagagactccaaacgagttaagttttttaagaagccttagacgaggctattgggtaggagaatccgaaatattaaaccagacaaccccatataattttatagctaagaatgccacgaagaatggaactaaaaaacggaaatatatttgtagcacaacgaatactcccaaactgcattcgtgttacactatataacaattacactacatttttatcataccactacttcggttagatgttttagaaaaaaataaatatcgccgtaccgttcttgtttttataaaaataacaattaacaattatcaaattttttctttaatattttacgtggttgaccattcttggtggtaaaataatctcttagtgttggaatggaatgctgtttaatgtttccacactcatcgtatattttgacgtatgtagtcacatcgtttacgcaatagtcagactgtagttctatcatgcttcctacatcagaaggaggaacagttttaaagtctcttggttttaatctattaccgttagttttcatgaaatcctttgttttatccacttcacattttaaataaatgtccactatacattcttttgttaattttactagatcgtcatgggtcatagaatttataggttccgtagtccatggatccaaactagcaaacttcgcgtatacggtatcgcgattagtgtatacaccaactgtatgaaaattaagaaaacagtttaataaatcaacagaaatatttaatcctccgtttgatacagatgcgccatatttatggatttcggattcacacgttgtttgtctgaggtgttcgtctagtgttgcttctacgtaaacttcgattcccatatattctttattgtcagaatcgcataccgatttatcatcatacactgtttgaaaactaaatggtatacacatcaaaataataaataataacgagtacattctgcaatattgttatcgtaattggaaaaatagtgttcgagtgagttggattatgtgagtattggattgtatattttattttatattttgtaataagaataaaatgctaatgtcaagtttattccaatagatgtcttattaaaaacatatataataaataacaatggctgaatggcataaaattatcgaggatatctcaaaaaataataagttcgaggatgccgccatcgttgattacaagactacaaagaatgttctagctgctattcctaacagaacatttgccaagattaatccgggtgaaattattcctctcatcactaatcgtaatattctaaaacctcttattggtcagaaatattgtattgtatatactaactctctaatggatgagaacacgtatgctatggagttgcttactgggtacgcccctgtatctccgatcgttatagcgagaactcataccgcacttatatttttgatgggtaagccaacaacatccagacgtgacgtgtatagaacgtgtagagatcacgctacccgtgtacgtgcaactggtaattaaaataaaaagtaatattcatatgtagtgtcaattttaaatgatgatgatgaaatggataatatccatattgacgatgtcaataatgccggtattggcatacagttcatcgatttttagatttcattcagaggatgtggaattatgttatgggcatttgtattttgataggatctataatgtagtaaatataaaatataatccgcatattccatatagatataattttattaatcgcacgttaaccgtagatgaactagacgataatgtcttttttacacatggttattttttaaaacacaaatatggttcacttaatcctagtttgattgtctcattatcaggaaacttaaaatataatgatatacaatgctcagtaaatgtatcgtgtctcattaaaaatttggcaacgagtacatctactatattaacatctaaacataagacttattctctacatcggtccacgtgtattactataataggatacgattctattatatggtataaagatataaatgacaagtataatgacatctatgattttactgcaatatgtatgctaatagcgtctacattgatagtgaccatatacgtgtttaaaaaaataaaaatgaactcttaattatgctatgctattagaaatggataaaatcaaaattacggttgattcaaaaattggtaatgttgttaccatatcgtataacttggaaaagataactattgatgtcacacctaaaaagaaaaaagaaaaggatgtattattagcgcaatcagttgctgtcgaagaggcaaaagatgtcaaggtagaagaaaaaaatattatcgatattgaagatgacgatgatatggatgtagaaagcgcgtaatacgatctataaaaataagtatataaatactttttatttactgtactcttactgtgtagtggtgataccctactcgattatttttttaaaaaaaaaatacttattctgattcttctagccatttccgtgttcgtttgaatgccacatcgacgtcaaagataggggagtagttgaaatctagttctgcattgttggtacgcacctcaaatgtagtgttggatatcttcaacgtatagttgttgagtagtgatggttttctaaatagaattctcttcatatcattcttgcacgcgtacatttttagcatccatcttggaatcctagatccttgttctattcccaatggtttcatcaatagaagattaaacatatcgtacgaacacgatggagagtaatcgtagcaaaagtaagcatttcctttaatcttagatcccggatactggatatattttgcagccaacacgtgcatccatgcagcatttcctacatatacccggctatgcaccgcgtcatcatcgactgtacgatacataatgttaccgtgttgcttacattgctcgtaaaagactttcatcaatttgtctccttctccgtaaattccagtgggtcttaggcaacaagtatacaattttgctccattcatgattacggaattattggctttcataaccagttgctcggccatacgtttactttttgcgtatacatgtcctggtgatatatcataaagggtatgctcatggccgatgaatggatcaccgtgtttattgggtcctattgcttccatgctactagtatagatcaaatacttgattcctaggtccacacaagctgccaaaatagtctgtgttccataatagtttactttcatgatttcattatcggtgtattttccaaatacatccactagagcagccgtatgaataatcagatttaccccatctagcgcttctctcaccttatcaaagtcgtttatatcacattgtatatagtttataaccttaactttcgaggttattggttgtggatcttctacaatatctatgactctgatttcttgaacatcatctgcactaattaacagttttactatatacctgcctagaaatccggcaccaccagtaaccgcgtacacggccattgctgccactcataatatcagactacttattctattttactaaataatggctgtttgtataatagaccacgataatatcagaggagttatttactttgaaccagtccatggaaaagataaagttttaggatcagttattggattaaaatccggaacgtatagtttgataattcatcgttacggagatattagtcaaggatgtgattccataggcagtccagaaatatttatcggtaacatctttgtaaacagatatggtgtagcatatgtttatttagatacagatgtaaatatatttacaattattggaaaggcgttatctatttcaaaaaatgatcagagattagcgtgtggagttattggtatttcttacataaatgaaaagataatacattttcttacaattaacgagaatggcgtttgatatatcagttaatgcgtctaaaacaataaatgcattagtttacttttctactcagcaaaataaattagtcatacgtaatgaagttaatgatacacactacactgtcgaatttgatagggacaaagtagttgacacgtttatttcatataatagacataatgacaccatagagataagaggggtgcttccagaggaaactaatattggttgcgcggttagtatgacttacttgtataataagtatagttttaaactgattttagcagaatatataagacacagaaatactatatccggcaatatttattcggcattgatgacactagatgatttggctattaaacagtatggagacattgatctattatttaatgagaaacttaaagtagactccgattcgggactatttgactttgtcaactttgtaaaggatatgatatgttgtgattctagaatagtagtagctctatctagtctagtatctaaacattgggaattgacaaataaaaaatataggtgtatggcattagccgaacatatatctgatagtattccaatatctgagctatctagactacgatacaatctatgtaagtatctacgcggacacactgagagcatagaggataaatttgattattttgaagacgatgattcgtctacatgttctgccgtaaccgacagggaaacggatgtataattttttttatagcgtgaaggatatgataaaaaatataattgttgtatttatcccattccaatcaccttatatgattctgtaacacaataaaggagtcttatagatgtatagaggtcagatactggtttgataaactgtttattccacataagtatgtttgactttatggttagacccgcatactttaacaaatcactgaaaattggagttaggtattgacctctcagaatcagttgccgttctggaacattaaatgtattttttatgatatactccaacgcatttatgtgggcatacaacaagtcattactaatggaatattccaagagttttagttgtctagtatttaacaagagaagagatttcaacagactgtttatgaactcgaatgccgcctcattgtcgcttatattgatgatgtcgaattctcccaatatcatcaccgatgagtagctcatcttgttatcgggatccaagttttctaaagatgtcattaaaccctcgatcatgaatggatttatcatcatcgtttttatgttggacatgagcttagtccgtttgtccacatctatagaagatgatttctgaattatttcatatatctctctctttaactccaggaacttgtcaggatggtctactttaatatgttctcgtctaagagatgaaaatctttggatggttgcacgcgacttttctctaaaggatgacgttgcccaagatcctctcttaaatgaatccatcttatccttggacaagatggacagtctattttccttagatggtttaatatttttgttacccatgatctataaaggtagacctaatcgtctcggatgaccatatatttattttcagttttattatacgcataaattgtaaaaaatatgttaggtttacgaaaatgtctcgtggggcattaatcgtttttgaaggattggacaaatctggaaaaacaacacaatgtatgaacatcatggaatcaataccttcaaacacaataaaataccttaactttcctcagagatccactgtcactggaaagatgatagatgactatctaactcgtaaaaaaacctataatgatcatatagttaatctattattttgtgcaaatagatgggagtttgcatcttttatacaagaacaactagaacagggaattactttaatagttgatagatacgcattttctggagtagcgtatgccgccgctaaaggcgcgtcaatgactctcagtaagagttatgaatctggattgcctaaacccgacttagttatattcttggaatctggtagcaaagaaattaatagaaacgtcggtgaggaaatttatgaagatgttacattccaacaaaaggtattacaagaatataaaaaaatgattgaagaaggagatattcattggcaaattatttcttctgaattcgaggaagatgtaaagaaggagttgattaagaatatagttatagaggctatacacacggttactggaccagtggggcaactgtggatgtaatagtgaaattacattttttataaatagatgttagtacagtgttataaatggatgaagcatattactctggcaacttggaatcagtactcggatacgtgtccgatatgcataccgaactcgcatcaatatctcaattagttattgccaagatagaaactatagataatgatatattaaacaaggacattgtaaattttatcatgtgtagatcaaacttggataatccatttatctctttcctagatactgtatatactattatagatcaagagaactatcagactgagttgattaattcattagacgacaatgaaattatcgattgtatagttaataagtttatgagcttttataaggataacctagaaaatatagtagatgctatcattactctaaaatatataatgaataatccagattttaaaactacgtatgccgaagtactcggttccagaatagccgatatagatattaaacaagtgatacgtaagaatatactacaattgtctaataatatccgcgaacgatatttgtgaaaatattaaaaaaaaatactttttttattaaatgacgtcttttcgtgaatttagaaaattatgctgtgctatatatcacgcatcaggatataaagaaaaatctaaattaattagagactttataacagatagggatgataaatatttgatcattaagctattgcttcccggattagacgatagaatttataacatgaacgataaacaaattataaaattatatagtataatatttaaacaatctcaggaagatatgctacaagatttaggatacggatatataggagacactattaggactttcttcaaagagaacacagaaatccgtccacgagataaaagcattttaactttagaagaagtggatagttttttaactacgttatcatccgtaactaaagaatcgcatcaaataaaattattgactgatgtagcatctgtttgtacatgtaatgatttaaaatgtgtagtcatgcttattgataaagatctaaaaattaaagcgggtcctcggtacgtacttaacgctattagtcctaatgcctatgatgtgtttagaaaatctaataacttgaaagagataatagaaaattcatctaaacaaaatctagactctatatctatttctgttatgactccaattaatcccatgttagcggaatcgtgtgattctgtcaataaggcgtttaaaaaatttccatcaggaatgtttgcggaagtcaaatacgatggtgaaagagtacaagttcataaaaataataacgagtttgccttctttagtagaaacatgaaaccagtactctctcataaagtggattatctcaaagaatacataccgaaagcatttaaaaaagctacgtctatcgtattggattctgaaattgttcttgtagacgaacataatgtaccgctcccgtttggaagtttaggtatacacaaaaagaaagaatataaaaactctaacatgtgtttgttcgtgtttgactgtttgtactttgatggattcgatatgacggacattccattgtacgaacgaagatcttttctcaaagatgttatggttgaaatacccaatagaatagtattctcagagttgacgaatattagtaacgagtctcagttaactgacgtattggatgatgcactaacgagaaaattagaaggattggtcttaaaagatattaatggagtatacgaaccgggaaagagaagatggttaaaaataaagcgagactatttgaacgagggttccatggcagattctgccgatttagtagtactaggtgcctactatggtaaaggagcaaagggtggtatcatggcagtctttctaatgggttgttacgacgatgaatccggtaaatggaagacggttaccaagtgttcaggacacgatgataatacgttaagggagttgcaagaccaattaaagatgattaaaattaacaaggatcccaaaaaaattccagagtggttagtagttaataaaatctatattcccgattttgtagtagaggatccgaaacaatctcagatatgggaaatttcaggagcagagtttacatcttccaagtcccataccgcaaatggaatatccattagatttcctagatttactaggataagagaggataaaacgtggaaagaatctactcatctaaacgatttagtaaacttgactaaatcttaatagttacatacaaactgaaaattaaaataacactatttagttggtggtcgccatggatggtgttattgtatactgtctaaacgcgctagtaaaacatggcgaggaaataaatcatataaaaaatgatttcatgattaaaccatgttgtgaaagagtttgtgaaaaagtcaagaacgttcacattggcggacaatctaaaaacaatacagtgattgcagatttgccatatatggataatgcggtatccgatgtatgcaattcactgtataaaaagaatgtatcaagaatatccagatttgctaatttgataaagatagatgacgatgacaagactcctactggtgtatataattattttaaacctaaagatgccattcctgttatcatatctataggaaaggataaagatgtctgtgaactattaatctcatcagacatatcgtgtgcatgcgtggagttaaattcatatcacgtagccattcttcccatggatgtttccttttttaccaaaggaaatgcatcattgattattctcctgtttgatttctctatcgatgcggcacctctcttaagaagtgtaaccgataataatgttattatatctagacaccagcgtctacatgacgagcttccgagttccaattggttcaagttttacataagtataaagtccgactattgttctatattatatatggttgttgatggatctgtgatgcatgcgatagctgataatagaactcacgcaattattagcaaaaatatattagacaatactacgattaacgatgagtgtagatgctgttattttgaaccacagattaggattcttgatagagatgagatgctcaatggatcatcgtgtgatatgaacagacattgtattatgatgaatttacctgatgtaggcgaatttggatctagtatgttggggaaatatgaacctgacatgattaagattgctctttcggtggctggtaatttaataagaaatcgagactacattcccgggagacgaggatatagctactacgtttacggtatagcctctagataatttttttaagcacgaaataaaaaacataattttaaaccaatctatttcatactattttgtgtgatcaccatggacataaagatagatattagtatttctggtgataaatttacggtgactactaggagggaaaatgaagaaagaaaaaaatatctacctctccaaaaagaaaaaactactgatgttatcaaacctgattatcttgagtacgatgacttgttagatagagatgagatgtttactattctagaggaatattttatgtacagaggtctattaggcctcagaataaaatatggacgactctttaacgaaattaaaaaattcgacaatgatgcggaagaacaattcggtactatagaagaactcaagcagaaacttagattaaattctgaagagggagcagataactttatagattatataaaggtacaaaaacaggatatcgtcaaacttactgtatacgattgcatatctatgataggattgtgtgcatgcgtggtagatgtttggagaaatgagaaactgttttctagatggaaatattgtttacgagcgattaaactgtttattgatgatcacatgcttgataagataaaatctatactgcagaatagactagtatatgtggaaatgtcatagaaagttaaaagttaatgagagcaaaaatatataaggttgtattccatatttgttatttttttctgtaatagttagaaaaatacattcgatggtctatctatcagattattatgtgttataaggtactttttctcataataaactagagtatgagtaagatagtgtttttcaaaacatataaatctaaaattgatggatgagatatacagctattaatttcgaaaatatattttaatctgataactttaaacatggatttttaatggtggtttaacgttttaaaaaaagattttgttattgtagtatatgataatattaaaagatggatataaagaatttgctgactgcatgtactattttttacattactacattggctacggcagatatacctacttcgtcactgccacacgctccggtaaacggggcatgtgacgagggagaatatcttgataagaggcataatcaatgttgtaatcagtgtccacctggagaatttgccaaggttagatgtaatggtaacgataacacaaaatgtgaacgctgcccacctcatacatataccgcaatccccaattactctaatggatgtcatcaatgtagaaaatgcccaacaggatcatttgataaggtaaagtgtaccggaacacagaacagtaaatgttcgtgtcttcctggttggtattgcgctactgattcttcacagactgaagattgtcgagattgtataccaaaaaggagatgtccatgcggatactttggtggaatagatgaacaaggaaatcctatttgtaaatcgtgttgtgttggtgaatattgcgactacctacgtaattatagacttgatccatttcctccatgcaaactatctaaatgtaattaattatgattttgatgataatgttaccatacattatatcgctacttggttagtgtattattcagtatgaagacctattaataattacttatcttttgacgatcttgttataattataatataaaaatacttatggcatagtaactcataattgctgacgcgataaattcgtaataatctgttttgttcaaatttttataaggaatctacaggcataaaaataaaaatataatttataatatactcttacagcgcgccatcatgaataacagcagtgaattgattgctgttattaatggatttagaaatagtggacgattttgtgatattaatatagttattaatgatgaaaggataaacgctcacagactcatcctatctggagcctccgaatatttttccattctgttttccaataattttatcgattctaatgaatacgaagttaatctaagtcatttagattatcaaagtgttaacgatttgatcgattacatttatgggatacctttgagcctaactaacgataacgtgaaatatattctttcaaccgctgattttttacaaattggatctgctattacggagtgtgaaaattacatacttaaaaatctttgttctagaaactgtatcgatttctacatatacgctgataaatataataacaagaaaatagaatcagcgtcgtttaacacaatattacaaaatattttgagactcatcaacgatgaaaactttaaatacttaacagaggaatcaatgataaaaattttaagcgatgatatgttaaatataaaaaatgaggatttcgccccactaattctcattaaatggttagagagtactcaacaaccatgcaccgtcgagttacttaaatgcctcagaatatcattgctttccccacaagttataaaatcactttatagtcatcgactggttagttcaatctacgaatgtataacattcttaaacaatatagcattcttggatgaatcatttcctagataccatagcatcgagttgatatctatcggtataagtaattcgcatgataagatttccataaactgctacaatcataaaaaaaatacatgggaaatgatatcttcacgtagatataggtgtagtttcgcagtggccgtcctggataatattatctatatgatgggtggatatgatcagtccccgtatagaagttcaaaggttatagcgtacaatacatgtacaaattcttggatatatgatataccagagctaaaatatcctcgttctaattgtgggggactggctgatgacgaatacatttattgtataggcggcatacgcgatcaggattcatcgttgacatctagtattgatagatggaagccatcaaaaccatattggcagaagtatgctaaaatgcgcgaaccaaaatgtgatatgggggttgcgatgttaaacggattaatatatgttataggtggaatcgttaaaggtgacacgtgtaccgacgcactagagagtttatcagaagatggatggatgaagcatcaacgtcttccaataaaaatgtccaatatgtcgacgattgttcatgatggcaagatttatatatctggaggttacaacaatagtagtgtagttaatgtaatatcgaatctagtccttagctataattcgatatatgatgaatggaccaaattatcatcattaaacattcctagaattaatcccgctctatggtcagcgcataataaattatatgtaggaggaggaatatctgatgatgttcgaactaatacatctgagacatacgacaaagaaaaagattgttggacattggataatggtcacgtgttaccacgcaattatataatgtataaatgcgaaccgattaaacataaatatccattggaaaaaacacagtacacgaatgattttctaaagtatttggaaagttttataggtagttgatagaacaaaatacataattttgtaaaaataaatcactttttatactaatatgacacgattaccaatacttttgttactaatatcattagtatacgctacaccttttcctcagacatctaaaaaaataggtgatgatgcaactctatcatgtaatcgaaataatacaaatgactacgttgttatgagtgcttggtataaggagcccaattccattattcttttagctgctaaaagcgacgtcttgtattttgataattataccaaggataaaatatcttacgactctccatacgatgatctagttacaactatcacaattaaatcattgactgctagagatgccggtacttatgtatgtgcattctttatgacatcaactacaaatgacactgataaagtagattatgaagaatactccacagagttgattgtaaatacagatagtgaatcgactatagacataatactatctggatctacacattcaccggaaactagttctaagaaacctgattatatagataattctaattgctcgtcggtattcgaaatcggtacccggggatcagcttgcatgcctgcagcaattcccgaggctgtagccgacgatggtgcgccaggagagttgttgattcattgtttgcctccctgctgcggtttttcaccgaagttcatgccagtccagcgtttttgcagcagaaaagccgccgacttcggtttgcggtcgcgagtgaagatccctttcttgttaccgccaacgcgcaatatgccttgcgaggtcgcaaaatcggcgaaattccatacctgttcaccgacgacggcgctgacgcgatcaaagacgcggtgatacatatccagccatgcacactgatactcttcactccacatgtcggtgtacattgagtgcagcccggctaacgtatccacgccgtattcggtgatgataatcggctgatgcagtttctcctgccaggccagaagttctttttccagtaccttctctgccgtttccaaatcgccgctttggacataccatccgtaataacggttcaggcacagcacatcaaagagatcgctgatggtatcggtgtgagcgtcgcagaacattacattgacgcaggtgatcggacgcgtcgggtcgagtttacgcgttgcttccgccagtggcgcgaaatattcccgtgcaccttgcggacgggtatccggttcgttggcaatactccacatcaccacgcttgggtggtttttgtcacgcgctatcagctctttaatcgcctgtaagtgcgcttgctgagtttccccgttgactgcctcttcgctgtacagttctttcggcttgttgcccgcttcgaaaccaatgcctaaagagaggttaaagccgacagcagcagtttcatcaatcaccacgatgccatgttcatctgcccagtcgagcatctcttcagcgtaagggtaatgcgaggtacggtaggagttggccccaatccagtccattaatgcgtggtcgtgcaccatcagcacgttatcgaatcctttgccacgcaagtccgcatcttcatgacgaccaaagccagtaaagtagaacggtttgtggttaatcaggaactgttcgcccttcactgccactgaccggatgccgacgcgaagcgggtagatatcacactctgtctggcttttggctgtgacgcacagttcatagagataaccttcacccggttgccagaggtgcggattcaccacttgcaaagtcccgctagtgccttgtccagttgcaaccacctgttgatccgcatcacgcagttcaacgctgacatcaccattggccaccacctgccagtcaacagacgcgtggttacagtcttgcgcgacatgcgtcaccacggtgatatcgtccacccaggtgttcggcgtggtgtagagcattacgctgcgatggattccggcatagttaaagaaatcatggaagtaagactgctttttcttgccgttttcgtcggtaatcaccattcccggcgggatagtctgccagttcagttcgttgttcacacaaacggtgatacgtacacttttcccggcaataacatacggcgtgacatcggcttcaaatggcgtatagccgccctgatgctccatcacttcctgattattgacccacactttgccgtaatgagtgaccgcatcgaaacgcagcacgatacgctggcctgcccaacctttcggtataaagacttcgcgctgataccagacgttgcccgcataattacgaatatctgcatcggcgaactgatcgttaaaactgcctggcacagcaattgcccggctttcttgtaacgcgctttcccaccaacgctgatcaattccacagttttcgcgatccagactgaatgcccacaggccgtcgagttttttgatttcacgggttggggtttctacaggacgtaacattctagtcgaggaattcatttatagcatagaaaaaaacaaaatgaaattctactatatttttacatacatatattctaaatatgaaagtggtgattgtgactagcgtagcatcgcttctagacatctatatactatatagtaataccaatactcaagactacgaaactgatacaatctcttatcatgtgggtaatgttctcgatgtcgatagccatatgcccggtagttgcgatatacataaactgatcactaattccaaacccacccgctttttatagtaagtttttcacccataaataataaatacaataattaatttctcgtaaaagtagaaaatatattctaatttattgcacggtaaggaagtagaatcataaagaacagtgacggatccccgatccccgacctgcaggcatgcaagctcgactccggaaccaattactgataatgtagaagatcatacagacaccgtcacatacactagtgatagcattaatacagtaagtgcatcatctggagaatccacaacagacgagactccggaaccaattactgataaagaagatcatacagttacagacactgtctcatacactacagtaagtacatcatctggaattgtcactactaaatcaaccaccgatgatgcggatctttatgatacgtacaatgataatgatacagtaccaccaactactgtaggcggtagtacaacctctattagcaattataaaaccaaggactttgtagaaatatttggtattaccgcattaattatattgtcggccgtggcaattttctgtattacatattatatatataataaacgttcacgtaaatacaaaacagagaacaaagtctagatttttgacttacataaatgtctgggatagtaaaatctatcatattgagcggaccatctggtttaggaaagacagccatagccaaaagactatgggaatatatttggatttgtggtgtcccataccactagatttcctcgtcctatggaacgagaaggtgttgattaccattacgttaacagagaggccatctggaagggaatagccgccggaaactttctagaacatactgagtttttaggaaatatttacggaacttctaaaacagctgtgaatacagcggctattaataatcgtatttgtgtgatggatctaaacatcgacggtgttagaagtcttaaaaatacgtacctaatgccttactcggtgtatataagacctacctctcttaaaatggttgagaccaagcttcgtcgtagaaacactgaagctaacgatgagattcatcgtcgtgtgatgttggcaaaaactgacatggatgaggcaggtgaagccggtctattcgacactattatcattgaagatgatgtgaatttagcatatagtaagttaattcagatactacaggaccgtattagaatgtattttaacactaattagagacttaagacttaaaacttgataattaataatataactcgtttttatatgtgtctatttcaacgtctaatgtattagttaaatattaaaacttaccacgtaaaacttaaaatttaaaatgatatttcattgacagatagatcacacattatgaactttcaaggacttgtgttaactgacaattgcaaaaatcaatgggtcgttggaccattaataggaaaaggtggattcggtagtatttatactactaatgacaataattatgtagtaaaaatagagcccaaagctaacggatcattatttaccgaacaggcattttatactagagtacttaaaccatccgttatcgaagaatggaaaaaatctcacaatataaagcacgtaggtcttatcacgtgcaaggcatttggtctatacaaatccattaatgtggaatatcgattcttggtaattaatagattaggtgcagatctagatgcggtgatcagagccaataataatagactaccaaaaaggtcggtgatgttgatcggaatcgaaatcttaaataccatacaatttatgcacgagcaaggatattctcacggagatattaaagcgagtaatatagtcttagatcaaatagataagaataaattatatctagtggattacggattggtttctaaattcatgtctaatggcgaacatgttccatttataagaaatccaaataaaatggataacggtactctagaatttacacctatagattcgcataaaggatacgttgtatctagacgtggagatctagaaacacttggatattgtatgattagatggttgggaggtatcttaccatggactaagatatctgaaacaaagaattgtgcattagtaagtgccacaaaacagaaatatgttaacaatactgcgactttgttaatgaccagtttgcaatatgcacctagagaattgctgcaatatattaccatggtaaactctttgacatattttgaggaacccaattacgacaagtttcggcacatattaatgcagggtgtatattattaagtgtggtgtttggtcgataaaaattaaaaaataacttaatttattattgatctcgtgtgtacaaccgaaatcatggcgatgttttacgcacacgctctcggtgggtacgacgagaatcttcatgcctttcctggaatatcatcgactgttgccaatgatgtcaggaaatattctgttgtgtcagtttataataacaagtatgacattgtaaaagacaaatatatgtggtgttacagtcaggtgaacaagagatatattggagcactgctgcctatgtttgagtgcaatgaatatctacaaattggaaatccgatccatgatcaagaaggaaatcaaatctctatcatcacatatcgccacaaaaactactatgctctaagcggaatcgggtacgagagtctagacttgtgtttggaaggagtagggattcatcatcacgtacttgaaacaggaaacgctgtatatggaaaagttcaacatgattattctactatcaaagagaaggccaaagaaatgagtgcacttagtccaggacctatcatcgattaccacgtctggataggagattgtatctgtcaagttactgctgtggacgtacatggaaaggaaattatgaaaatgagattcaaaaagggtgcggtgcttccgatcccaaatctggtaaaagttaaacttggggagaatgatacagaaaatctttcttctactatatcggcggcaccatcgaggtaaccacctctctggaagacagcgtgaatcatgtactcatgaaacgtttggaaactatacgccatatgtggtctgttgtatatgatcattttgatattgtgaatggtaaagaatgctgttatgtgcatacgcattcatctaatcaaaatcctataccgagtactgtaaaaacaaatttgtacatgaagactatgggatcatgcattcaaatggattccatggaagctctagagtatcttagcgaactgaaggaatcaggtggatggagtcccagaccagaaatgcaggaatttgaatatccagatggagtggaagacactgaatcaattgagagattggcagaggagttcttcaatagatcagaacttcaggctggtgaatcagtcaaatttggtaattctattaattgttaaacatacatctgtttcagctaagcaactaagaacacgtatacggcagcagcttccttctatactctcatcttttaccaacacaaagggtggatatttgttcattggagttgataataatacacacaaagtatttggattcacggtgggttacgactacctcagactgatagagaatgatatagaaaagcatatcaaaagacttcgtgttgtgcatttctgtgagaagaaagaggacatcaagtacgcgtgtcgattcatcaaggtatataaacctggggatgagactacctcgacatacgtgtgcgctatcaaagtggaaagatgctgttgtgctgtgtttgcagattggccagaatcatggtatatggatactaatggtatcaagaagtattctccagatgaatgggtgtcacatataaaattttaattaatgtaactatagagaacaaataataaggttgtaatatcatatagacaataactaacaattaattagtaactgttatctcttttttaactaaccaactaactatatacctattaatacatcgtaattatagttcttaacatctattaatcattaattcgcttctttaattttttataaactaacattgttaattgaaaagggataacatgttacagaatataaattatatatggatttttttaaaaaggaaatacttgactggagtatatatttatctcttcattatatagcacgcgtgttttccaatttttccacatcccatataatacaggattataatctcgttcgaacatacgagaaagtggataaaacaatagttgattttttatctaggttgccaaatttattccatattttagaatatggggaaaatattctacatatttattctatggatgatgctaatacgaatattataattttttttctagatagagtattaaatattaataagaacgggtcatttatacacaatctcgggttatcatcatccattaatataaaagaatatgtatatcaattagttaataatgatcatccagataataggataagactaatgcttgaaaatggacgtagaacaagacattttttgtcctatatatcagatacagttaatatctatatatgtattttaataaatcatggattttatatagatgccgaagacagttacggttgtacattattacatagatgtatatatcactataagaaatcagaatcagaatcatacaatgaattaattaagatattgttaaataatggatcagatgtagataaaaaagatacgtacggaaacacaccttttatcctattatgtaaacacgatatcaacaacgtggaattgtttgagatatgtttagagaatgctaatatagactctgtagactttaatagatatacacctcttcattatgtctcatgtcgtaataaatatgattttgtaaagttattaatttctaaaggagcaaatgttaatgcgcgtaataaattcggaactactccattttattgtggaattatacacggtatctcgcttataaaactatatttggaatcagacacagagttagaaatagataatgaacatatagttcgtcatttaataatttttgatgctgttgaatctttagattatctattatccagaggagttattgatattaactatcgtactatatacaacgaaacatctatttacgacgctgtcagttataatgcgtataatacgttggtctatctattaaacaaaaatggtgattttgagacgattactactagtggatgtacatgtatttcggaagcagtcgcaaacaacaacaaaataataatggaagtactattgtctaaacgaccatctttgaaaattatgatacagtctatgatagcaattactaaacataaacagcataatgcagatttattgaaaatgtgtataaaatatactgcgtgtatgaccgattatgatactcttatagatgtacagtcgctacagcaatataaatggtatattttaagatgtttcgatgaaatagatatcatgaagagatgttatataaaaaataaaactgtattccaattagttttttgtatcaaagacattaatactttaatgagatacggtaaacatccttctttcgtgaaatgcactagtctcgacgtatacggaagtcgtgtacgtaatatcatagcatctattagatatcgtcagagattaattagtctattatccaagaagctggatcctggagataaatggtcgtgttttcctaacgaaataaaatataaaatattggaaaactttaacgataacgaactatccacatatctaaaaatcttataaacattattaaaatataaaatctaagtaggataaaatcacactacatcattgtttccttttagtgctcgacagtgtatactatttttaacgctcataaataaaaatgaaaacgatttccgttgttacgttgttatgcgtactacctgctgttgtttattcaacatgtactgtacccactatgaataacgctaaattaacgtctaccgaaacatcgtttaatgataaccagaaagttacgtttacatgtgatcagggatatcattctttggatccaaatgctgtctgtgaaacagataaatggaaatacgaaaatccatgcaaaaaaatgtgcacagtttctgattatgtctctgaactatataataaaccgctatacgaagtgaattccaccatgacactaagttgcaacggcgaaacaaaatattttcgttgcgaagaaaaaaatggaaatacttcttggaatgatactgttacgtgtcctaatgcggaatgtcaacctcttcaattagaacacggatcgtgtcaaccagttaaagaaaaatactcatttggggaatatatgactatcaactgtgatgttggatatgaggttattggtgcttcgtacataagttgtacagctaattcttggaatgttattccatcatgtcaacaaaaatgtgatatgccgtctctatctaacggattaatttccggatctacattttctatcggtggcgttatacatcttagttgtaaaagtggttttacactaacggggtctccatcatccacatgtatcgacggtaaatggaatcccatactcccaatatgtgtacgaactaacgaaaaatttgatccagtggatgatggtcccgacgatgagacagatttgagcaaactctcgaaagacgttgtacaatatgaacaagaaatagaatcgttagaagcaacttatcatataatcatagtggcgttgacaattatgggcgtcatatttttaatctccgttatagtattagtttgttcctgtgacaaaaataatgaccaatataagttccataaattgctaccgtaaatataaatccgttaaaataattaataatttaataacaaacaagtatcaaaagattaaagacttatagctagaatcaattgagatgtcttcttcagtggatgttgatatctacgatgccgttagagcatttttactcaggcactattataacaagagatttattgtgtatggaagaagtaacgccatattacataatatatacaggctatttacaagatgcgccgttataccgttcgatgatatagtacgtactatgccaaatgaatcacgtgttaaacaatgggtgatggatacacttaatggtataatgatgaatgaacgcgatgtttctgtaagcgttggcaccggaatactattcatggaaatgtttttcgattacaataaaaatagtatcaacaatcaactaatgtatgatataattaatagcgtatctataattctagctaatgagagatatagaagcgcttttaacgacgatggtatatacatccgtagaaatatgattaacaagttgtacggatacgcatctctaactactattggcacgatcgctggaggtgtttgttattatctgttgatgcatctagttagtttgtataaataattatttcaatatactagttaaaattttaagattttaaatgtataaaaaactaataacgtttttatttgtaataggtgcattagcatcctattcgaataatgagtacactccgtttaataaactgagtgtaaaactctatatagatggagtagataatatagaaaattcatatactgatgataataatgaattggtgttaaattttaaagagtacacaatttctattattacagagtcatgcgacgtcggatttgattccatagatatagatgttataaacgactataaaattattgatatgtataccattgactcgtctactattcaacgcagaggtcacacgtgtagaatatctaccaaattatcatgccattatgataagtacccttatattcacaaatatgatggtgatgagcgacaatattctattactgcagagggaaaatgctataaaggaataaaatatgaaataagtatgatcaacgatgatactctattgagaaaacatactcttaaaattggatctacttatatatttgatcgtcatggacatagtaatacatattattcaaaatatgatttttaaaaatttaaaatatattatcacttcagtgacagtagtcaaataacaaacaacaccatgagatatattataattctcgcagttttgttcattaatagtatacatgctaaaataactagttataagtttgaatccgtcaattttgattccaaaattgaatggactggggatggtctatacaatatatcccttaaaaattatggcatcaagacgtggcaaacaatgtatacaaatgtaccagaaggaacatacgacatatccgcatttccaaagaatgatttcgtatctttctgggttaaatttgaacaaggcgattataaagtggaagagtattgtacgggactatgcgtcgaagtaaaaattggaccaccgactgtaacattgactgaatacgacgaccatatcaatttgtacatcgagcatccgtatgctactagaggtagcaaaaagattcctatttacaaacgcggtgacatgtgtgatatctacttgttgtatacggctaacttcacattcggagattctaaagaaccagtaccatatgatatcgatgactacgattgcacgtctacaggttgcagcatagactttgtcacaacagaaaaagtgtgcgtgacagcacagggagccacagaagggtttctcgaaaaaattactccatggagttcgaaagtatgtctgacacctaaaaagagtgtatatacatgcgcaattagatccaaagaagatgttcccaatttcaaggacaaaatggccagagttatcaagagaaaatttaatacacagtctcaatcttatttaactaaatttctcggtagcacatcaaatgatgttaccacttttcttagcatgcttaacttgactaaatattcataactaatttttattaatgatacaaaaacgaaataaaactgcatattatacactggttaacgcccttataggctctaaccattttcaagatgaggtccctgattatagtccttctgttcccctctatcatctactccatgtctattagacgatgtgagaagactgaagaggaaacatggggattgaaaatagggttgtgtataattgccaaagatttctatcccgaaagaactgattgcagtgttcatctcccaactgcaagtgaaggattgataactgaaggcaatggattcagggatatacgaaacaccgataaattataaaaaaagcaatgtgtccgctgtttccgttaataatactattttcgtaactggcggattattcataaataactctaatagcacgatcgtggttaacaatatggaaaaacttgacatttataaagacaaacaatggtcgattatagaaatgcctatggctagggtatatcacggcattgactcgacatttggaatgttatattttgccggaggtctatccgttaccgaacaatatggtaatttagagaaaaacaacgagatatcttgttacaatcctagaacgaataagtggtttgatatttcatatactatttataagatatccatatcatcattgtgtaaactaaataacgtcttctatgtatttagtaaggacattggatatgtggaaaagtatgatggtgcatggaagttagtacatgatcgtctccccgctataaaggcattatcaacttctccttattgattgaaaatgaaaatataaatagtttttatgtatagcagtattaccctatagttttattgcttactactaacatggatacagatgttacaaatgtagaagatatcataaatgaaatagatagagagaaagaagaaatactaaaaaatgtagaaattgaaaataataaaaacattaacaagaatcatcccaatgaatatattagagaagcactcgttattaataccagtagtaatagtgattccattgataaagaagttatagaatgtatcagtcacgatgtaggaatatagatcatatctactaatttttataatcgatacaaaacataaaaaacaactcgttattacatagcaggcatggaatccttcaagtattgttttgataacgatggcaagaaatggattatcggaaatactttatattctggtaattcaatactctataaggtcagaaaaaatttcactagttcgttctacaattacgtaatgaagatagatcacaaatcacacaagccattgttgtctgaaatacgattctatatatctgtattggatcctttgactatcgacaactggacacgggaacgtggtataaagtatttggctattccagatctgtatggaattggagaaaccgatgattatatgttcttcgttataaagaattcgggaagagtattcgccccaaaggatactgaatcagtcttcgaagcatgcgtcactatgataaacacgttagagtttatacactctcgaggatttacccatggaaaaatagaaccgaggaatatactgattagaaataaacgtctttcactaattgactattctagaactaacaaactatacaagagtggaaactcacatatagattacaacgaggacatgataacttcaggaaatatcaattatatgtgtgtagacaatcatcttggagcaacagtttcaagacgaggagatttagaaatgttgggatattgcatgatagaatggttcggtggcaaacttccatggaaaaacgaaagtagtataaaagtaataaaacaaaaaaaagaatataaaaaatttatagctactttctttgaggactgttttcctgaaggaaatgaacctctggaattagttagatatatagaattagtatacacgttagattattctcaaactcctaattatgacagactacgtaaactgtttatacaagattgaaattatattcttttttttatagagtgtggtagtgttacggatatctaatattaatattagactatctctatcgcgctacacgaccaatatcgattactatggatatcttctatgaaaggagagaatgtatttatttctccagcgtcaatctcgtcagtattgacaatactgtattatggagctaatggatccactgctgaacagctatcaaaatatgtagaaacggaggagaacacggataaggttagcgctcagaatatctcattcaaatccatgaataaagtatatgggcgatattctgccgtgtttaaagattcctttttgagaaaaattggcgataagtttcaaactgttgacttcactgattgtcgcactatagatgcaatcaacaagtgtgtagatatctttactgaggggaaaatcaatccactattggatgaaccattgtctcctagcaattagtgccgtatactttaaagcaaaatggttgacgccattcgaaaaggaatttaccagtgattatcccttttacgtatctccgacggaaatggtagacgtaagtatgatgtctatgtacggcaaggcatttaatcacgcatctgtaaaagaatcattcggcaacttttcaatcatagaactgccatatgttggagatactagtatgatggtcattcttccagacaagattgatggattagaatccatagaacaaaatctaacagatacaaattttaagaaatggtgtgactttatggatgctatgtttatagatgttcacattcccaagtttaaggtaacaggctcgtataatctggtggatactctagtaaagtcaggactgacagaggtgttcggttcaactggagattatagcaatatgtgtaatttagatgtgagtgtcgacgctatgatccacaaaacgtatatagatgtcaatgaagagtatacagaagcagctgcagcaacttctgtactagtggcagactgtgcatcaacaattacaaatgagttctgtgcagatcatccgttcatctatgtgattaggcatgttgatggaaaaattcttttcgttggtagatattgctctccgacaactaattgttaaccattttttttaaaaaaaatagaaaaaacatgtggtattagtgcaggtcgttgttcttccaattgcaattggtaagatgacggccaactttagtacccacgtcttttcaccacagcactgtggatgtgacagactgaccagtattgatgacgtcaaacaatgtttgactgaatatatttattggtcgtcctatgcataccgcaacaggcaatgcgctggacaattgtattccacactcctctcttttagagatgatgcggaattagtgttcatcgacattcgcgagctggtaaaaaatatgccgtgggatgatgtcaaagattgtacagaaatcatccgttgttatataccggatgagcaaaaaaccatcagagagatttcggccatcatcggactttgtgcatatgctgctacttactggggaggtgaagaccatcccactagtaacagtctgaacgcattgtttgtgatgcttgagatgctaaattacgtggattataacatcatattccggcgtatgaattgatgagttgtacatcttgacattttctttcttctcttctccctttcttctcttctcccttcctccctcttctccctttcccagaaacaaacttttttacccactataaaataaaatgagtatactacctattatatttcttcctatatttttttattcttcattcgttcagacttttaacgcgtctgaatgtatcgacaaagggcaatattttgcatcattcatggagttagaaaacgagccagtaatcttaccatgtcctcaaataaatacgctatcatccggatataatatattagatattttatgggaaaaacgaggagcggataatgatagaattataccgatagataatggtagcaatatgctaattctgaacccgacacaatcagactctggtatttatatatgcattaccacgaacgaaacctactgtgacatgatgtcgttaaatttgacaatcgtgtctgtctcagaatcaaatatagatcttatctcgtatccacaaatagtaaatgagagatctactggcgaaatggtatgtcccaatattaatgcatttattgctagtaacgtaaacgcagatattatatggagcggacatcgacgccttagaaataagagacttaaacaacggacacctggaattattaccatagaagatgttagaaaaaatgatgctggttattatacatgtgttttagaatatatatacggtggcaaaacatataacgtaaccagaattgtaaaattagaggtacgggatagaataataccttctactatgcaattaccagatggcattgtaacttcaataggtagtaatttgactattgcatgcagagtatcgttgagacctcccacaacggacaccgacgtcttttggataagtaatggtatgtattacgaagaagatgatggggacggaaacggtagaataagtgtagcaaataaaatctatatgaccgataagagacgtgttattacatcccggttaaacattaatcctgtcaaggaagaagatgctacaacgtttacgtgtatggcgtttactattcctagcatcagcaaaacagttactgttagtataacgtgaatgtatgttgttacatttccatgtcaattgagtttataagaatttttatacattatcttccaacaaacaattgacgaacgtattgctatgattaactcccacgatactatgcatattattaatcattaacttgcagactatacctagtgctattttgacatactcgtgttcttgtgtaattgcggtatctatattattaaagtacgtaaatctagctatagttttattatttaattttagataatataccgtctccttatttttaaaaattgccacatcctttattaaatcatgaatgggaatttctatgtcatcgttagtatattgtgaacaacaagagcagatatctataggaaagggtggaatgcgatacattgatctatgtagttttaaaacacacgcgaactttgaagaatttatataaatcattccatcgatacatccttctatgttgacatgtatatatccaggaattcttttattaatgtcaggaaatgtataaactaaaacattgcccgaaagcggtgcctctatctgcgttatatccgttcttaacttacaaaatgtaaccaatacctttgcatgacttgttttgttcggcaacgttagtttaaacttgacgaatggattaattacaatagcatgatccgcgcatctattaagtttttttactttaacgcccttgtatgtttttacagagactttatctaaatttctagtgcttgtatgtgttataaatataacgggatatagaaccgaatcacctaccttagatacccaattacattttatcagatccagataataaacaaattttgtcgccctaactaattctatattgttatatattttacaattggttatgatatcatgtaataacttggagtctaacgcgcatcgtcgtacgtttatacaattgtgatttagtgtagtatatctacacatgtatttttccgcactatagtattctggactagtgataaaactatcgttatatctgtcttcaatgaactcatcgagatattgctctctgtcatattcatacacctgcataaactttctagacatcttacaatccgtgttattttaggatcatatttacatatttacgggtatatcaaagatgttagattagttaatgggaatcgtctataataatgaatattaaacaattatatgaggacttttaccacaaagcatcataaaaatgagtcgtcgtctgatttatgttttaaatatcaaccgcaaatcaactcataaaatacaagagaatgaaatatatacatattttagtcattgcaatatagaccatacttctacagaacttgattttgtagttaaaaactatgatctaaacagacgacaacctgtaactgggtatactgcactacactgctatttgtataataattactttacaaacgatgtactgaagatattattaaatcatgacgtaaatgtaacgatgaaaaccagtagcggacgtatgcctgtttatatattgcttactagatgttgtaatatttcacatgatgtagtgatagatatgatagacaaagataaaaaccacttattacatagagactattccaacctattactagagtatataaaatctcgttacatgttattgaaggaagaggatatcgatgagaacatagtatccactttattagataagggaatcgatcctaactttaaacaagacggatatacagcgttacattattattatttgtgtctcgcacacgtttataaactaggtgagtgtagaaaaccgataacgataaaaaaggccaagcgaattatttctttgtttatacaacatggagctaatctaaacgcgttagataattgtggtaatacaccattccatttgtatcttagtattgaaatgtgtaataatattcatatgactaaaatgctgttgacttttaatccgaatttcaaaatatgtaataatcatggattaacgcctatactatgttatataacttccgactacatacaacacgatattcttgttatgttaatacatcactatgaaacaaatgttggagaaatgccgatagatgagcgtcgtatgatcgtattcgagtttatcaaaacatattctacacgtccggcagattcgataacttatttgatgaataggtttaaaaatataaatatttatacccgctatgaaggaaagacattattacacgtagcatgtgaatataataatacacaagtaatagattatcttatacgtatcaacggagatataaatgcgttaaccgacaataacaaacacgctacacaactcattatagataacaaagaaaattccccatataccattaattgtttactgtatatacttagatatattgtagataagaatgtgataagatcgttggtggatcaacttccatctctacctatcttcgatataaaatcatttgagaaattcatatcctactgtatacttttagatgacacattttacgataggcacgttaagaatcgcgattctaaaacgtatcgatacgcattttcaaaatacatgtcgtttgataaatacgatggtataataactaaatgtcacgacgaaacaatgttactcaaactgtccactgttctagacactacactatatgcagttttaagatgtcataattcgagaaagttaagaagatacctcaacgagttaaaaaaatataataacgataagtcctttaaaatatattctaatattatgaatgagagataccttaatgtatattataaagatatgtacgtgtcaaaggtatatgataaactatttcctgttttcacagataaaaattgtctactaacattactaccttcagaaattatatacgaaatattatacatgctgacaattaacgatctttataatatatcgtatccacctaccaaagtatagttgtatttttctcatgcgatgtgtgtaaaaaaactgatattatataaatattttagtgccgtataataaagatgacgatgaaaatgatggtacatatatatttcgtatcattattgttattgctattccacagttacgccatagacatcgaaaatgaaatcacagaattcttcaataaaatgagagatactctaccagctaaagactctaaatggttgaatccagcatgtatgttcggaggcacaatgaatgatatagccgctctaggagagccattcagcgcaaagtgtcctcctattgaagacagtcttttatcgcacagatataaagactatgtggttaaatgggagaggctagaaaagaatagacggcgacaggtttctaataaacgtgttaaacatggtgatttatggatagccaactatacatctaaattcagtaaccgtaggtatttgtgcaccgtaactacaaagaatggtgactgtgttcagggtatagttagatctcatattaaaaaacctccttcatgcattccaaaaacatatgaactaggtactcatgataagtatggcatagacttatactgtggaattctttacgcaaaacattataataatataacttggtataaagataataaggaaattaatatcgacgacattaagtattcacaaacgggaaaggaattaattattcataatccagagttagaagatagcggaagatacgactgttacgttcattacgacgacgttagaatcaagaatgatatcgtagtatcaagatgtaaaatacttacggttataccgtcacaagaccacaggtttaaactaatactagatccgaaaatcaacgtaacgataggagaacctgccaatataacatgcactgctgtgtcaacgtcattattgatcgacgatgtactgattgaatgggaaaatccatccggatggcttataggattcgattttgatgtatactctgttttaactagtagaggcggtatcaccgaggcgaccttgtactttgaaaatgttactgaagaatatataggtaatacatataaatgtcgtggacacaactattattttgaaaaaacccttacaactacagtagtattggagtaaatatacaatgcatttttatatacattactgaattattattactgaattattattactgaattattattaattatatcgtatttgtgctatagaatggatgaagatacgcgactatctaggtatttgtatctcaccgatagagaacatataaatgtagactctattaaacagttgtgtaaaatatcagatcctaatgcatgttatagatgtggatgtacggctttacatgagtacttttataattatagatcagtcaacggaaaatacaagtatagatacaacggttactatcaatattattcatctagcgattatgaaaattataatgaatattattatgatagaactggtatgaacagtgagagtgataatatatcaatcaaaacagaatatgaattctatgatgaaacacaagatcaaagtacacaactagtaggttacgacattaaactcaaaaccaatgaggatgattttatggctatgatagatcagtgggtgtccatgattatatagatgaatcaattaataaagtagtatatggaagagagtctcacgtaagatggcgggatatatggcaagaacataatgatggcgtatacagtataggaaaggagtgcatagataatatatacgaagacaaccataccgtagacgaattctacaagatagacagcgtatcagatgtagatgacgcggaacacatatctccgataactaaaaaaccatagaatcagttgatgataatacctacatttctaatcttccgtataccatcaaatacaaaatattcgagcaacaataagtattttttatacctttaaaactgataaataaattttttctagtgatattttggcaagatgagaatcctatttctcatcgctttcatgtatgggtgtgttcactcatatgttaacgcggttgaaaccaaatgtccaaatctagacattgtaacatcttctggagaatttcattgttcaggatgtgtggaacatatgcctgagtttagctatatgtattggttggcaaaggatatgaaatcggacgaggataccaagtttatagaacatctgggtgatggcatcaaagaagatgaaaccgttcgtaccacagatagtggaatcgtcactctacgtaaagtccttcatgtgactgatactaataaatttgataattataggttcacttgtgtcctcgctacgctagatggcatttataaaaagaatgtttgctgaagtagttgtgtgctactatttttatttatgatataatctaatggaattaatttgaattgatatttatccaatactaaagattatattagaatcaaattaatcttttatacgagaaaaaataacgacatacgtcgtcaacaaattaaactttttatttattagttaactagcttatagaacttgctcattgttatgtttctaaaacgggtacggcatataggacaattatccgacgcaccggtttctcttcgtgttctatgccatatattgatgcatgttatgcaaaatatatgagtacacgaatccaataaaccaaagtatctatcgttttgagtaaacaacttcatagcaaattccacattctttttctttacttactctatacacgtcctcgtatttatttagtattttgatgatatccaactcagaaatggttgttgtattattgggtgtatttggagtataggtattattagctatgtaccaatttaccaaccctcttaatattgattgataatcacatcggttatccaattaataactaaattgtagtgtatatatagaccatatatgtttctatttttttgacagttacgtatagtttcagtaagttttgattgttgtattcctgtatctctagataagttagtcatatagtcccttccggcgatacgttttttccaagcccgaaattgattagccaaatgtgtatttatttttgtgatattgatataatatttcggataatgcatactgttagtcttatatcatttggttcatctatgtattgtaatattgttacatgatctatagatgatgtattgattttggcaggatcgaattccatatccgcgactaaacagtgaaaaaaatgtaaatactttttaaattttaaattagtaaaacttttttttattttttatgattccaaaaatactgaatacaaagtcctaaattataaatatggagatcatactaccacaacttattattatgtatacaaggccggtgtaatagatagatatatataattctattacaccggcagacaattaccgaccggtatttgtcgttaccaacataccgtataatatgtaatatacaattccataacccattgacagttgttatacatcaaaattgcaattcttttgattacgatgttataagaatgtagttaattgatgtatgatgttaatgtgtcctctttcctcttataacatcgtaatcaaaaacttttttataatatatacctaataatgtgtcttaatagttctcgtgattcgtcaaacaatcattcttataaaatataataaagcaacgtaaaaacacataaaaataagcgtaactaataagacaatggatatttacgacgataaaggtctacagactattaaactgtttaataatgaatttgattgtataaggaatgacatcagagaattatttaaacatgtaactgattccgatagtatacaacttccgatggaagacaattctgatattatagaaaatatcagaaaaatactatatagacgattaaaaaatgtagaatgtgttgacatcgataacacaataacttttatgaaatacgatccaaatgatgataataagcgtacgtgttctaattgggtacccttaactaataactatatggaatattgtctagtaatatatttggaaacaccgatatgtggaggcaaaataaaattataccaccctacaggaaatataaagtcggataaggatattatgtttgcaaagactctagactttaaatcaacgaaagtgttaactggacgtaaaacaattgccgttctagacatatccgtttcatataatagatcaatgactactattcactacaacgacgacgttgatatagatatacatactgataaaaatggaaaagagttatgttattgttatataacaatagatgatcattacttggttgatgtggaaactataggagttatagtcaatagatctggaaaatgtctgttagtaaataaccatctaggtataggtatcgttaaagataaacgtataagcgatagttttggagatgtatgtatggatacaatatttgacttttctgaagcacgagagttattttcattaactaatgatgataacaggaatatagcatgggacactgataaactagacgatgatacagatatatggactcccgtcacagaagatgattacaaatttctttctagactagtattgtatgcaaaatctcaatcggatactgtatttgactattatgttcttactggtgatacggaaccacccactgtattcattttcaaggtaactagattttactttaatatgccgaaataaaaaatttttgtataatatctagaggtagaggtattgtttagataaatacaaataacatagatacatcgcatacttagcatttttataaatatacataagacatacactttatacatttttgtaaaaatactcataaaaaaatttataaaaattatggcacaaccatatcttgtataggtagtttagttcgtcgagtgaacctataaacagataatagacaacacataataatgcctactaatacaagcataataccgggagatgggatatatgacgttgtagtgtttgggttttctgaacgttgatagtctactaatactacatgctgacatctaatgcctgtataaccatgagagcatctacaatacataccgtcaatatctctagcgtggatacagtcaccgtgtaaacaatatccatctccctctggaccgcataatctgatagctggaatatctgttgtagcgtttgtaatttctggcaatgtcgtttcgatagcgttaccactatcggcgaatgatctgattatcatagcagcgaacaacaacatcagataatttatcaacatttttgatggattctgtgtttatgctgtttctcagtgtgtgtttatgacaagattgggaattttatattattaattcagtaatataaactaataatatattgttaattgtgtaaataatataaaaataacaatacaatattgaatgtgttgctgttaaaaatgtatgtgttaatataatagaataaaataaatgagtatgatcattttagataacgattgattttatcattaccgcttcattcttatattctttgcttacggaacctatatttagaaacatctactaacaattttttatgcttgcattattaatggtatgtaatatgattgattgtgtacgcaataccaatttgttaagtatgaatacggggtacaaacataaattgaaatttaacattatttatttatgatatatatcgttatcgttaggtctataccatggatatctttaaagaactaatcttaaaacaccctgatgaaaatgttttgatttctccagtttccattttatctactttatctattctaaatcatggagcagctggttctacagctgaacaactatcaaaatatatagagaatatgaatgagaatacacccgatgacaataatgatgacatggaggtagatattccgtattgtgcgacactagctaccgcaaataaaatatacggtagcgatagtatcgagttccacgcctccttcctacaaaaaataaaagacgattttcaaactgtaaactttaataatgctaaccaaacaaaggaactaatcaacgaatgggttaagacaatgacaaatggtaaaattaattccttattgactagtccgctatccattaatactcgtatgacagttgttagcgccgtccattttaaagcaatgtggaaatatccattttctaaacatcttacatatacagacaagttttatatttctaagaatatagttaccagcgttgatatgatggtgggtaccgagaataacttgcaatatgtacatattaatgaattattcggaggattctctattatcgatattccatacgagggaaactctagtatggtaattatactaccggacgacatagaaggtatatataacatagaaaaaaatataacagatgaaaaatttaaaaaatggtgtggtatgttatctactaaaagtatagacttgtatatgccaaagtttaaagtggaaatgacagaaccgtataatctggtaccgattttagaaaatttaggacttactaatatattcggatattatgcagattttagcaagatgtgtaatgaaactatcactgtagaaaaatttctacatacgacgtttatagatgttaatgaggagtatacagaagcatcggccgttacaggagtatttacgattaacttttcgatggtatatcgtacgaaggtctacataaaccatccattcatgtacatgattaaagacaccacaggacgtatactttttatagggaaatactgctatccgcaataaatataaacaaatagacttttataaagagtcttcaacgataagtatatcgacatactacttatgctgcgaaagattctgaacgagaacgactatctcaccctcttggatcatatccgcactgctaaatactaaatctccactacactttttatcatcttatgaggaatgattgccttcgtgaaataggaataattagcaccagaatagctatggattattgtggtagagagtgcactattctatgtcgtctactggatgaagatgtgacgtacaaaaaaataaaactagaaattgaaacgtgtcacaacttatcaaaacatatagatagacgaggaaacaatgcgctacattgttacgtctccaataaatgcgatacagacattaagattgttctctcgcggagtcgagagactttgtagaaacaacgaaggattaactccgctaggagtatacagtaagcatagatacgtaaaatctcagattgtgcatctactgatatccagctattcaaattcctctaacgaactcaagtcgaatataaatgatttcgatctgtattcggataatatcgacttacgtctgctaaaatacctaattgtggataaacggatacgtccgtccaagaatacgaattatgcaatcaatggtctcggattggtggatatatacgtaacgacgcctaatccgagaccagaagtattgctatggcttcttaaatcagaatgttacagcaccggttacgtatttcgtacctgtatgtacgacagtgatatgtgtaagaactctcttcattactatatatcgtctcatagagaatctcaatctctatccaaggatgtaattaaatgtttgatcgataacaatgtttccatccatggcagagacgaaggaggatctttacccatccaatactactggtctttctcaaccatagatatagagattgttaaattattattaataaaggatgtggacacgtgtagagtatacgacgtcagccctatattagaggcgtattatctaaacaagcgatttagagtaaccccatataatgtagacatggaaatcgttaatcttcttattgagagacgtcatactcttgtcgacgtaatgcgtagtattacttcgtacgattccagagaatataaccactacatcatcgataacattctaaagagatttagacaacaggatgaatccatcgtacaagccatactgataaactacttacattacggcgatatggtcgttcgatgcatgttagataacggacaacaactatcctctacacgactactttgttaataataatctcgtcgatgtaaacgtcgtaaggtttatcgtggaaaatatggacacgcggctgtaaatcacgtatcgaacaatggccgtctatgtatgtacggtctgatattatcgagatttaataattgcgggtatcactgttatgaaaccatactgatagatgtatttgatatactaagcaagtacatggatgatatagatatgatcgataactctactatattacgcggtcgatgtcaataatatacaatttgcaaagcggttattggaatatggagcgagtatcacgctcgataatcaatacggccatccagaaaagcagttacagaagagaaaacaaaacgaaatcgttgttctacaagatgtctctccctacgacgattactacgtaaaaaagatactagcctactgcctattaagggacgagtcattcgcggaactacatagtaaattctgtttaaacgaggactataaaagtgtatttatgaaaaatatatcattcgataagatagattccatcatcgtgacataagtcgcctcaaagagattcgaatctccgacaccgacctgtatacggtatcacagctatcttaaagccatacattcagacagtcacatttcatttcccatgtacgacgatctcatagaacagtgccatctatcgatggagcgtaaaagtaaactcgtcgacaaagcactcaataaattagagtctaccatcggtcaatctagactatcgtatttgcctccggaaattatgcgcaatatcatctaaacagtatgttgtacggaaagaaccattacaaatattatccatgatagaaagaaaatatctatatgattggagaagtaggaaacaggaacaagacaacgattactacattattaaatcatgaagtccgtattatactcgtatatattgtttctctcatgtataataataaacggaagagatatagcaccgcatgcaccatccgatggaaagtgtaaagacaacgaatacaaacgccataatttgtgtccgggaacatacgcttccagattatgcgatagcaagactaacacacgatgtacgccgtgtggttcgggtaccttcacatctcgcaataatcatttacccgcttgtctaagttgtaacggaagacgcgatcgtgtaacacgactcacaatagaatctgtgaatgctctcccggatattattgtcttctcaaaggatcatccggatgcaaggcatgtgtttcccaaacaaaatgtggaataggatacggagtatccggagacgtcatctgttctccgtgtggtctcggaacatattctcacaccgtctcttccgcagataaatgcgaacccgtacccagaaatacgtttaactatatcgatgtggaaattaacctgtatccagttaacgacacgtcgtgtactcggacgaccactaccggtctcagcgaatccatctcaacgtcggaactaactattactatgaatcataaagactgtaatcccgtatttcgtgatggatacttctccgttcttaataaggtagcgacttcaggtttctttacaggagaaaggtgtgcactctgaatttcgagattaaatgcaataacaaagattcttcctccaaacagttaacgaaagcaaagaatgatactatcatgccgcattcggagacagtaactctagtgggcgacatctatatactatatagtaataccaatactcaagactacgaaactgatacaatctcttatcatgtgggtaatgttctcgatgtcgatagccatatgcccggtagttgcgatatacataaactgatcactaattccaaacccacccactttttatagtaagtttttcacccataaataataaatacaataattaatttctcgtaaaagtagaaaatatattctaatttattgcacggtaaggaagtagaatcataaagaacagtactcaatcaatagcaattatgaaacaatatatcgtcctggcatgcatgtgcctggcggcagctgctatgcctgccagtcttcagcaatcatcctcatcctcctcctcgtgtacggaagaagaaaacaaacatcatatgggaatcgatgttattatcaaagtcacaaagcaagaccaaacaccgaccaatgataagatttgccaatccgtaacggaaattacagagtccgagtcagatccagatcccgaggtggaatcagaagatgattccacatcagtcgaggatgtagatcctcctaccacttattactccatcatcggtggaggtctgagaatgaactttggattcaccaaatgtcctcagattaaatccatctcagaatccgctgatggaaacacagtgaatgctagattgtccagcgtgtccccaggacaaggtaaggactctcccgcgatcactcatgaagaagctcttgctatgatcaaagactgtgaagtgtctatcgacatcagatgtagcgaagaagagaaagacagcgacatcaagacccatccagtactcgggtctaacatctctcataagaaagtgagttacgaagatatcatcggttcaacgatcgtcgatacaaaatgcgtcaagaatctagagtttagcgttcgtatcggagacatgtgcaaggaatcatctgaacttgaggtcaaggatggattcaagtatgtcgacggatcggcatctgaaggtgcaaccgatgatacttcactcatcgattcaacaaaactcaaagcgtgtgtctgaatcgataactctattcatctgaaattggatgagtagggttaatcgaacgattcaggcacaccacgaattaaaaaagtgtaccggacactatattccggtttgcaaaacaaaaatgttcttaactacattcacaaaaagttacctctcgcgacttcttctttttctgtctcaatagtgtgatacgattatgacactattcctattcctattcctatttcctttcagagtatcacaaaaatattaaacctctttctgatggtctcataaaaaaagttttacaaaaatatttttattctctttctctctttgatggtctcataaaaaaagttttacaaaaatatttttattctctttctctctttgatggtctcataaaaaaagttttacaaaaatatttttattctctttctctctttgatggtctcataaaaaaagttttacaaaaatatttttattctctttctctctttgatggtctcataaaaaaagttttacaaaaatatttttattctctttctctctttgatggtctcataaaaaaagttttacaaaaatatttttattctctttctctctttgatggtctcataaaaaaagttttacaaaaatatttttattctctttctctctttgatggtctcataaaaaaagttttacaaaaatatttttattctctttctctctttgatggtctcataaaaaaagttttacaaaaatatttttattctctttctctctttgatggtctcataaaaaaagttttacaaaaatatttttattctctttctctctttgatggtctcataaaaaaagttttacaaaaatatttttattctctttctctctttgatggtctcataaaaaaagttttacaaaaatatttttattctctttctctctttgatggtctcataaaaaagttttacaaaaatatttttattctctttctctctttgatggtctcataaaaaagttttacaaaaatatttttattctctttctctctttgatggtctcataaaaaaagttttacaaaaatatttttattctctttctctctttgatggtctcataa

SEQ ID NO: 3 - DNA, 199502 bp, Artificial Sequence
  GLV-1h254
ttatgagaccatcaaagagagaaagagaataaaaatatttttgtaaaactttttttatgagaccatcaaagagagaaagagaataaaaatatttttgtaaaacttttttatgagaccatcaaagagagaaagagaataaaaatatttttgtaaaacttttttatgagaccatcaaagagagaaagagaataaaaatatttttgtaaaactttttttatgagaccatcaaagagagaaagagaataaaaatatttttgtaaaactttttttatgagaccatcaaagagagaaagagaataaaaatatttttgtaaaactttttttatgagaccatcaaagagagaaagagaataaaaatatttttgtaaaactttttttatgagaccatcaaagagagaaagagaataaaaatatttttgtaaaactttttttatgagaccatcaaagagagaaagagaataaaaatatttttgtaaaactttttttatgagaccatcaaagagagaaagagaataaaaatatttttgtaaaactttttttatgagaccatcaaagagagaaagagaataaaaatatttttgtaaaactttttttatgagaccatcaaagagagaaagagaataaaaatatttttgtaaaactttttttatgagaccatcaaagagagaaagagaataaaaatatttttgtaaaactttttttatgagaccatcaaagagagaaagagaataaaaatatttttgtaaaactttttttatgagaccatcaaagagagaaagagaataaaaatatttttgtaaaactttttttatgagaccatcagaaagaggtttaatatttttgtgatactctgaaaggaaataggaataggaataggaatagtgtcataatcgtatcacactattgagacagaaaaagaagaagtcgcgagaggtaactttttgtgaatgtagttaagaacatttttgttttgcaaaccggaatatagtgtccggtacacttttttaattcgtggtgtgcctgaatcgttcgattaaccctactcatccaatttcagatgaatagagttatcgattcagacacacgctttgagttttgttgaatcgatgagtgaagtatcatcggttgcaccttcagatgccgatccgtcgacatacttgaatccatccttgacctcaagttcagatgattccttgcacatgtctccgatacgaacgctaaactctagattcttgacgcattttgtatcgacgatcgttgaaccgatgatatcttcgtaactcactttcttatgagagatgttagacccgagtactggatgggtcttgatgtcgctgtctttctcttcttcgctacatctgatgtcgatagacacttcacagtctttgatcatagcaagagcttcttcatgagtgatcgcgggagagtccttaccttgtcctggggacacgctggacaatctagcattcactgtgtttccatcagcggattctgagatggatttaatctgaggacatttggtgaatccaaagttcattctcagacctccaccgatgatggagtaataagtggtaggaggatctacatcctcgactgatgtggaatcatcttctgattccacctcgggatctggatctgactcggactctgtaatttccgttacggattggcaaatcttatcattggtcggtgtttggtcttgctttgtgactttgataataacatcgattcccatatgatgtttgttttcttcttccgtacacgaggaggaggatgaggatgattgctgaagactggcaggcatagcagctgccgccaggcacatgcatgccaggacgatatattgtttcataattgctattgattgagtactgttctttatgattctacttccttaccgtgcaataaattagaatatattttctacttttacgagaaattaattattgtatttattatttatgggtgaaaaacttactataaaaagtgggtgggtttggaattagtgatcagtttatgtatatcgcaactaccgggcatatggctatcgacatcgagaacattacccacatgataagagattgtatcagtttcgtagtcttgagtattggtattactatatagtatatagatgtcgcccactagagttactgtctccgaatgcggcatgatagtatcattctttgctttcgttaactgtttggaggaagaatctttgttattgcatttaatctcgaaattcagagtgcacacctttctcctgtaaagaaacctgaagtcgctaccttattaagaacggagaagtatccatcacgaaatacgggattacagtctttatgattcatagtaatagttagttccgacgttgagatggattcgctgagaccggtagtggtcgtccgagtacacgacgtgtcgttaactggatacaggttaatttccacatcgatatagttaaacgtatttctgggtacgggttcgcatttatctgcggaagagacggtgtgagaatatgttccgagaccacacggagaacagatgacgtctccggatactccgtatcctattccacattttgtttgggaaacacatgccttgcatccggatgatcctttgagaagacaataatatccgggagagcattcacagattctattgtgagtcgtgttacacgatcgcgtcttccgttacaacttagacaagcgggtaaatgattattgcgagatgtgaaggtacccgaaccacacggcgtacatcgtgtgttagtcttgctatcgcataatctggaagcgtatgttcccggacacaaattatggcgtttgtattcgttgtctttacactttccatcggatggtgcatgcggtgctatatctcttccgtttattattatacatgagagaaacaatatatacgagtataatacggacttcatgatttaataatgtagtaatcgttgtcttgttcctgtttcctacttctccaatcatatagatattttctttctatcatggataatatttgtaatggttctttccgtacaacatactgtttagatgatattgcgcataatttccggaggcaaatacgatagtctagattgaccgatggtagactctaatttattgagtgctttgtcgacgagtttacttttacgctccatcgatagatggcactgttctatgagatcgtcgtacatgggaaatgaaatgtgactgtctgaatgtatggctttaagatagctgtgataccgtatacaggtcggtgtcggagattcgaatctctttgaggcgacttatgtcacgatgatggaatctatcttatcgaatgatatatttttcataaatacacttttatagtcctcgtttaaacagaatttactatgtagttccgcgaatgactcgtcccttaataggcagtaggctagtatcttttttacgtagtaatcgtcgtagggagagacatcttgtagaacaacgatttcgttttgttttctcttctgtaactgcttttctggatggccgtattgattatcgagcgtgatactcgctccatattccaataaccgctttgcaaattgtatattattgacatcgaccgcgtaatatagtagagttatcgatcatatctatatcatccatgtacttgcttagtatatcaaatacatctatcagtatggtttcataacagtgatacccgcaattattaaatctcgataatatcagaccgtacatacatagacggccattgttcgatacgtgatttacagccgcgtgtccatattttccacgataaaccttacgacgtttacatcgacgagattattattaacaaagtagtcgtgtagaggatagttgttgtccgttatctaacatgcatcgaacgaccatatcgccgtaatgtaagtagtttatcagtatggcttgtacgatggattcatcctgttgtctaaatctctttagaatgttatcgatgatgtagtggttatattctctggaatcgtacgaagtaatactacgcattacgtcgacaagagtatgacgtctctcaataagaagattaacgatttccatgtctacattatatggggttactctaaatcgcttgtttagataatacgcctctaatatagggctgacgtcgtatactctacacgtgtccacatcctttattaataataatttaacaatctctatatctatggttgagaaagaccagtagtattggatgggtaaagatcctccttcgtctctgccatggatggaaacattgttatcgatcaaacatttaattacatccttggatagagattgagattctctatgagacgatatatagtaatgaagagagttcttacacatatcactgtcgtacatacaggtacgaaatacgtaaccggtgctgtaacattctgatttaagaagccatagcaatacttctggtctcggattaggcgtcgttacgtatatatccaccaatccgagaccattgattgcataattcgtattcttggacggacgtatccgtttatccacaattaggtattttagcagacgtaagtcgatattatccgaatacagatcgaaatcatttatattcgacttgagttcgttagaggaatttgaatagctggatatcagtagatgcacaatctgagattttacgtatctatgcttactgtatactcctagcggagttaatccttcgttgtttctacaaagtctctcgactccgcgagagaacaatcttaatgtctgtatcgcatttattggagacgtaacaatgtagcgcattgtttcctcgtctatctatatgttttgataagttgtgacacgtttcaatttctagttttatttttttgtacgtcacatcttcatccagtagacgacatagaatagtgcactctctaccacaataatccatagctattctggtgctaattattcctatttcacgaaggcaatcattcctcataagatgataaaaagtgtagtggagatttagtatttagcagtgcggatatgatccaagagggtgagatagtcgttctcgttcagaatctttcgcagcataagtagtatgtcgatatacttatcgttgaagactctttataaaagtctatttgtttatatttattgcggatagcagtatttccctataaaaagtatacgtcctgtggtgtctttaatcatgtacatgaatggatggtttatgtagaccttcgtacgatataccatcgaaaagttaatcgtaaatactcctgtaacggccgatgcttctgtatactcctcattaacatctataaacgtcgtatgtagaaatttttctacagtgatagtttcattacacatcttgctaaaatctgcataatatccgaatatattagtaagtcctaaattttctaaaatcggtaccagattatacggttctgtcatttccactttaaactttggcatatacaagtctatacttttagtagataacataccacaccattttttaaatttttcatctgttatatttttttctatgttatatataccttctatgtcgtccggtagtataattaccatactagagtttccctcgtatggaatatcgataatagagaatcctccgaataattcattaatatgtacatattgcaagttattctcggtacccaccatcatatcaacgctggtaactatattcttagaaatataaaacttgtctgtatatgtaagatgtttagaaaatggatatttccacattgctttaaaatggacggcgctaacaactgtcatacgagtattaatggatagcggactagtcaataaggaattaattttaccatttgtcattgtcttaacccattcgttgattagttcctttgtttggttagcattattaaagtttacagtttgaaaatcgtcttttattttttgtaggaaggaggcgtggaactcgatactatcgctaccgtatattttatttgcggtagctagtgtcgcacaatacggaatatctacctccatgtcatcattattgtcatcgggtgtattctcattcatattctctatatattttgatagttgttcagctgtagaaccagctgctccatgatttagaatagataaagtagataaaatggaaactggagaaatcaaaacattttcatcagggtgttttaagattagttctttaaagatatccatggtatagacctaacgataacgatatatatcataaataaataatgttaaatttcaatttatgtttgtaccccgtattcatacttaacaaattggtattgcgtacacaatcaatcatattacataccattaataatgcaagcataaaaaattgttagtagatgtttctaaatataggttccgtaagcaaagaatataagaatgaagcggtaatgataaaatcaatcgttatctaaaatgatcatactcatttattttattctattatattaacacatacatttttaacagcaacacattcaatattgtattgttatttttatattatttacacaattaacaatatattattagtttatattactgaattaataatataaaattcccaatcttgtcataaacacacactgagaaacagcataaacacagaatccatcaaaaatgttgataaattatctgatgttgttgttcgctgctatgataatcagatcattcgccgatagtggtaacgctatcgaaacgacattgccagaaattacaaacgctacaacagatattccagctatcagattatgcggtccagagggagatggatattgtttacacggtgactgtatccacgctagagatattgacggtatgtattgtagatgctctcatggttatacaggcattagatgtcagcatgtagtattagtagactatcaacgttcagaaaacccaaacactacaacgtcatatatcccatctcccggtattatgcttgtattagtaggcattattatgtgttgtctattatctgtttataggttcactcgacgaactaaactacctatacaagatatggttgtgccataatttttataaatttttttatgagtatttttacaaaaatgtataaagtgtatgtcttatgtatatttataaaaatgctaagtatgcgatgtatctatgttatttgtatttatctaaacaatacctctacctctagatattatacaaaaattttttatttcggcatattaaagtaaaatctagttaccttgaaaatgaatacagtgggtggttccgtatcaccagtaagaacataatagtcaaatacagtatccgattgagattttgcatacaatactagtctagaaagaaatttgtaatcatcttctgtgacgggagtccatatatctgtatcatcgtctagtttatcagtgtcccatgctatattcctgttatcatcattagttaatgaaaataactctcgtgcttcagaaaagtcaaatattgtatccatacatacatctccaaaactatcgcttatacgtttatctttaacgatacctatacctagatggttatttactaacagacattttccagatctattgactataactcctatagtttccacatcaaccaagtaatgatcatctattgttatataacaataacataactcttttccatttttatcagtatgtatatctatatcaacgtcgtcgttgtagtgaatagtagtcattgatctattatatgaaacggatatgtctagaacggcaattgttttacgtccagttaacactttcgttgatttaaagtctagagtctttgcaaacataatatccttatccgactttatatttcctgtagggtggtataattttattttgcctccacatatcggtgtttccaaatatattactagacaatattccatatagttattagttaagggtacccaattagaacacgtacgcttattatcatcatttggatcgtatttcataaaagttattgtgttatcgatgtcaacacattctacattttttaatcgtctatatagtatttttctgatattttctataatatcagaattgtcttccatcggaagttgtatactatcggaatcagttacatgtttaaataattctctgatgtcattccttatacaatcaaattcattattaaacagtttaatagtctgtagacctttatcgtcgtaaatatccattgtcttattagttacgcttatttttatgtgtttttacgttgctttattatattttataagaatgattgtttgacgaatcacgagaactattaagacacattattaggtatatattataaaaaagtttttgattacgatgttataagaggaaagaggacacattaacatcatacatcaattaactacattcttataacatcgtaatcaaaagaattgcaattttgatgtataacaactgtcaatgggttatggaattgtatattacatattatacggtatgttggtaacgacaaataccggtcggtaattgtctgccggtgtaatagaattatatatatctatctattacaccggccttgtatacataataataagttgtggtagtatgatctccatatttataatttaggactttgtattcagtatttttggaatcataaaaaataaaaaaaagttttactaatttaaaatttaaaaagtatttacatttttttcactgtttagtcgcggatatggaattcgatcctgccaaaatcaatacatcatctatagatcatgtaacaatattacaatacatagatgaaccaaatgatataagactaacagtatgcattatccgaaatattatatcaatatcacaaaaataaatacacatttggctaatcaatttcgggcttggaaaaaacgtatcgccggaagggactatatgactaacttatctagagatacaggaatacaacaatcaaaacttactgaaactatacgtaactgtcaaaaaaatagaaacatatatggtctatatatacactacaatttagttattaattggataaccgatgtgattatcaatcaatattaagagggttggtaaattggtacatagctaataatacctatactccaaatacacccaataatacaacaaccatttctgagttggatatcatcaaaatactaaataaatacgaggacgtgtatagagtaagtaaagaaaaagaatgtggaatttgctatgaagttgtttactcaaaacgatagatactttggtttattggattcgtgtactcatatattttgcataacatgcatcaatatatggcatagaacacgaagagaaaccggtgcgtcggataattgtcctatatgccgtacccgttttagaaacataacaatgagcaagttctataagctagttaactaataaataaaaagtttaatttgttgacgacgtatgtcgttattttttctcgtataaaagattaatttgattctaatataatctttagtattggataaatatcaattcaaattaattccattagattatatcataaataaaaatagtagcacacaactacttcagcaaacattctttttataaatgccatctagcgtagcgaggacacaagtgaacctataattatcaaatttattagtatcagtcacatgaaggactttacgtagagtgacgattccactatctgtggtacgaacggtttcatcttctttgatgccatcacccagatgttctataaacttggtatcctcgtccgatttcatatcctttgccaaccaatacatatagctaaactcaggcatatgttccacacatcctgaacaatgaaattctccagaagatgttacaatgtctagatttggacatttggtttcaaccgcgttaacatatgagtgaacacacccatacatgaaagcgatgagaaataggattctcatcttgccaaaatatcactagaaaaaatttatttatcagttttaaaggtataaaaaatacttattgttgctcgaatattttgtatttgatggtatacggaagattagaaatgtaggtattatcatcaactgattctatggttttatgtattctatcatgtttcactattgcgttggaaataatatcatatgcttccacatatattttattttgttttaactcataatactcacgtaattctggattattggcatatctatgaataattttagctccatgatcagtaaatattaatgagaacatagtattaccacctaccattatttttttcatctcattcaattcttaattgcaaagatctatataatcattatagcgttgacttatggactctggaatcttagacgatgtacagtcatctataatcatggcatatttaatacattgttttatagcatagtcgttatctacgatgttagatatttctctcaatgaatcaatcacacaatctaatgtaggtttatgacataatagcattttcagcagttcaatgtttttagattcgttgatggcaatggctatacatgtatatccgttatttgatctaatgttgacatctgaaccggattctagcagtaaagatactagagattgtttattatatctaacagccttgtgaagaagtgtttctcctcgtttgtcaatcatgttaatgtctttaagataaggtaggcaaatgtttatagtactaagaattgggcaagcataagacatgtcacaaagacccttttttgtatgtataagtgtaaaaattataacatccatagttggatttacataggtgtccaatcgggatctctccatcatcgagataattgatggcatctcccttccttttttagtagatatttcatcgtgtaagaatcaatattaatatttctaaagtatccgtgtatagcctctttatttaccacagctccatattccactagagggatatcgccgaatgtcatatactcaattagtatatgttggaggacatccgagttcattgttttcaatatcaaagagatggtttccttatcatttctccatagtggtacaatactacacattattccgtgcggctttccattttccaaaaacaatttgaccaaatctaaatctacatctttattgtatctataatcactatttagataatcagccataattcctcgagtgcaacatgttagatcgtctatatatgaataagcagtgttatctattcctttcattaacaatttaacgatgtctatatctatatgagatgacttaatataatattgaagagctgtacaatagtttttatctataaaagacggcttgattccgtgattaattagacatttaacaacttccggacgcacatatgctctcgtatccgactctgaatacagatgagagatgatatacagatgcaatacggtaccgcaatttcgtagttgataatcatcatacgcgtatcagtactcgtcctcataaagaacactgcagccattttctatgaacaaatcaataattttagaaacaggatcattgtcattacataattttctataactgaacgatggttttcacatttaacactcaagtcaaatccatgttctaccaacacctttatcaagtcaacgtctacatttttggatttcatatagctgaatatattaaagttatttatgttgctaaatccagtggcttctagtagagccatcgctatatccttattaactttaacatgtctactatttgtgtattcttctaatggggtaagctgtctccaatttttgcgtaatggattagtgccactgtctagtagtagtttgacgacctcgacattattacaatgctcattaaaaaggtatgcgtgtaaagcattattcttgaattggttcctggtatcattaggatctctgtctttcaacatctgtttaagttcatcaagagccacctcctcattttccaaatagtcaaacattttgactgaatgagctactgtgaactctatacacccacacaactaatgtcattaaatatcatgtcaaaaacttgtacaattattaataaaaataatttagtgtttaaattttaccagttccagattttacacctccgttaatacctccattaaccccactggacgatcctcctccccacattccaccgccaccagatgtataagttttagatcctttattactaccatcatgtccatggataaagacactccacatgccgccactaccccctttagaagacatattaataagacttaaggacaagtttaacaataaaattaatcacgagtaccctactaccaacctacactattatatgattatagtttctatttttacagtaccttgactaaagtttctagtcacaagagcaatactaccaacctacactattatatgattatagtttctatttttataggaacgcgtacgagaaaatcaaatgtctaatttctaacggtagtgttgataaacgattgttatccgcggatacctcctctatcatgtcgtctattttcttactttgttctattaacttattagcattatatattatttgattataaaacttatattgcttattagcccaatctgtaaatatcggattattaacatatcgtttctttgtaggtttatttaacatgtacatcactgtaagcatgtccttaccatttattttaatttgacgcatatccgcaatttctttttcgcagtcggttataaattctatatatgatggatacatgctacatgtgtacttataatcgactaatatgaagtacttgatacatattttcagtaacgatttattattaccacctatgaataagtacctgtgatcgtctaggtaatcaactgttttcttaatacattcgatggttggtaatttactcagaataatttccaatatcttaatatataattctgctatttctgggatatatttatctgccagtataacacaaatagtaatacatgtaaacccatattttgttattatattaatgtctgcgccattatctattaaccattctactaggctgacactatgcgactcaatacaatgataaagtatactacatccatgtttatctattttgtttatatcatcaatatacggcttacaaagttttagtatcgataacacatccaactcacgcatagagaaggtagggaataatggcataatatttattaggttatcatcattgtcattatctacaactaagtttccattttttaaaatatactcgacaactttaggatctctattgccaaatttttgaaaatatttatttatatgcttaaatctatataatgtagctccttcatcaatcatacatttaataacattgatgtatactgtatgataagatacatattctaacaatagatcttgtatagaatctgtatatcttttaagaattgtggatattaggatattattacataaactattacacaattctaaaatataaaacgtatcacggtcgaataatagttgatcaactatataattatcgattttgtgatttttcttcctaaactgtttacgtaaatagttagatagaatattcattagttcatgaccactatagttactatcgaataacgcgtcaaatatttcccgtttaatatcgcatttgtcaagataataatagagtgtggtatgttcacgataagtataataacgcatctctttttcgtgtgaaattaaatagtttattacgtccaaagatgtagcataaccatcttgtgacctagtaataatataataatagagaactgttttacccattctatcatcataatcagtggtgtagtcgtaatcgtaatcgtctaattcatcatcccaattataatattcaccagcacgtctaatctgttctattttgatcttgtatccatactgtatgttgctacatgtaggtattcctttatccaataatagtttaaacacatctacattgggatttgatgttgtagcgtatttttctacaatattaataccatttttgatactatttatttctatacctttcgaaattagtaatttcaataagtctatattgatgttatcagaacatagatattcgaatatatcaaaatcattgatatttttatagtcgactgacgacaataacaaaatcacaacatcgtttttgatattattatttttcttggtaacgtatgcctttaatggagtttcaccatcatactcatataatggatttgcaccactttctatcaatgattgtgcactgctggcatcgatgttaaatgttttacaactatcatagagtatcttatcgttaaccatgattggttgttgatgctatcgcattttttggtttctttcatttcagttatgtatggatttagcacgtttgggaagcatgagctcatatgatttcagtactgtagtgtcagtactattagtttcaataagatcaatctctagatctatagaatcaaaacacgataggtcagaagataatgaatatctgtaggcttcttgttgtactgtaacttctggttttgttagatggttgcatcgtgctttaacgtcaatggtacaaattttatcctcgctttgtgtatcatattcgtccctactataaaattgtatattcagattatcatgcgatgtgtatacgctaacggtatcaataaacggagcacaccatttagtcataaccgtaatccaaaaatttttaaagtatatcttaacgaaagaagttgtgtcattgtctacggtgtatggtactagatcctcataagtgtatatatctagagtaatgtttaatttattaaatggttgataatatggatcctcgtgacaatttccgaagatggaaataagacataaacacgcaataaatctaattgcggacatggttactccttaaaaaaatacgaataatcaccttggctatttagtaagtgtcatttaacactatactcatattaatccatggactcataatctctatacgggattaacggatgttctatatacggggatgagtagttctcttctttaactttatactttttactaatcatatttagactgatgtatgggtaatagtgtttgaagagctcgttctcatcatcagaataaatcaatatctctgtttttttgttatacagatgtattacagcctcatatattacgtaatagaacgtgtcatctaccttattaactttcaccgcatagttgtttgcaaatacggttaatcctttgacctcgtcgatttccgaccaatctgggcgtataatgaatctaaactttaattgcttgtaatcattcgaaataatttttagtttgcatccgtagttatcccctttatgtaactgtaaatttctcaacgcgatatctccattaataatgatgtcgaattcgtgctgtatacccatactgaatggatgaacgaataccgacggcgttaatagtaatttactttttcatctttacatattgggtactagttttactatcataagtttataaattccacaagctactatggaataagccaaccatcttagtataccacacatgtcttaaagtttattaattaattacatgttgttttatatatatcgctacgaatttaaagagaaattagtttaggaagaaaaattatctatctacatcatcacgtctctgtattctacgatagagtgctactttaagatgcgacagatccgtgtcatcaaatatatactccattaaaatgattattccggcagcgaacttgatattggatatatcacaacctttgttaatatctacgacaatagacagcagtcccatggttccataaacagtgagtttatctttctttgaagagatattttgtagagatcttataaaactgtcgaatgacatcgcatttatatctttagctaaatcgtatatgttaccatcgtaatatctaaccgcgtctatcttaaacgtttccatcgctttaaagacgtttccgatagatggtctcatttcatcagtcatactgagccaacaaatataatcgtgtataacatctttgatagaatcagactctaaagaaaacgaatcggctttattatacgcattcatgataaacttaatgaaaaatgtttttcgttgtttaagttggatgaatagtatgtcttaataattgttattatttcattaattaatatttagtaacgagtacactctataaaaacgagaatgacataactaatcataactagttatcaaagtgtctaggacgcgtaattttcatatggtatagatcctgtaagcattgtctgtattctggagctattttctctatcgcattagtgagttcagaatatgttataaatttaaatcgaataacgaacataactttagtaaagtcgtctatattaactcttttattttctagccatcgtaataccatgtttaagatagtatattctctagttactacgatctcatcgttgtctagaatatcacatactgaatctacatccaattttagaaattggtctgtgttacatatctcttctatattattgttgatgtattgtcgtagaaaactattacgtagaccattttctttataaaacgaatatatagtactccaattatctttaccgatatatttgcacacataatccattctctcaatcactacatctttaagattttcgttgttaagatatttggctaaactatataattctattagatcatcaacagaatcagtatatatttttctagatccaaagacgaactctttggcgtcctctataatattcccagaaaagatattttcgtgttttagtttatcgagatctgatctgttcatatacgccatgattgtacggtacgttatgataaccgcataaaataaaaatccattttcatttttaaccaatactattcataattgagattgatgtaatactttgttactttgaacgtaaagacagtacacggatccgtatctccaacaagcacgtagtaatcaaatttggtgttgttaaacttcgcaatattcatcaatttagatagaaacttatactcatcatctgttttaggaatccatgtattattaccactttccaacttatcattatcccaggctatgtttcgtccatcatcgttgcgcagagtgaataattcttttgtattcggtagttcaaatatatgatccatgcatagatcggcaaagctattgtagatgtgatttttcctaaatctaatataaaactcgtttactagcaaacactttcctgatttatcgaccaagacacatatggtttctaaatctatcaagtggtggggatccatagttatgacgcagtaacatatattattacattcttgactgtcgctaatatctaaatatttattgttatcgtattggattctgcatatagatggcttgtatgtcaaagatatagaacacataaccaatttatagtcgcgctttacattctcgaatctaaagttaagagatttagaaaacattatatcctcggatgatgttatcactgtttctggagtaggatatattaaagtctttacagatttcgtccgattcaaataaatcactaaataatatcccacattatcatctgttagagtagtatcattaaatctattatattttatgaaagatatatcactgctcacctctatatttcgtacatttttaaactgtttgtataatatctctctgatacaatcagatatatctattgtgtcggtagacgataccgttacatttgaattaatggtgttccattttacaacttttaacaagttgaccaattcatttctaatagtatcaaactctccatgattaaatattttaatagtatccattttatatcactacggacacaaagtagctgacataaaccattgtataatttttatgttttatgtttattagcgtacacattttggaagttccggcttccatgtatttcctggagagcaagtagatgatgaggaaccagatagtttatatccgtacttgcacttaaagtctacattgtcgttgtatgagtatgatcttttaaacccgctagacaagtatccgtttgatattgtaggatgtggacatttaacaatctgacacgtgggtggatcggaccattctcctcctgaacacaggacactagagttaccaatcaacgaatatccactattgcaactataagttacaacgctcccatcggtataaaaatcctcgtatccgttatgtcttccgttggatatagatggaggggattggcatttaacagattcacaaataggtgcctcgggattccataccatagatccagtagatcctaattcacaatacgatttagattcaccgatcaactgatatccgctattacaagagtacgttatactagagccaaagtctactccaccaatatcaagttggccattatcgatatctcgaggcgatgggcatctccgtttaatacattgattaaagagtgtccatccagtacctgtacatttagcatatataggtcccattttttgctttctgtatccaggtagacatagatattctatagtgtctcctatgttgtaattagcattagcatcagtctccacactattcttaaatttcatattaatgggtcgtgacggaatagtacagcatgatagaacgcatcctattcccaacaatgtcaggaacgtcacgctctccaccttcatatttatttatccgtaaaaatgttatcctggacatcgtacaaataataaaaagcccatatatgttcgctattgtagaaattgtttttcacagttgctcaaaaacgatggcagtgacttatgagttacgttacactttggagtctcatctttagtaaacatatcataatattcgatattacgagttgacatatcgaacaaattccaagtatttgattttggataatattcgtattttgcatctgctataattaagatataatcaccgcaagaacacacgaacatctttcctacatggttaaagtacatgtacaattctatccatttgtcttccttaactatatatttgtatagataattacgagtctcgtgagtaattccagtaattacatagatgtcgccgtcgtactctacagcataaactatactatgatgtctaggcatgggagacttttttatccaacgatttttagtgaaacattccacatcgtttaatactacatatttctcatacgtggtataaactccacccattacatatatatcatcgtttacgaataccgacgcgcctgaatatctaggagtaattaagtttggaagtcttatccatttcgaagtgccgtgtttcaaatattctgccacacccgttgaaatagaaaattctaatcctcctattacatataactttccatcgttaacacaagtactaacttctgattttaacgacgacatattagtaaccgttttccattttttcgttttaagatctacccgcgatacggaataaacatgtctattgttaatcatgccgccaataatgtatagacaattatgtaaaacatttgcattatagaattgtctatctgtattaccgactatcgtccaatattctgttctaggagagtaatgggttattgtggatatataatcagagtttttaatgactactatattatgttttataccatttcgtgtcactggctttgtagatttggatatagttaatcccaacaatgatatagcattgcgcatagtattagtcataaacttgggatgtaaaatgttgatgatatctacatcgtttggatttttatgtatccactttaataatatcatagctgtaacatcctcatgatttacgttaacgtcttcgtgggataagatagttgtcagttcatcctttgataattttccaaattctggatcggatgtcaccgcagtaatattgttgattatttctgacatcgacgcattatatagttttttaattccatatcttttagaaaagttaaacatccttatacaatttgtgaaattaatattatgaatcatagtttttacacatagatctactacaggcggaacatcaattattatggcagcaactagtatcatttctacattgtttatggtgatgtttatcttcttccagcgcatatagtctaatagcgattcaaacgcgtgatagtttataccattcaatataatcgcttcatcctttagatggtgatcctgaatgcgtttaaaaaaattatacggagacgccgtaataatttccttattcacttgtataatttccccattgatagaaaatattacgctttccattcttaaagtactataagtaattatagtataatgtaaacgtttatatattcaatatttttataaaaatcattttgacattaattcctttttaaatttccgtctatcatctatagaaacgtattctatgaatttataaaatgcttttacgtgtcctatcgtaggcgatagaaccgctaaaaagcctatcgaatttctacaaaagaatctgttatatggtatagggagagtataaaacattaaatgtccgtacttattaaagtattcagtagccaatcctaactctttcgaatacttattaatggctcttgttctgtacgaatctatttttttgaacaacggacctagtggtatatcttgttctatgtatctaaaataatgtctgactagatccgttagtttaatatccgcagtcatcttgtctagaatggcaaatctaactgcgggtttaggctttagtttagtttctatatctacatctatgtctttatctaacaccaaaaatataatagctaatattttattacaatcatccggatattcttctacgatctcactaactaatgtttctttggttatactagtatagtcactatcggacaaataaagaaaatcagatgatcgatgaataatacatttaaattcatcatctgtaagatttttgagatgtctcattagaatattattagggttagtactcattatcattcggcagctattacttattttattatttttcaccatatagatcaatcattagatcatcaaaatatgtttcaatcatcctaaagagtatggtgaatgactcttcccatctaatttctgaacgttcaccaatgtctctagccactttggcactaatagcgatcattcgcttagcgtcttctatattattaactggttgatttaatctatctagcaatggaccgtcggacagcgtcattctcatgttcttaatcaatgtacatacatcgccgtcatctaccaattcatccaacaacataagctttttaaaatcatcattataataggtttgatcgttgtcatttctccaaagaatatatctaataagtagagtcctcatgcttagttaacaactattttttatgttaaatcaattagtacaccgctatgtttaatacttattcatattttagtttttaggattgagaatcaatacaaaaattaatgcatcattaattttagaaatacttagtttccacgtagtcaatgaaacatttgaactcatcgtacaggacgttctcgtacaggacgtaactataaaccggtttatatttgttcaagatagatacaaatccgataactttttttacgaattctacgggatccactttaaaagtgtcataccgggttctttttatttttttaaacagatcaatggtgtgatgttgattaggtcttttacgaatttgatatagaatagcgtttacatattctccataatggtcaatcgccatttgttcgtatgtcataaattctttaattatatgacactgtgtattatttagttcatccttgttcattgttaggaatctatccaaaatggcaattatactagaactataggtgcgttgtatacacatattgatgtgtctgtttatacaatccatgatatttggatccatgctactaccttcgggtaaaattgtagcatcatataccatttctagtactttaggttcattattatccattgcagaggacgtcatgatcgaatcataaaaaaatatattatttttatgttattttgttaaaaataatcatcgaatacttcgtaagatactccttcatgaacataatcagttacaaaacgtttatatgaagtaaagtatctacgatttttacaaaagtccggatgcataagtacaaagtacgcgataaacggaataataatagatttatctagtctatctttttctatagctttcatagttagatacatggtctcagaagtaggattatgtaacatcagcttcgataaaatgactgggttatttagtcttacacattcgctcatacatgtatgaccgttaactacagagtctacactaaaatgattgaacaatagatagtctaccattgtttcgtattcagatagtacagcgtagtacatggcatcttcacaaattatatcattgtctaatagatatttgacgcatcttatggatcccacttcaacagccatcttaaaatcatattgctttcctttatcattaataatttctagaacatcatctctatcataaaagatacaaatattaactgtttgatccgtaataacattgctagtcaatagcaatttgttaataagatgcgctgggctcaatgtcttaataagaagtgtaagaggactatctccgaatttgttttgtttattaacatccgttgatggaagtaaaagatctataatgtctacattcttgactgttttagagcatacaatatggagaggtgtatttccatcatgatctggttttgagggactaattcctagtttcatcatccatgagattgtagaagcttttggattgtctgacataagatgtctatgaatatgatttttgccaaatttatccactatcctggcttcgaatccgatggacattatttttttaaacactctttctgaaggatctgtacacgccaacaacggaccacatccttcttcatcaaccgagttgttaatcttggctccatactgtaccaataaatttattctctctatgacttcatcatctgttcccgagagataatatagaggtgttttatgctgtttatcacacgcgtttggatctgcgccgtgcgtcagcagcatcgcgactattctattattattaattttagaagctatatgcaatggataatttccatcatcatccgtctcatttggagagtatcctctatgaagaagttcttcgacaaatcgttcatctagtcctttaattccacaatacgcatgtagaatgtgataattatttccagaaggttcgatagcttgtagcatattcctaaatacatctaaatttttactattatatttggcataaagagatagataatactcggccgacataatgttgtccattgtagtataaaaattaatatttctatttctatttctgtatatttgcaacaatttactctctataacaaatatcataacttagtttttttatgtcaagaaggcactggtttagttcatctataaatgtcacgccataactaccacgcatgccatactcagaattatgataaagatatttatccttggggtgtaggtaatggggattaatctttgttggatcagtctctaagttaacacatgtcacacatgatccatttatagttatatcacacgatgatgatttatgaattgattccggaagatcgctatcgtattttgtggttccacaattcatttccatacatgttattgtcacactaatattatgatgaactttatctagccgctgagtggtaaacaacagaacagatagtttattatctttaccaacaccctcagccgctgccacaaatctctgatccgtatccatgatggtcatgtttatttctagtccgtatccagtcaacactatgttagcatttctgtcgatatagctttcactcatatgacactcaccaataatagtagaattaatgtcgtaatttacaccaatagtgagttcggcggcaaagtaccaataccggtaatcttgtcgaggaggacatatagtattcttgtattctaccgaatacccgagagatgcgatacaaaagagcaagactaatttgtaaaccatcttactcaaaatatgtaacaatagtacgatgcaatgagtaagacaataggaaatctatcttatatacacataattattctatcaattttaccaattagttagtgtaatgttaacaaaaatgtgggagaatctaattagtttttctttacacaattgacgtacatgagtctgagttccttgtttttgctaattatttcatccaatttattattcttgacgatatcgagatcttttgtataggagtcaaacttgtattcaacatgcttttctataatcattttagctatttcggcatcatccaatagtacattttccagattagcagaatagatattaatgtcgtatttgaacagagcctgtaacatctcaatgtctttattatctatagccaatttaatgtccggaatgaagagaagggaattattggtgtttgtcgacgtcatatagtcgagcaagagaatcatcatatccacgtgtccattttttatagtgatgtgaatacaactaaggagaatagccagatcaaaagtagatggtatctctgaaagaaagtaggaaacaatacttacatcattaagcatgacggcatgataaaatgaagttttccatccagttttcccatagaacatcagtctccaatttttcttaacaaacagttttaccgtttgcatgttaccactatcaaccgcataatacaatgcggtgtttcccttgtcatcaaattgtgaatcatccagtccactgaatagcaaaatctttactattttggtatcttccaatgtggctgcctgatgtaatggaaattcattctctagaagatttttcaatgctccagcgttcaacaacgtacatactagacgcacgttattatcagctattgcataatacaaggcactatgtccatggacatccgccttaaatgtatctttactagagagaaagcttttcagctgcttagacttccaagtattaattcgtgacagatccatgtctgaaacgagacgctaattagtgtatattttttcattttttataattttgtcatattgcaccagaattaataatatctttaatagatctgattagtagatacatggctatcgcaaaacaacatatacacatttaataaaaataatatttattaagaaaattcagatttcacgtacccatcaatataaataaaataatgattccttacaccgtacccatattaaggagattccaccttacccataaacaatataaatccagtaatatcatgtctgatgatgaacacaaatggtgtattaaattccagtttttcaggagatgatctcgccgtagctaccataatagtagatgcctctgctacagttccttgttcgtcgacatctatctttgcattctgaaacattttataaatatataatgggtccctagtcatatgtttaaacgacgcattatctggattaaacatactaggagccatcatttcggctatcgacttaatatccctcttattttcgatagaaaatttagggagtttaagattgtacactttattccctaattgagacgaccaatagtctaattttgcagccgtgatagaatctgtgaaatgggtcatattatcacctattgccaggtacatactaatattagcatccttatacggaaggcgtaccatgtcatattctttgtcatcgattgtgattgtatttccttgcaatttagtaactacgttcatcatgggaaccgttttcgtaccgtacttattagtaaaactagcattgcgtgttttagtgatatcaaacggatattgccatatacctttaaaatatatagtattaatgattgcccatagagtattattgtcgagcatattagaatctactacattagacataccggatctacgttctactatagaattaattttattaaccgcatctcgtctaaagtttaatctatataggccgaatctatgatattgttgataatacgacggtttaatgcacacagtattatctacgaaactttgataagttagatcagtgtacgtatatttagatgttttcagcttagctaatcctgatattaattctgtaaatgctggacccagatctctttttctcaaatccatagtcttcaataattctattctagtattacctgatgcaggcaatagcgacataaacatagaaaacgaataaccaaacggtgagaagacaatattatcatcttgaatatttttatacgctactataccggcattggtaaatccttgtagacgataggcggacgctgaacacgctaacgatagtatcaataacgcaatcatgattttatggtattaataattaaccttatttttatgttcggtataaaaaaattattgatgtctacacatccttttgtaattgacatctatatatccttttgtataatcaactctaatcactttaacttttacagttttccctaccagtttatccctatattcaacatatctatccatatgcatcttaacactctctgccaagatagcttcagagtgaggatagtcaaaaagataaatatatagagcataatcattctcgtatactctgccctttattacatcacccgcattgggcaacgaataacaaaatgcaagcatcttgttaacgggctcgtaaattgggataaaaattatgtttttattgtcttatatctattttattcaagagaatattcaggaatttctttttccggttgtatctcgtcgcagtatatatcatttgtacattgtttcatattttttaatagtttacaccttttagtaggactagtatcgtacaattcatagctgtattttgaattccaatcacgcataaaaatatcttccaattgttgacgaagacctaatccatcatccggtgtaatattaatagatgctccacatgtatccgtaaagtaatttcctgtccaatttgaggtacctatataggccgttttatcggttaccatatatttggcatggtttaccctagaatacggaatgggaggatcagcatctggtacaataaatagctttacttctatatttatgtttttagattttagcatagcgatagatcttaaaaagtttctcatgataaacgaagatcgttgccagcaactaatcaatagcttaacggatacttgtctgtctatagcggatcttcttaattcatcttctatataaggccaaaacaaaattttacccgccttcgaataaataatagggataaagttcataacagatacataaacgaatttactcgcatttctaatacatgacaataaagcggttaaatcattggttctttccatagtacatagttgttgcggtgcagaagcaataaatacagagtgtggaacgccgcttacgttaatactaagaggatgatctgtattataatacgacggataaaagtttttccaattatatggtagattgttaactccaagataccagtatacctcaaaaatttgagtgagatccgctgccaagttcctattattgaagatcgcaatacccaattccttgacctgagttagtgatctccaatccatgttagcgcttcctaaataaatatgtgtattatcagatatccaaaattttgtatgaagaactcctcctaggatatttgtaatatctatgtatcgtacttcaactccggccatttgtagtctttcaacatcctttaatggtttgttagatttattaacggctactctaactcgtactcctcttttgggtaattgtacaatctcgtttaatattatcgtgccgaaattcgtacccacttcatccgataaactccaataaaaagatgatatatctagtgtttttgtggtattggatagaatttccctccacatgttaaatgtagacaaatatactttatcaaattgcatacctataggaatagtttctgtaatcactgcgattgtattatccggattcattttatttgttaaaagaataatcctatatcacttcactctattaaaaatccaagtttctatttctttcatgactgattttttaacttcatccgtttccttatgaagatgatgtttggcaccttcataaatttttatttctctattacaatttgcatgttgcatgaaataatatgcacctaaaacatcgctaatcttattgtttgttccctggagtatgagagtcggggggtgttaatcttggaaattatttttctaaccttgttggtagccttcaagacctgactagcaaatccagccttaattttttcatgattgactaatgggtcgtattggtatttataaactttatccatatctctagatactgattctggacatagctttccgactggcgcatttggtgtgatggttcccataagtttggcagctagcagattcagtcttgaaacagcatctgcattaactagaggagacattagaatcattgctgtaaacaagtttggattatcgtaagaggctagctcccatggaatgacccaataagtagatttaatagttaccacgtgctgtaccaaagtcatcaatcatcattttttcaccattacttcttccatgtccaatatgatcatgtgagaatactaaaattcctaacgatgatatgttttcagctagttcgtcataacgtccagaatgtttaccagctccatgacttatgaatactaatgccttaggatatgtaataggtttccaatatttacaatatatgtaatcattgtccagattgaacatacagtttgcactcatgattcacgttatataactatcaatattaacagttcgtttgatgatcatattatttttatgttttattgataattgtaaaaacatacaattaaatcaatatagaggaaggagacggctactgtcttttgtaagatagtcatggcgactaaattagattatgaggatgctgttttttactttgtggatgatgataaaatatgtagtcgcgactccatcatcgatctaatagatgaatatattacgtggagaaatcatgttatagtgtttaacaaagatattaccagttgtggaagactgtacaaggaattgatgaagttcgatgatgtcgctatacggtactatggtattgataaaattaatgagattgtcgaagctatgagcgaaggagaccactacatcaattttacaaaagtccatgatcaggaaagtttattcgctaccataggaatatgtgctaaaatcactgaacattggggatacaaaaagatttcagaatctagattccaatcattgggaaacattacagatttgatgaccgacgataatataaacatcttgatactttttctagaaaaaaaattgaattgatgatataggggtcttcataacgcataattattacgttagcattctatatccgtgttaaaaaaaattatcctatcatgtatttgagagttttatatgtagcaaacatgatagctgtgatgccaataagctttagatattcacgcgtgctagtgttagggatggtattatctggtggtgaaatgtccgttatataatctacaaaacaatcatcgcatatagtatgcgatagtagagtaaacatttttatagtttttactggattcatacatcgtctacccaattcggttataaatgaaattgtcgccaatcttacacccaaccccttgttatccattagcatagtattaacttcgttatttatgtcataaactgtaaatgattttgtagatgccatatcatacatgatattcatgtccctattataatcattactaactttatcacaatatatgttgataatatctatatatgatctagtctttgtgggcaactgtctatacaagtcgtctaaacgttgtttactcatatagtatcgaacagccatcattacatggtcccgttccgttgatagataatcgagtatgttagtggacttgtcaaatctatataccatattttctggaagtggatatacatagtcgtgatcaacattattgctagcctcatcttctatatcctgtactataccattatctatatcatctacataatctatgatattattacacataaacatcgacaacatactattgtttattatctaagtcctgttgatccaaacccttgatctcctctatttgtactatctagagattgtacttcttccagttctggataatatatacgttgatagattagctgagctattctatctccagtatttacattaaacgtacattttccattattaataagaatgactcctatgtttcccctataatcttcgtctattacaccacctcctatatcaatgccttttagtgacagaccagacctaggagctattctaccatagcagaacttaggcatggacatactaatatctgtcttaattaactgtctttctcctggagggatagtataatcgtaagcgctatacaaatcatatccggcagcacccggcgattgcctagtaggagatttagctctgttagtttccttaacaaatctaactggtgagttaatattcatgttgaacataaaactaatattttatttcaaaattatttaccatcccatatattccatgaataagtgtgatgattgtacacttctatagtatctatatacgatccacgataaaatcctcctatcaatagcagtttattatccactatgatcaattctggattatccctcggataaataggatcatctatcagagtccatgtattgctggattcacaataaaattccgcatttctaccaaccaagaataaccttctaccgaacactaacgcgcatgatttataatgaggataataagtggatggtccaaactgccactgatcatgattgggtagcaaatattctgtagttgtatcagtttcagaatgtcctcccattacgtatataacattgtttatggatgccactgctggattacatctaggtttcagaagactcggcatattaacccaagcagcatccccgtggaaccaacgctcaacagatgtgggatttggtagacctcctactacgtataatttattgttagcgggtatcccgctagcatacagtctggggctattcatcggaggaattggaatccaattgtttgatatataatttacagctatagcattgttatgtatttcattgttcatccatccaccgatgagatatactacttctccaacatgagtacttgtacacatatggaatatatctataatttgatccatgttcataggatactctatgaatggatacttgtatgatttgcgtggttgtttatcacaatgaaatattttggtacagtctagtatccattttacattatttatacctctgggagaaagataatttgacctgattacatttttgataaggagtagcagatttcctaatttatttcttcgcctcatataccacttaatgacaaaatcaactacataatcctcatctggaacatttagttcatcgctttctagaataagtttcatagatagataatcaaaattgtctatgatgtcatcttccagttccaaaaagtgtttggcaataaagtttttagtatgacataagagattggatagtccgtattctatacccatcatgtaacactcgacacaatattcctttctaaaatctcgtaagataaagtttatacaagtgtagatgataaattctacagaggttaatatagaagcacgtaataaattgacgacgttatgactatctatatatacctttccagtatatgagtaaataactatagaagttaaactgtgaatgtcaaggtctagacaaacccttgtaactggatctttatttttcgtgtatttttgacgtaaatgtgtgcgaaagtaaggagataactttttcaatatcgtagaattgactattatattgcctcctatggcatcaataattgttttgaatttcttagtcatagacaatgctaatatattcttacagtacacagtattgacaaatatcggcatttatgtttctttaaaagtcaacatctagagaaaaatgattatctttttgagacataactcccattttttggtattcacccacacgtttttcgaaaaaattagtttttccttccaatgatatattttccatgaaatcaaacggattggtaacattataaatttttttaaatcccaattcagaaatcaatctatccgcgacgaattctatatatgttttcatcatttcacaattcattcctataagtttaactggaagagccgcagtaagaaattcttgttcaatggatactgcatctgttataatagatctaacggtttcttcactcggtggatgcaataaatgtttaaacatcaaacatgcgaaatcgcagtgcagaccctcgtctctactaattagttcgttggaaaacgtgagtccgggcattaggccacgctttttaagccaaaatatggaagcgaatgatccagaaaagaaaattccttctactgcagcaaaggcaataagtctctctccataaccggcgctgtcatgtatccacttttgagcccaatcggccttcttttttacacaaggcatcgtttctatggcattaaagagatagtttttttcattactatctttaacataagtatcgatcaaaagactatacatttccgaatgaatgttttcaatggccatctgaaatccgtagaaacatctagcctcggtaatctgtacttctgtacaaaatcgttccgccaaattttcattcactattccgtcactggctgcaaaaaacgccaatacatgttttataaaatatttttcgtctggtgttagtttattccaatcattgatatctttagatatatctacttcttccactgtccaaaatgatgcctctgcctttttatacatgttccagatgtcatgatattggattgggaaaataacaaatctatttggatttggtgcaaggatgggttccataactaaattaacaataacaataaattttttttcagttatctatatgcctgtacttggattttttgtacatcgatatcgccgcaatcactacaataattacaagtattattgatagcattgttattagtactatcataattaaattatctacattcatgggtgctgaataatcgttattatcatcattatcattttgtaattgtgacatcatactagataaatcgtttgcgagattgttgtgggaagcgggcatggaggatgcattatcattattatttaacgccttccatttggattcacaaatgttacgcacattcaacattttatggaaactataattttgtgaaaacaaataacaagaaaactcgtcatcgttcaaatttttaacgatagtaaaccgattaaacgtcgagctaatttctaacgctagcgactctgttggatatgggtttccagatatatatcttttcagttcccctacgtatctataatcatctgtaggaaatggaagatatttccatttatctactgttcctaatatcatatgtggtggtgtagtagaaccattaagcgcgaaagatgttatttcgcatcgtattttaacttcgcaataatttctggttagataacgcactctaccagtcaagtcaatgatattagcctttacagatatattcatagtagtcgtaacgatgactccatcttttagatgcgatactcctttgtatgtaccagaatcttcgtacctcaaactcgatatatttaaacaagttaatgagatattaacgcgttttatgaatgatgatatataaccagaagttttatcctcggtggctagcgctataaccttatcattataataccaactagtgtgattaatatgtgacacgtcagtgtgggtacaaatatgtacattatcgtctacgtcgtattcgatacatccgcatacagccaacaaatataaaatgacaaatactctaacgccgttcgtacccatcttgatgcggtttaataaatgttttgatttcaatttattgtaaaaaaagattcggttttatactgttcgatattctcattgcttatattttcatctatcatctccacacagtcaaatccgtggttagcatgcacctcatcaaccggtaaaagactatcggactcttctatcattataactctagaatatttaatttggtcattattaatcaagtcaattatcttatttttaacaaacgtgagtattttactcattttttataaaaacttttagaaatatacagactctatcgtgtgtctatatcttctttttatatccaatgtatttatgtctgatttttcttcatttatcatatataatggtccaaattctacacgtgcttcggattcatccagatcattaaggttcttataattgtaacatccttctcttccctcttctacatcttccttcttattcttattcttagcgtcacagaatctaccacagcaggatcccatgacgagcgtcatattaaactaatccattttcaattataatatatgattagtaatgaccattaaaataaaaaatattcttcataaccggcaagaaagtgaaaagttcacattgaaactatgtcagtagtatacatcatgaaatgatgatatatatatactctattttggtggaggattatatgatataattcgtggataatcatttttaagacacatttctttattcgtaaatcttttcacgttaaatgagtgtccatattttgcaatttcttcatatgatggcggtgtacgtggacgaggctgctcctgttcttgttgtggtcgccgactgtcgtgtctgcgtttagatccctccattatcgcgattgcgtagatggagtactattttataccttgtaattaaatttttttattaattaaacgtataaaaacgttccgtatctgtatttaagagccagatttcgtctaatagaacaaatagctacagtaaaaataactagaataattgctacacccactagaaaccacggatcgtaatacggcaatcggttttcgataataggtggaacgtatattttatttaaggacttaacaattgtctgtaaaccacaatttgcttccgcggatcctgtattaactatctgtaaaagcatatgttgaccgggcggagccgaacattctccgatatctaatttctgtatatctataatattattaacctccgcatacgcattacagttcttttctagcttggataccgcactaggtacatcgtctagatctattcctatttcctcagcgatagctcttctatccttttccggaagcaatgaaatcacttcaataaatgattcaaccatgagtgtgaaactaagtcgagaattactcatgcatttgttagttattcggagcgcgcaatttttaaactgtcctataacctctcctatatgaatagcacaagtgacattagtagggatagaatgttgagctaatttttgtaaataactatctataaaaagattatacaaagttttaaactctttagtttccgccatttatccagtctgagaaaatgtctctcataataaatttttccaagaaactaattgggtgaagaatggaaacctttaatctatatttatcacagtctgttttggtacacatgatgaattcttccaatgccgtactaaattcgatatctttttcgatttctggatatgtttttaataaagtatgaacaaagaaatggaaatcgtaataccagttatgtttaactttgaaattgttttttattttcttgttaatgattccagccacttgggaaaagtcaaagtcgtttaatgccgatttaatacgttcattaaaaacaaactttttatcctttagatgaattattattggttcattggaatcaaaaagtaagatattatcgggtttaagatctgcgtgtaaaaagttgtcgcaacagggtagttcgtagattttaatgtataacagagccatctgtaaaaagataaactttatgtattgtaccaaagatttaaatcctaatttgatagctaactcggtatctactttatctgccgaatacagtgctaggggaaaaattataatgtttcctctttcatattcgtagttagttctcttttcatgttcgaaaaagtgaaacatgcggttaaaatagtttataacattaatattactgttaataactgccggataaaagtgggatagtaatttcacgaatttgatactgtcctttctctcgttaaacgcctttaaaaaaactttagaagaatatctcaatgagagttcctgaccatccatagtttgtatcaataatagcaacatatgaagaacacgtttatacagagtatgtaaaaatgttaatttatagtttaatcccatggcccacgcacacacgattaattttttttcatctccctttagattgttgtatagaaatttgggtactgtgaactccgccgtagtttccatgggactatataattttgtggcctcgaatacaaattttactacatagttatctatcttaaagactataccatatcctcctgtagatatgtgataaaaatcgtcgtttataggataaaatcgtttatccttttgttggaaaaaggatgaattaatgtaatcattctcttctatctttagtagtgtttccttattaaaattcttaaaataatttaacaatctaactgacggagcccaattttggtgtaaatctaattgggacattatattgttaaaatacaaacagtctcctaatataacagtatctgataatctatggggagacatccattgatattcaggggatgaatcattggcaacacccatttattgtacaaaaagccccaatttacaaacgaaagtccaggtttgatagagacaaacaattaactattttgtctctgtttttaacacctccacagtttttaatttctttagtaatgaaattattcacaatatcagtatcttctttatctaccagagattttactaacttgataaccttggctgtctcattcaatagggtagtaatatttgtatgtgtgatattgatatctttttgaattgtttcttttagaagtgattctttgatggtgccagcatacgaattacaataatgcagaaactcggttaacatgcaggaattatagtaagccaattccaattgttgcctgtgttgtattagagtgtcaatatgagcaatggtgtccttgcgtttctctgatagaatgcgagcagcgattttggcgttatcatttgacgatatttctggaatgacgaatcctgtttctactaactttttggtaggacaaagtgaaacaatcaagaagatagcttctcctcctatttgtggaagaaattgaactcctctagatgatctactgacgatagtatctccttgacagatattggaccgaattacagaagtacctggaatgtaaagccctgaaaccccctcattttttaagcagattgttgccgtaaatcctgcactatgcccaagatagagagctcctttggtgaatccatctctatgtttcagtttaaccaagaaacagtcagctggtctaaaatttccatctctatctaatacagcatctaacttgatgtcaggaactatgaccggtttaatgttatatgtaacattgagtaaatccttaagttcataatcatcactgtcatcagttatgtacgatccaaacaatgtttctaccggcatagtggatacgaagatgctatccatcagaatgtttccctgattagtattttctatatagctattcttctttaaacgattttccaaatcagtaactatgttcatttttttaggagtaggacgcctagccagtatggaagaggattttctagatcctctcttcaacatctttgatctcgatggaatgcaaaaccccatagtgaaacaaccaacgataaaaataatattgtttttcactttttataattttaccatctgactcatggattcattaatatctttataagagctactaacgtataattctttataactgaactgagatatatacaccggatctatggtttccataattgagtaaatgaatgctcggcaataactaatggcaaatgtatagaacaacgaaattatactagagttgttaaagttaatattttctatgagctgttccaataaattatttgttgtgactgcgttcaagtcataaatcatcttgatactatccagtaaaccgtttttaagttctggaatattatcatcccattgtaaagcccctaattcgactatcgaatatcctgctctgatagcagtttcaatatcgacggacgtcaatactgtaataaaggtggtagtattgtcatcatcgtgataaactacgggaatatggtcgttagtaggtacggtaactttacacaacgcgatatataactttccttttgtaccatttttaacgtagttgggacgtcctgcagggtattgttttgaagaaatgatatcgagaacagatttgatacgatatttgttggattcctgattattcactataatataatctagacagatagatgattcgataaatagagaaggtatatcgttggtaggataatacatccccattccagtattctcggatactctattgatgacactagttaagaacatgtcttctattctagaaaacgaaaacatcctacatggactcattaaaacttctaacgctcctgattgtgtctcgaatgcctcgtacaaggatttcaaggatgccatagattctttgaccaacgatttagaattgcgtttagcatctgatttttttattaaatcgaatggtcggctctctggtttgctaccccaatgataacaatagtcttgtaaagataaaccgcaagaaaatttatacgcatccatccaaataaccctagcaccatcggatgatattaatgtattattatagattttccatccacaattattgggccagtatactgttagcaacggtatatcgaatagattactcatgtaacctactagaatgatagttcgtgtactagtcataatatctttaatccaatctaaaaaatttaaaattagattttttacactgttaaagttaacaaaagtattacccgggtacgtggatatcatatatggcattggtccattatcagtaatagctccataaactgatacggcgatggtttttatatgtgtttgatctaacgaggaagaaattcgcgcccacaattcatctctagatatgtatttaatatcaaacggtaacacatcaatttcgggacgcgtatatgtttctaaatttttaatccaaatataatgatgacctatatgccctattatcatactgtcaactatagtacacctagggaacttacgatacatctgtttcctataatcgttaaattttacaaatctataacatgctaaaccttttgacgacagccattcattaatttctgatatggaatctgtattctcgataccgtatcgttctaaagccagtgctatatctccctgttcgtgggaacgctttcgtataatatcgatcaacggataatctgaagtttttggagaataatatgactcatgatctatttcgtccataaacaatctagacataggaattggaggcgatgatcttaattttgtgcaatgagtcgtcaatcctataacttctaatcttgtaatattcatcatcgacataatactatctatgttatcatcgtatattagtataccatgaccttcttcatttcgtgccaaaatgatatacagtcttaaatagttacgcaatatctcaatagtttcataattgttagctgttttcatcaaggtttgtatcctgtttaacatgatggcgttctataacgtctctattttctatttttaattttttaaatttttaacgatttactgtggctagatacccaatctctctcaaatatttttttagcctcgcttacaagctgtttatctatactattaaaactgacgaatccgtgattttggtaatgggttccgtcgaaatttgccgaagtgatatgaacatattcgtcgtcgactatcaacaattttgtattattctgaatagtgaaaaccttcacagatagatcattttgaacacacaacgcatctagacttttggcggttgccatagaatatacgtcgttcttatcccaattaccaactagaagtctgatcttaactcctctattaatggctgcttctataatggagttgtaaatgtcgggccaatagtagctattaccgtcgacacgtgtagtgggaactatggccaaatgttcaatatctatactagtcttagctgacctgagtttatcaataactacatcggtatctagatctctagaatatcccaataggtgttccggagaatcagtaaagaacactccacctataggattcttaatatgatacgcagtgctaactggcaaacaacaagccgcagagcataaattcaaccatgaattttttgcgctattaaaggctttaaaagtatcaaatcttctacgaagatctgtggccagcgggggataatcagaatatacacctaacgttttaatcgtatgtatagatcctccagtaaatgacgcgtttcctacataacatctttcatcatctgacacccaaaaacaaccgagtagtagtcccacattattttttttatctatattaacggttataaaatttatatccgggcagtgactttgtagctctcccagatttcttttccctcgttcatctagcaaaactattattttaatccctttttcagatgcctcttttagtttatcaaaaataagcgctcccctagtcgtactcagaggattacaacaaaaagatgctatgtatatatatttcttagctagagtgataatttcgttaaaacattcaaatgttgttaaatgatcggatctaaaatccatattttctggtagtgtttctaccagcctacattttgctcccgcaggtaccgatgcaaatggccacatttagttaacataaaaacttatacatcctgttctatcaacgattctagaatatcatcggctatatcgctaaaattttcatcaaagtcgacatcacaacctaactcagtcaatatattaagaagttccatgatgtcatcttcgtctatttctatatccgtatccattgtagattgttgaccgattatcgagtttaaatcattactaatactcaatccttcagaatacaatctgtgtttcattgtaaatttataggcggtgtatttaagttggtagattttcaattatgtattaatatagcaacagtagttcttgctcctccttgattctagcatcctcttcattattttcttctacgtacataaacatgtccaatacgttagacaacacaccgacgatggcggccgcaggatcctgcgaagcttacagacacgaatatgactaaaccgatgaccatttaaaaacccctctctagctttcacttaaactgtatcgatcattcttttagcacatgtataatataaaaacattattctatttcgaatttaggcttccaaaaatttttcatccgtaaaccgataataatatatatagacttgttaatagtcggaataaatagattaatgcttaaactatcatcatctccacgattagagatacaatatttacattctttttgctgtttcgaaactttatcaatacacgttaatacaaacccaggaaggagatattgaaactgaggctgttgaaaatgaaacggtgaatacaataattcagataatgtaaaatcatgattccgtattctgatgatattagaactgctaatggatgtcgatggtatgtatctaggagtatctattttaacaaagcatcgatttgctaatatacaattatccttttgattaattgttattttattcatattcttaaaaggtttcatatttatcaattcttctacattaaaaatttccatttttaatttatgtagccccgcaatactcctcattacgtttcattttttgtctataatatccattttgttcatctcggtacatagattatccaattgagaagcgcatttagtagttttgtacattttaagtttattgacgaatcgtcgaaaactagttatagttaacattttattatttgataccctgatattaatacccctgccgttactattatttataactgatgtaatccacgtaacattggaattaactatcgatagtaatgcatcgacgcttccaaaattgtctattataaactcaccgataatttttttattgcatgttttcatattcattaggattatcaaatctttaatcttattacgattgtatgcgttgatattacaagacgtcattctaaaagacggaggatctccatcaaatgccagacaatcacgtacaaagtacatggaaataggttttgttctattgcgcatcatagatttatatagaacacccgtagaaatactaatttgttttactctataaaatactaatgcatctatttcatcgttttgtataacgtctttccaagtgtcaaattccaaatttttttcattgatagtaccaaattcttctatctctttaactacttgcatagataggtaattacagtgatgcctacatgccgttttttgaaactgaatagatgcgtctagaagcgatgctacgctagtcacaatcaccactttcatatttagaatatatatatgtaaaaatatagtagaatttcattttgtttttttctatgctataaatgaattctcattttgcatctgctcatactccgttttatattaataccaaagaaggaagatatctggttctaaaagccgttaaagtatgcgatgttagaactgtagaatgcgaaggaagtaaagcttcctgcgtactcaaagtagataaaccctcatcgcccgcgtgtgagagaagaccttcgtccccgtccagatgcgagagaatgaataaccctggaaaacaagttccgtttatgaggacggacatgctacaaaatatgttcgcggctaatcgcgataatgtagcttctagacttttgtcctaaaatactattatatccttttcgatattaataaatccgtgtcgtccaggttttttatctctttcagtatgtgaatagataggtattttatctctattcatcatcgaatttaagagatccgataaacattgtttgtattctccagatgtcagcatctgatacaacaatatatgtgcacataaacctctggcacttatttcatgtaccttccccttatcactaaggagaatagtatttgagaaatatgtatacatgatattatcatgaattagatatacagaatttgtaacactctcgaaatcacacgatgtgtcggcgttaagatctaatatatcactcgataacacattttcatctagatacactagacattttttaaagctaaaatagtctttagtagtaacagtaactatgcgattattttcatcgatgatacatttcatcggcatattattacgcttaccatcaaagactataccatgtgtatatctaacgtattctagcatggttgccatacgcgcattaaacttttcaggatctttggatagatcttccaatctatctatttgagaaaacatttttatcatgttcaatagttgaaacgtcggatccactatatagatattatctataaagattttaggaactacgttcatggtatcctggcgaatattaaaactatcaatgatatgattatcgttttcatcttttatcaccatatagtttctaagatatgggattttacttaatataatattatttcccgtgataaattttattagaaaggccaaatctataagaaaagtcctagaattagtctgaagaatatctatatcgccgtatagtatatttggattaattagatatagagaatatgatccgtaacatatacaacttttattatggcgtctaagatattcttccatcaacttattaacatttttgactagggaagatacattatgacgtcccattacttttgccttgtctattactgcgacgttcatagaatttagcatatctcttgccaattcttccattgatgttacattataagaaattttagatgaaattacatttggagctttaatagtaagaactcctaatatgtccgtgtatgtggtcactaatacagattgtagttctataatcgtaaataatttacctatattatatgtttgagtctgtttagaaaagtagctaagtatacgatcttttatttctgatgcagatgtattaacatcggaaaaaaatctttttttattcttttttactaaagatacaaatatgtctttgttaaaaacagttattttctgaatatttctagcttgtaattttaacatatgatattcgttcacactaggtactctgcctaaataggtttctataatctttaatgtaatattaggaaaagtattctgatcaggattcctattcattttgaggatttaaaactctgattattgtctaatatggtctctacgcaaactttttcacagagcgatagagtttttgataactcgtttttcttaagaaatataaaactactgtctccagagctcgctctatcttttattttatctaattcgatacaaactcctgatactggttcagaaagtaattcattaattttcagtcctttatagaagatatttaatatagataatacaaaatcttcagtttttgatatcgatctgattgatcctagaactagatatattaataacgtgctcattaggcagtttatggcagcttgataattagatatagtatattccagttcatatttattagataccgcattgcccagattttgatattctatgaattcctctgaaaataaatccaaaataactagacattctattttttgtggattagtgtactctcttccctctatcatgttcactactggtgtccacgatgataaatatctagagggaatataatatagtccataggatgccaatctagcaatgtcgaataactgtaattttattcttcgctcttcattatgaattgattcttgaggtataaacctaacacaaattatattattagacttttcgtatgtaatgtctttcatgttataagtttttaatcctggaatagaatctattttaatgaggcttttaaacgcagagttctccaacgagtcaaagcataatactctgttgtttttcttatatacgatgttacgattttcttctttgaatggaataggtttttgaattagtttataattacaacataatagataaggaagtgtgcaaatagtacgcggaaaaaacataatagctcccctgttttcatccatggttttaagtaaatgatcactggcttctttagtcaatggatattcgaacattaaccgtttcatcatcattggacagaatccatatttcttaatgtaaagagtgatcaaatcattgtgtttattgtaccatcttgttgtaaatgtgtattcggttatcggatctgctcctttttctattaaagtatcgatgtcaatctcgtctaagaattcaactatatcgacatatttcatttgtatacacataaccattactaacgtagaatgtataggaagagatgtaacgggaacagggtttgttgattcgcaaactattctaatacataattcttctgttaatacgtcttgcacgtaatctattatagatgccaagatatctatataattattttgtaagatgatgttaactatgtgatctatataagtagtgtaataattcatgtattttgatatatgttccaactctgtctttgtgatgtctagtttcgtaatatctatagcatcctcaaaaaatatattcgcatatattcccaagtcttcagttctatcttctaaaaaatcttcaacgtatggaatataataatctattttacctcttctgatatcattaatgatatagtttttgacactatcttctgtcaattgattcttattcactatatctaagaaacggatagcgtccctaggacgaactactgccattaatatctctattatagcttctggacataattcatctattataccagaattaatgggaactattccgtatctatctaacatagttttaagaaagtcagaatctaagacttgatgttcatatattggttcatacatgaaatgatctctattgatgatagtgactatttcattctctgaaaattggtaactcattctatatatgctttccttgttgatgaaggatagaatatactcaatagaatttgtaccaacaaactgttctcttatgaatcgtatatcatcatctgaaataatcatgtaaggcatacatttaacaattagagacttgtctcctgttatcaatatactattcttgtgataatttatgtgtgaggcaaatttgtccacgttctttaattttgttatagtagatatcaaatccaatggagctacagttcttggcttaaacagatatagtttttctggaacaaattctacaacattattataaaggactttgggtagataagtgggatgaaatcctattttaattaatgcgatagccttgtcctcgtgcagatatccaaacgcttttgtgatagtatggcattcattgtctagaaacgctctacgaatatctgtgacagatatcatctttagagaatatactagtcgcgttaatagtactacaatttgtattttttaatctatctcaataaaaaaattaatatgtatgattcaatgtataactaaactactaactgttattgataactagaatcagaatctaatgatgacgtaaccaagaagtttatctactgccaatttagctgcattatttttagcatctcgtttagattttccatcggccttatcgaatactcttccgtcgatgtctacacaggcataaaatgtaggagagttactaggcccaactgattcaatacgaaaagaccaatctctcctagtaatttggcagtactcattaataacggtgacagggttagcatctttccaatcaataatttttttagccggaataacatcatcaaaagacttatgatcctctctcattgatttttcgcgggatacatcatctattatgacgtcagccatagcatcagcatccggcttatccgcctccgttgtcataaaccaacgaggaggaatatcgtcggagctgtacaccatagcactacgttgaagatcgtacagagctttattaacttctcgcttctccatattaagttgtctagttagttgtgcagcagtagctccttcgattccaatgtttttaatagccgcacacacaatctctgcgtcagaacgctcgtcaatatagatcttagacatttttagagagaactaacgcaaccagcaataaaactgaacctactttatcatttttttattcatcatcctctggtggttcgtcgttcctatcaaatgtagctctgattaacccgtcatctataggtgatgctggttctggagattctggaggagatggattattatctggaagaatctctgttatttccttgttttcatgtatcgattgcgttgtaacattaagattgcgaaatgctctaaatttgggaggcttaaagtgttgtttgcaatctctacacgcgtgtctaactagtggaggttcgtcagctgctctagtttgaatcatcatcggcgtagtattcctacttttacagttaggacacggtgtattgtatttctcgtcgagaacgttaaaataatcgttgtaactcacatcctttattttatctatattgtattctactcctttcttaatgcattttataccgaataagagatagcgaaggaattctttttcggtgccgctagtacccttaatcatatcacatagtgttttatattccaaatttgtggcaatagacggtttatttctatacgatagtttgtttctggaatcctttgagtattctataccaatattattctttgattcgaatttagtttcttcgatattagattttgtattacctatattcttgatgtagtactttgatgatttttccatggcccattctattaagtcttccaagttggcatcatccacatattgtgatagtaattctcggatatcagtagcggctaccgccattgatgtttgttcattggatgagtaactactaatgtatacattttccatttataacacttatgtattaactttgttcatttatattttttcattattatgttgatattaacaaaagtgaatatatatatgttaataattgtattgtggttatacggctacaattttataatgagtgaaagtcagtgtccgatgatcaatgacgatagctttactctgaaaagaaagtatcaaatcgatagtgcggagtcaacaataaaaatggataagaagaggataaagtttcagaatagagccaaaatggtaaaagaaataaatcagacaataagagcagcacaaactcattacgagacattgaaactaggatacataaaatttaagagaatgattatgactactactctagaagatatagcaccatctattccaaataatcagaaaacttataaactattctcggacatttcagccatcggcaaagcatcacagaatccgagtaagatggtatatgctctgctgctttacatgtttcccaatttgtttggagatgatcatagattcattcgttatagaatgcatccaatgagtaaaatcaaacacaagatcttctctcctttcaaacttaatcttattagaatattagtggaagaaagattctataataatgaatgcagatctaataaatggagaataattggaacacaagttgataaaatgttgatagctgaatctgataaatatacaatagatgcaaggtataacctaaaacccatgtatagaatcaagggagaatctgaagaagataccctctttatcaaacagatggtagaacaatgtgtgacatcccaggaattggtggaaaaagtgttgaagatactgtttagagatttgttcaagagtggagaatacaaagcgtacagatacgatgatgatgtagaaaatggatttattggattggatacactaaaattaaacattgttcatgatatagttgaaccatgtatgcctgttcgtaggccagtggctaagatactgtgtaaagaaatggtaaataaatactttgagaatccgctacatattattggtaaaaatcttcaagagtgcattgactttgttagtgaataggcatttcatctttctccaatactaattcaaattgttaaattaataatggatagtataaatagttattagttataagatagtaaaaataattattagaataagagtgtagtatcatagataactctcttctataaaaatggattttattcgtagaaagtatcttatatacacagtagaaaataatatagattttttaaaggatgatacattaagtaaagtaaacaattttaccctcaatcatgtactagctctcaagtatctagttagcaattttcctcaacacgttattactaaggatgtattagctaataccaatttttttgttttcatacatatggtacgatgttgtaaagtgtacgaagcggttttacgacacgcatttgatgcacccacgttgtacgttaaagcattgactaagaattatttatcgtttagtaacgcaatacaatcgtacaaggaaaccgtgcataaactaacacaagatgaaaaatttttagaggttgccgaatacatggacgaattaggagaacttataggcgtaaattatgacttagttcttaatccattatttcacggaggggaacccatcaaagatatggaaatcatttttttaaaactgtttaagaaaacagacttcaaagttgttaaaaaattaagtgttataagattacttatttgggcatacctaagcaagaaagatacaggcatagagtttgcggataatgatagacaaaatatatacactctatttcaacaaactggtagaatcgtccatagcaatctaacagaaacgtttagagattatatctttcccggagataagactagctattgggtgtggttaaacgaaagtatagctaatgatgcggatatcgttcttaatagacacgccattaccatgtatgataaaattcttagttatatatactctgagataaaacaaggacgcgttaataaaaacatgcttaagttagtttatatctttgagcctgaaaaagatatcagagaacttctgctagaaatcatatatgatattcctggagatatcctatctattattgatgcaaaaaacgacgattggaaaaaatattttattagtttttataaagctaattttattaacggtaatacatttattagtgatagaacgtttaacgaggacttattcagagttgttgttcaaatagatcccgaatatttcgataatgaacgaattatgtctttattctctacgagtgctgcggacattaaacgatttgatgagttagatattaataacagttatatatctaatataatttatgaggtgaacgatatcacattagatacaatggatgatatgaagaagtgtcaaatctttaacgaggatacgtcgtattatgttaaggaatacaatacatacctgtttttgcacgagtcggatcccatggtcatagagaacggaatactaaagaaactgtcatctataaaatccaagagtagacggctgaacttgtttagcaaaaacattttaaaatattatttagacggacaattggctcgtctaggtcttgtgttagatgattataaaggagacttgttagttaaaatgataaaccatcttaagtctgtggaggatgtatccgcattcgttcgattttctacagataaaaaccctagtattcttccatcgctaatcaaaactattttagctagttataatatttccatcatcgtcttatttcaaaggtttttgagagataatctatatcatgtagaagaattcttggataaaagcatccatctaaccaagacggataagaaatatatacttcaattgataagacacggtagatcatagaacagaccaaatatattattaataatttgtatatacatagatataattatcacacatttttgataaatgggaactgctgcaacaattcagactcccaccaaattaatgaataaagaaaatgcagaaatgattttggaaaaaattgttgatcatatagttatgtatattagtgacgaatcaagtgattcagaaaataatcctgaatatattgattttcgtaacagatacgaagactatagatctctcattataaaaagtgatcacgagtttgtaaagctatgtaaaaatcatgcggagaaaagttctccagaaacgcaacaaatgattatcaaacacatatacgaacaatatcttattccagtatctgaagtactattaaaacctataatgtccatgggtgacataattacatataacggatgtaaagacaatgaatggatgctagaacaactctctaccctaaactttaacaatctccgcacatggaactcatgtagcataggcaatgtaacgcgtctgttttatacattttttagttatctgatgaaagataaactaaatatataagtataatcccattctaatactttaacctgatgtattagcatcttattagaatattaacctaactaaaagacataacataaaaactcattacatagttgataaaaagcggtaggatataaatattatggctgccaccgttccgcgttttgacgacgtgtacaaaaatgcacaaagaagaattctagatcaagaaacattttttagtagaggtctaagtagaccgttaatgaaaaacacatatctatttgataattacgcgtatggatggataccagaaactgcaatttggagtagtagatacgcaaacctagatgctagtgactattatcccatttcgttgggattacttaaaaagttcgagtttctcatgtctctatataaaggtcctattcccgtatatgaagaaaaagtaaatactgaattcatagccaatggatcgttctctggtagatacgtatcatatcttcgaaagttttctgcccttccaacaaacgagtttattagttttttgttactgacttccattccaatctataatatcttgttctggtttaaaaacacacagtttgatattactaaacacacattattcagatacgtctatacagataatgccaaacacctggcgttggctaggtatatgcatcaaacaggagactataagcctttgtttagtcgtctcaaagagaattatatatttaccggtcccgttccaataagtatcaaagatatagatcaccctaatcttagtagagcaagaagtccatccgattatgagacattagctaatattagtactatattgtactttaccaagtatgatccggtattaatgtttttattgttttacgtacctgggtattcaattactacaaaaattactccagccgtagaatatctaatggataaactgaatctaacaaagagcgacgtacaactgttgtaaattattttatgcttcgtaaaatgtaggttttgaaccaaacattctttcaaagaatgagatgcataaaactttattatccaatagattgactatttcggacgtcaatcgtttaaagtaaacttcgtaaaatattctttgatcactgccgagtttaaaacttctatcgataattgtctcatatgttttaatatttacaagttttttggtccatggtacattagccggacaaatatatgcaaaataatatcgttctccaagttctatagtttctggattatttttattatattcagtaactaaatacatattagggttatctgcggatttataatttgagtgatgcattctactcaacataaataattctagaggagacgatctactatcaaattcggatcgtaaatctgtttctaaagaacggagaatatctatacatacctgattagaattcatccgtccttcagacaacatctcagacagtctggttttgtacatcttaatcatattcttatgaaacttggaaacatctcttctagtttcactagtacctttattaattctctcaggtacagattttgaattcgacgatgctgagtatttcatcgttgtatatttcttcttcgattgcataatcagattcttatataccgcctcaaactctattttaaaattattaaacaatactctattattaatcagtcgttctaactctttcgctatttctatagacttatctacatcttgactgtctatctctgtaaacacggagtcggtatctccatacacgctacgaaaacgaaatctgtaatctataggcaacgatgttttcacaatcggattaatatctctatcgtccatataaaatggattacttaatggattggcaaaccgtaacataccgttagataactctgctccatttagtaccgattctagatacaagatcattctacgtcctatggatgtgcaactcttagccgaagcgtatgagtatagagcactatttctaaatcccatcagaccatatactgagttggctactatcttgtacgtatattgcatggaatcatagatggccttttcagttgaactggtagcctgttttagcatctttttatatctggctctctctgccaaaaatgttcttaatagtctaggaatggttccttctatcgatctatcgaaaattgctatttcagagatgaggttcggtagtctaggttcacaatgaaccgtaatatatctaggaggtggatatttctgaagcaatagctgattatttatttcttcttccaatctattggtactaacaacgacaccgactaatgtttccggagatagatttccaaagatacacacattaggatacagactgttataatcaaagattaatacattattactaaacattttttgttttggagcaaataccttaccgccttcataaggaaacttttgttttgtttctgatctaactaagatagttttagtttccaacaatagctttaacagtggacccttgatgactgtactcgctctatattcgaataccatggattgaggaagcacatatgttgacgcacccgcgtctgtttttgtttctactccataatactcccacaaatactgacacaaacaagcatcatgaatacagtatctagccatatctaaagctatgtttagattataatccttatacatctgagctaaatcaacgtcatcctttccgaaagataatttatatgtatcattaggtaaagtaggacataatagtacgactttaaatccattttcccaaatatctttacgaattactttacatataatatcctcatcaacagtcacataattacctgtggttaaaacctttgcaaatgcagcggctttgcctttcgcgtctgtagtatcgtcaccgatgaacgtcatttctctaactcctctatttaatactttacccatgcaactgaacgcgttcttggatatagaatccaatttgtacgaatccaatttttcaaatttttgaatgaatgaatatagatcgaaaaatatagttccattattgttattaacgtgaaacgtagtattggccatgccgcctactcccttatgactagactgatttctctcataaatacagagatgtacagcttcctttttgtccggagatctaaagataattttctctcctgttaataactctagacgattagtaatatatctcagatcaaagttatgtccgttaaaggtaacgacgtagtcgaacgttagttccaacaattgtttagctattcgtaacaaaactatttcagaacatagaactagttctcgttcgtaatccatttccattagtgactgtatcctcaaacatcctctatcgacggcttcttgtatttcctgttccgttaacatctcttcattaatgagcgtaaacaataatcgtttaccacttaaatcgatataacagtaacttgtatgcgagattgggttaataaatacagaaggaaacttcttatcgaagtgacactctatatctagaaataagtacgatcttgggatatcgaatctaggtatttttttagcgaaacagttacgtggatcgtcacaatgataacatccattgttaatctttgtcaaatattgctcgtccaacgagtaacatccgtctggagatatcccgttagaaatataaaaccaactaatattgagaaattcatccatggtggcattttgtatgctgcgtttctttggctcttctatcaaccacatatctgcgacggagcattttctatctttaatatctagattataacttattgtctcgtcaatgtctatagttctcatctttcccaacggcctcgcattaaatggaggaggagacaatgactgatatatttcgtccgtcactacgtaataaaagtaatgaggaaatcgtataaatacggtctcgccatttcgacatctggatttcagatataaaaatctgttttcaccgtgactttcaaaccaattaatgcaccgaacatccatttatagaatttagaaatatattttcatttaaatgaatcccaaacattggggaagagccgtatggaccattatttttatagtactttcgcaagcgggtttagacggcaacatagaagcgtgtaaacgaaaactatatactatagttagcactcttccatgtcctgcatgtagacggcacgcgactatcgctatagaggacaataatgtcatgtctagcgatgatctgaattatatttattattttttcatcagattatttaacaatttggcatctgatcccaaatacgcgatcgatgtgacaaaggttaaccctttataaacttaacccattataaaacttatgattagtcacaactgaaataaccgcgtgattattttttggtataattctacacggcatggtttctgtgactatgaattcaacccccgttacattagtgaaatctttaacaaacagcaagggttcgtcaaagacataaaactcattgtttacaatcgaaatagaccccctatcacacttaaaataaaaaatatccttatcctttaccaccaaataaaattctgattggtcaatgtgaatgtattcacttaacagttccacaaatttatttattaactccgaggcacatacatcgtcggtattttttatggcaaactttactcttccagcatccgtttctaaaaaaatattaacgagttccatttatatcatccaatattattgaaatgacgttgatggacagatgatacaaataagaaggtacggtacctttgtccaccatctcctccaattcatgctctattttgtcattaactttaatgtatgaaaacagtacgccacatgcttccatgacagtgtgtaacactttggatacaaaatgtttgacattagtataattgtccaagactgtcaatctataatagatagtagctataatatattctatgatggtattgaagaagatgacaaccttggcatattgatcatttaacacagacatggtatcaacagatagcttgaatgaaagagaatcagtaattggaataagcgtcttctcgatagagtgtccgtataccaacatgtctgatattttgatgtattccattaaattatttagttttttctttttattctcgttaaacagcatttctgtcaacggaccccaacatcgttgaccgattaagttttgattgatttttccgtgtaaggcgtatctagtcagatcgtatagcctatccaataatccatcgtctgtgtgtagatcacatcgtacactttttaattctctatagaagagcgacagacatctggagcaattacagacagcaatttctttattctctacagatgtaagatacttgaagacattcctatgatgatgcagaattttggataacacggtattgatggtatctgttaccataattcctttgatggctgatagtgtcagagcacaagatttccaatctttgacaatttttagcaccattatctttgttttgatatctatatcagacagcatggtgcgtctgacaacacagggattaagacggaaagatgaaatgattctctcaacatcttcaatagataccttgctattttttctggcattatctatatgtgcgagaatatcctctagagaatcagtatcctttttgatgatagtggatctcaatgacatgggacgtttaaaccttcttattctatcaccagattgcatggtgatttgtcttctttcttttatcataatgtaatctctaaattcatcggcaaattgtctatatctaaaatcataatatgagatgtttacctctacaaatatctgttcgtccaatgttagagtatttacatcagttttgtattccaaattaaacatggcaacggatttaattttatattcctctattaagtcctcgtcgataataacagaatgtagataatcatttaatccgtcgtacatggttggaagatgcttgttgacaaaatctttaattgtcttgatgaaggtgggactatatctaacatcttgattaataaaatttataacattgtccataggatactttgtaactagttttatacacatctcttcatcggtaagtttagacagaatatcgtgaacaggtggtatattatattcatcagatatacgaagaacaatgtccaaatctatattgtttaatatattatatagatgtagcgtagctcctacaggaatatctttaactaagtcaatgatttcatcaaccgttagatctattttaaagttaatcatataggcattgatttttaaaaggtatgtagccttgactacattctcattaattaaccattccaagtcattgtgtgtaagaagattatattctatcataagcttgactacatttggtcccgataccattaaagaattcttatgatataaggaaacagattttaggtactcatctactctacaagaattttggagagccttaacgatatcagtgacgtttattatttcaggaggaaagaatctaacattgagaatatcggaattaatagcttccagatacagtgattttggcaatagtccgtgtaatccataatccagtaacacgagctggtgcttgctagacaccttttcaatgtttaatttttttgaaataagctttgataaagccttcctcgcaaattccggatacatgaacatgtcggcgacatgattaagtattgttttttcattatttttatattttctcaacaagttctcaataccccaatagatgatagaatatcacccaatgcgtccatgttgtctatttccaacaggtcgctatatccaccaatagaagtttttccaaaaaagattctaggaacagttctaccaccagtaatttgttcaaaataatcccgcaattcattttcgggtttaaattctttaatatcgacaatttcatacgctcctcttttgaaactaaacttatttagaatatccagtgcatttctacaaaaaggacatgtatacttgacaaaaattgtcactttgttattggccaacctttgttgtacaaattcctcggccattttaatatttaagtgatataaaactatctcgacttatttaactctttagtcgagatatatggacgcagatagctatatgatagccaactacagaaggcaaacgctataaaaaacataattacgacgagcatatttataaatatttttattcagcattacttgatatagtaatattaggcacagtcaaacattcaaccactctcgatacattaactctctcattttctttaacaaattctgcaatatcttcgtaaaaagattcttgaaactttttagaatatctatcgactctagatgaaatagcgttcgtcaacatactatgttttgtatacataaaggcgcccattttaacagtttctagtgacaaaatgctagcgatcctaggatcctttagaatcacatagattgacgattcgtctctcttagtaactctagtaaaataatcatacaatctagtacgcgaaataatattatccttgacttgaggagatctaaacaatctagttttgagaacatcgataagttcatcgggaatgacatacatactatctttaatagaactcttttcatccagttgaatggattcgtccttaaccaactgattaatgagatcttctattttatcattttccagatgatatgtatgtccattaaagttaaattgtgtagcgcttctttttagtctagcagccaatactttaacatcactaatatcgatatacaaaggagatgatttatctatggcattaagaattcgtttttcgacatccgtcaaaaccaattcctttttgcctgtatcatccagttttccatcctttgtaaagaaattattttctactagactattaataagactgataaggattcctccataattgcacaatccaaactttttaacaaaactagactttacgagatctacaggaatgcgtacttcaggttttttagcttgtgattttttcttttgcggacattttctagtaaccaactcatctaccatttcattgattttagcagtgaaataagctttcaatgcacgggcactgatactattgaaaacgagttgatcttcaaattccgccatttaagttcaccaaacaacttttaaatacaaatatatcaatagtagtagaataagaactataaaaaaaataataattaaccaaccccaacaaccggtattattagttgatgtggtagttttctcatcacttagaacagatttaacaatttctataaagtctgtcaaatcatcttccggagaccccataaatacaccaaatatagcggcgtacaacttatccatttatacattgaatattggcttttctttatcgctatcttcatcatattcatcatcaatatcaacaagtcccagattacgagccagatcttcttctacattttcagtcattgatacacgttcactatctccagagagtccgataacgttagccaccacttctctatcaatgattagtttcttgagcgcgaaagtaatttttgtttccgttccggatctatagaagacgataggtgtgataattgccttggccaattgtctttctcttttactgagtgattctagttcaccttctatagatctgagaatggatgattctccagtcgaaacatattctaccatggatccgtttaatttgttgatgaagatggattcatccttaaatgttttctctgtaatagtttccaccgaaagactatgcaaagaatttggaatgcgttccttgtgcttaatgtttccatagacggcttctagaagttgatacaacataggactagccgcggtaacttttatttttagaaagtatccatcgcttctatcttgtttagatttatttttataaagtttagtctctccttccaacataataaaagtggaagtcatttgactagataaactatcagtaagttttatagagatagacgaacaattagcgtattgagaagcatttagtgtaacgtattcgatacattttgcattagatttactaatcgattttgcatactctataacacccgcacaagtctgtagagaatcgctagatgcagtaggtcttggtgaagtttcaactctcttcttgattaccttactcatgattaaacctaaataattgtactttgtaatataatgatatatattttcactttatctcatttgagaataaaaatgtttttgtttaaccactgcatgatgtacagatttcggaatcgcaaaccaccagtggttttattttatccttgtccaatgtgaattgaatgggagcggatgcgggtttcgtacgtagatagtacattcccgtttttagaccgagactccatccgtaaaaatgcatactcgttagtttggaataactcggatctgctatatggatattcatagattgactttgatcgatgaaggctcccctgtctgcagccatttttatgatcgtcttttgtggaatttcccaaatagttttataaactcgcttaatatcttctggaaggtttgtattctgaatggatccaccatctgccataatcctattcttgatctcatcattccataattttctctcggttaaaactctaaggagatgcggattaactacttgaaattctccagacaatactctccgagtgtaaatattactggtatacggttccaccgactcattatttcccaaaatttgagcagttgatgcagtcggcataggtgccaccaataaactatttctaagaccgtatgttctgattttatcttttagaggttcccaattccaaagatccgacggtacaacattccaaagatcatattgtagaataccgttactggcgtacgatcctacatatgtatcgtatggtccttccttctcagctagttcacaactcgcctctaatgcaccgtaataaatggtttcgaagatcttcttatttagatcttgtgcttccaggctatcaaatggataatttaagagaataaacgcgtccgctaatccttgaacaccaataccgataggtctatgtctcttattagagatttcagcttctggaataggataataattaatatctataattttattgagatttctgacaattactttgaccacatccttcagtttgagaaaatcaaatcgcccatctattacaaacatgttcaaggcaacagatgccagattacaaacggctacctcattagcatccgcatattgtattatctcagtgcaaagattactacacttgatagttcctaaattttgttgattactctttttgttacacgcatccttataaagaatgaatggagtaccagtttcaatctgagattctataatcgctttccagacgactcgagcctttattatagatttgtatctcctttctctttcgtatagtgtatacaatcgttcgaactcgtctccccaaacattgtccaatccaggacattcatccggacacatcaacgaccactctccgtcatccttcactcgtttcataaagagatcaggaatccaaagagctataaatagatctctggttctatgttcctcgtttcctgtattctttttaagatcgaggaacgccataatatcagaatgccacggttccaagtatatggccataactccaggccgtttgtttcctccctgatctatgtatctagcggtgttattataaactctcaacattggaataataccgtttgatataccattggtaccggagatatagcttccactggcacgaatattactaattgatagacctattccccctgccattttagagattaatgcgcatcgttttaacgtgtcatagataccctctatgctatcatcgatcatgttaagtagaaaacagctagacatttggtgacgactagttcccgcattaaataaggtaggagaagcgtgcgtaaaccatttttcagaaagtagattgtacgtctcaatagctgagtctatatcccattgatgaattcctactgcgacacgcattaacatgtgctgaggtctttcaacgatcttgttgtttattttcaacaagtaggatttttccaaagttttaaaaccaaaatagttgtatgaaaagtctcgttcgtaaataataaccgagttgagtttatccttatatttgttaactatatccatggtgatacttgaaataatcggagaatgtttcccatttttaggattaacatagttgaataaatcctccatcacttcactaaatagtttttttgtttccttgtgtagatttgatacggctattctggcggctagaatggcataatccggatgttgtgtagtacaagtggctgctatttcggctgccagagtgtccaattctaccgttgttactccattatatattccttgaataaccttcatagctattttaataggatctatatgatccgtgtttaagccataacataattttctaatacgagacgtgattttatcaaacatgacattttccttgtatccatttcgtttaatgacaaacatttttgttggtgtaataaaaaaattatttaacttttcattaatagggatttgacgtatgtagcgtacaaaatgattgttcctggtatatagataaagagtcctatatatttgaaaatcgttacggctcgattaaactttaatgattgcatagtgaatatatcattaggatttaactccttgactatcatggcggcgccagaaattaccatcaaaagcattaatacagttataccgatcgcagttagaacggttatagcatccaccatttatatctaaaaattagatcaaagaatatgtgacaaagtcctagttgtatactgagaattgacgaaacaatgtttcttacatatttttttcttattagtaaccgacttaatagtaggaactggaaaactagacttgattattctataagtatagatacccttccaaataatattctctttgataaaagttccagaaaatgtagaattttttaaaaagttatcttttgctattaccaagattgtgtttagacgcttattattaatatgagtgatgaaatccacaccgcctctagatatcgcctttatttccacattagatggtaaatccaatagtgaaactatctttttaggaatgtatggactcgcgtttagaggagtaaacgtcttaggcgtcggaaaggatgattcatcaaacgaataaacaatttcacaaatggatgttaatgtattagtaggaaattttttgacgctattggaattgaagattctaatggatgatgttctacctatttcatccgataacatgttaatttccgacaccaacggttttaatatttcgatgatatacggtagtctctctttcggacttatatagcttattccacaatacgagtcattatatactccaaaaaacaaaataactagtataaaatctgtatcgaatgggaaaaacgaaattatcgacataggtatagaatccggaacattgaacgtattaatacttaattctttttctgtggtaagtaccgataggttattgacattgtatggttttaaatattctataacttgagacttgatagatattagtgatgaattgaaaattatttttatcaccacgtgtgtttcaggatcatcgtcgacgcccgtcaaccaaccgaacggagtaaaataaatatcattaatatatgctctagatattagtatttttatcaatcctttgattatcatcttctcgtaggcgaatgattccatgatcaagagtgatttaagaacatcctccggagtattaatgggcttagtaaacagtccatcgttgcaataataaaagttatccaagttaaaggatattatgcattcgtttaaagatatcacctcatctgacggagacaattttttggtaggttttagagactttgaagctacttgtttaacaaagttattcatcgtcgtctactattctatttaattttgtagttaatttatcacatatcacattaattgactttttggtccacttttccatacgtttatattcttttaatcctgcgttatccgtttccgttatatccagggatagatcttgcaagttaaatagaatgctcttaaataatgtcattttcttatccgctaaaaatttaaagaatgtataaacctttttcagagatttgaaactcttaggtggtgtcctagtacacaatatcataaacaaactaataaacattccacattcagattccaacagctgattaacttccacattaatacagcctattttcgctccaaatgtacattcgaaaaatctgaataaaacatcgatgtcacaatttgtattatccaatacagaatgtttgtgattcgtgttaaaaccatcggagaaggaatagaaataaaaattattatagtggtggaattcagttggaatattgcctccggagtcataaaaggatactaaacattgttttttatcataaattacacatttccaatgagacaaataacaaaatccaaacattacaaatctagaggtagaacttttaattttgtctttaagtatatacgataagatatgtttattcataaacgcgtcaaatttttcatgaatcgctaaggagtttaagaatctcatgtcaaattgtcctatataatccacttcggatccataagcaaactgagagactaagttcttaatacttcgattgctcatccaggctcctctctcaggctctattttcatcttgacgacctttggattttcaccagtatgtattcctttacgtgataaatcatcgattttcaaatccatttgtgagaagtctatcgccttagatactttttcccgtagtcgaggtttaaaaaaatacgctaacggtatactagtaggtaactcaaagacatcatatatagaatggtaacgcgtctttaactcgtcggttaactctttcttttgatcgagttcgtcgctactattgggtctgctcaggtgccccgactctactagttccaacatcataccgataggaatacaagacactttgccggcggttgtagatttatcatatttttccactacatatccgttacaatttgttaaaaatttagatacatctatattgctacataatccagctagtgaatatatatgacataataaattggtaaatcctagttctggtattttactaattactaaatctgtatatctttccatttatcatggaaaagaatttaccagatatcttcttttttccaaactgcgttaatgtattctcttacaaatattcacaagatgaattcagtaatatgagtaaaacggaacgtgatagtttctcattggccgtgtttccagttataaaacatagatggcataacgcacacgttgtaaaacataaaggaatatacaaagttagtacagaagcacgtggaaaaaaagtatctcctccatcactaggaaaacccgcacacataaacctaaccgcgaagcaatatatatacagtgaacacacaataagctttgaatgttatagttttctaaaatgtataacaaatacagaaatcaattcgttcgatgagtatatattaagaggactattagaagctggtaatagtttacagatattttccaattccgtaggtaaacgaacagatactataggtgtactagggaataagtatccatttagcaaaattccattggcctcattaactcctaaagcacaacgagagatattttcagcgtggatttctcatagacctgtagttttaactggaggaactggagtgggtaagacgtcacaggtacccaagttattgctttggtttaattatttatttggtggattctctactctagataaaatcactgactttcacgaaagaccagtcattctatctcttcctaggatagctttagttagattgcatagcaataccattttaaaatcattgggatttaaggtactagatggatctcctatttctttacggtacggatctataccggaagaattaataaacaaacaaccaaaaaaatatggaattgtattttctacccataagttatctctaacaaaactatttagttatggcactcttattatagacgaagttcatgagcatgatcaaataggagatattattatagcagtagcgagaaagcatcatacgaaaatagattctatgtttttaatgactgccacgttagaggatgacagggaacggctaaaagtatttttacctaatcccgcatttatacatattcctggagatacactgtttaaaattagcgaggtatttattcataataagataaatccatcttccagaatggcatacatagaagaagaaaagagaaatttagttactgctatacagatgtatactcctcctgatggatcatccggtatagtctttgtggcatccgttgcacagtgtcacgaatataaatcatatttagaaaaaagattaccgtatgatatgtatattattcatggtaaggtcttagatatagacgaaatattagaaaaagtgtattcatcacctaatgtatcgataattatttctactccttatttggaatccagcgttactatacgcaatgttacacacatttatgatatgggtagagtttttgtccccgctccttttggaggatcgcaacaatttatttctaaatctatgagagatcaacgaaaaggaagagtaggaagagttaatcctggtacatacgtctatttctatgatctgtcttatatgaagtctatacagcgaatagattcagaatttctacataattatatattgtacgctaataagtttaatctaacactccccgaagatttgtttataatccctacaaatttggatattctatggcgtacaaaggaatatatagactcgttcgatattagtacagaaacatggaataaattattatccaattattatatgaagatgatagagtatgctaaactttatgtactaagtcctattctcgctgaggagttggataactttgagaggacgggagaattaactagtattgtacgagaagccattttatctctaaatttacaaattaagattttaaattttaaacataaagatgatgatacgtatatacacttttgtaaaatattattcggtgtctataacggaacaaacgctactatatattatcatagacctctaacgggatatatgaatatgatttcagatactatatttgttcctgtagataataactaaaaatcaaactctaatgaccacatctttttttagagatgaaaaattttccacatctccttttgtagacacgactaaacattttgcagaaaaaagtttattagtgtttagataatcgtatacttcatcagtgtagatagtaaatgtgaacagataaaaggtattcttgctcaatagattggtaaattccatagaatatattaatcctttcttcttgagatcccacatcatttcaaccagagacgttttatccaatgatttacctcgtactataccacatacaaaactagattttgcagtgacgtcgtacctggtattcctaccaaacaaaattttacttttagttcttttagaaaattctaaggtagaatctctatttgccaatatgtcatctatggaattaccactagcaaaaaatgatagaaatatatattgatacatcgcagctggttttgatctactatactttaaaaacgaatcagattccataattgcctgtatatcatcagctgaaaaactatgttttacacgtattccttcggcatttctttttaatgatatatcttgtttagacaatgataaagttatcatgtccatgagagacgcgtctccgtatcgtataaatatttcattagatgttagacgcttcattaggggtatacttctataaggtttcttaatcagtccatcattggttgcgtcaagaactactatcggatgttgttgggtatctctagtgttacacatggccttactaaagtttgggtaaataactatgatatctctattaattatagatgcatatatttcattcgtcaaggatattagtatcgacttgctatcgtcattaatacgtgtaatgtaatcatataaatcatgcgatagccaaggaaaatttaaatagatgttcatcatataatcgtcgctataattcatattaatacgttgacattgactaatttgtaatatagcctcgccacgaagaaagctctcgtattcagtttcatcgataaaggataccgttaaatataactggttgccgatagtctcatagtctattaagtggtaagtttcgtacaaatacagaatccctaaaatattatctaatgttggattaatctttaccataactgtataaaatggagacggagtcataactattttaccgtttgtacttactggaatagatgaaggaataatctccggacatgctggtaaagacccaaatgtctgtttgaagaaatccaatgttccaggtcctaatctcttaacaaaaattacgatattcgatcccgatatcctttgcattctatttaccagcatatcacgaactatattaagattatctatcatgtctattctcccaccgttatataaatcgcctccgctaagaaacgttagtatatccatacaatggaatacttcatttctaaaatagtattcgttttctaattctttaatgtgaaatcgtatactagaaagggaaaaattatctttgagttttccgttagaaaagaaccacgaaactaatgttctgattgcgtccgattccgttgctgaattaatggatttacaccaaaaactcatataacttctagatgtagaagcattcgctaaaaaattagtagaatcaaaggatataagtagatgttccaacaagtgagcaattcccaagatttcatctatatcattctcgaatccgaaattagaaattcccaagtagatatcctttttcatccgatcgttgatgaaaatacgaactttattcggtaagacaatcatttactaaggagtaaaataggaagtaatgttcgtatgtcgttatcatcgtataaattaaaggtgtgttttttaccattaagtgacattataattttaccaatattggaattataatataggtgtatttgcgcactcgcgacggttgatgcatcggtaaatatagctgtatctaatgttctagtcggtatttcatcatttcgctgtctaataatagcgttttctctatctgtttccattacagctgcctgaagtttattggtcggataatatgtaaaataataagaaatacatacgaataacaaaaataaaataagatataataaagatgccatttagagatctaattttgtttaacttgtccaaattcctacttacagaagatgaggaatcgttggagatagtgtcttccttatgtagaggatttgaaatatcttataatgacttgataacttactttccagataggaaataccataaatatatttataaagtatttgaacatgtagatttatcggaggaattaagtatggaattccatgatacaactctgagagatttagtctatcttagattgtacaagtattccaagtgtatacggccgtgttataaattaggagataatctaaaaggcatagttgttataaaggacaggaatatttatattagggaagcaaatgatgacttgatagaatatctcctcaaggaatacactcctcagatttatacatattctaatgagcgcgtccccataactggttcaaaattaattctttgtggattttctcaagttacatttatggcgtatacaacgtcgcatataacaacaaataaaaaggtagatgttctcgtttccaaaaaatgtatagatgaactagtcgatccaataaattatcaaatacttcaaaatttatttgataaaggaagcggaacaataaacaaaatactcaggaagatattttattcggtaacaggtggccaaactccataggtagctttttctatttcggattttagaatttccaaattcaccagcgatttatcggttttggtgaaatccaaggatttattaatgtccacaaatgccatttgttttgtctgtggattgtatttgaaaatggaaacgatgtagttagatagatgcgctgcgaagtttcctattagggttccgcgcttcacgtcacccagcatacttgaatcaccatcctttaaaaaaaatgataagatatcaacatggagtatatcatactcgaattttaattcttctactgactcactgacattttcacaaatactacaatacggtttaccgaaaataatcagtacgttcttcatttatgggtatcaaaaacttaaaatcgttactgctggaaaataaatcactgacgatattagatgataatttatacaaagtatacaatggaatatttgtggatacaatgagtatttatatagccgtcgccaattgtgtcagaaacttagaagagttaactacggtattcataaaatacgtaaacggatgggtaaaaaagggagggcatgtaaccctttttatcgatagaggaagtataaaaattaaacaagacgttagagacaagagacgtaaatattctaaattaaccaaggacagaaaaatgttagaattagaaaagtgtacatccgaaatacaaaatgttaccggatttatggaagaagaaataaaggcagaaatgcaattaaaaatcgataaactcacatttcaaatatatttatctgattctgataacataaaaatatcattgaatgagatactaacacatttcaacaataatgagaatgttacattattttattgtgatgaacgagacgcagaattcgttatgtgtctcgaggctaaaacacatttctctaccacaggagaatggccgttgataataagtaccgatcaggatactatgctatttgcatctgctgataatcatcctaagatgataaaaaacttaactcaactgtttaaatttgttccctcggcagaggataactatttagcaaaattaacggcgttagtgaatggatgtgatttctttcctggactctatggggcatctataacacccaccaacttaaacaaaatacaattgtttagtgattttacaatcgataatatagtcactagtttggcaattaaaaattattatagaaagactaactctaccgtagacgtgcgtaatattgttacgtttataaacgattacgctaatttagacgatgtctactcgtatattcctccttgtcaatgcactgttcaagaatttatattttccgcattagatgaaaaatggaatgaatttaaatcatcttatttagaaagcgtgccgttaccctgccaattaatgtacgcgttagaaccacgcaaggagattgatgtttcagaagttaaaactttatcatcttatatagatttcgaaaatactaaatcagatatcgatgttataaaatctatatcctcgatcttcggatattctaacgaaaactgtaacacgatagtattcggcatctataaggataatttactactgagtataaataattcattttactttaacgatagtctgttaataaccaatactaaaagtgataatataataaatataggttactagattaaaaatggtgttccaactcgtgtgctctacatgcggtaaagatatttctcacgaacgatataaattgattatacgaaaaaaatcattaaaggatgtactcgtcagtgtaaagaacgaatgttgtaggttaaaattatctacacaaatagaacctcaacgtaacttaacagtgcaacctctattggatataaactaatatggatccggttaattttatcaagacatatgcgcctagaggttctattatttttattaattataccatgtcattaacaagtcatttgaatccatcgatagaaaaacatgtgggtatttattatggtacgttattatcggaacacttggtagttgaatctacctatagaaaaggagttcgaatagtcccattggatagtttttttgaaggatatcttagtgcaaaagtatacatgttagagaatattcaagttatgaaaatagcagctgatacgtcattaactttattgggtattccgtatggatttggtcatgatagaatgtattgttttaaattggtagctgactgttataaaaatgccggtattgatacatcgtctaaacgaatattgggcaaagatatttttctgagccaaaacttcacagacgataatagatggataaagatatatgattctaataatttaacattttggcaaattgattaccttaaagggtgagttaatatgcataactactcctccgttgttttttccctcgttctttttcttaacgttgtttgccatcactctcataatgtaaagatattctaaaatggtaaacttttgcatatcggacgcagaaattggtataaatgttgtaattgtattatttcccgtcaatggactagtcacagctccatcagttttatatcctttagagtatttctcactcgtgtctaacattctagagcattccatgatctgtttatcgttgatattggccggaaagatagattttttattttttattatattactattggcaattgtagatataacttctggtaaatatttttctaccttttcaatctcttctattttcaagccggctatatattctgctatattgttgctagtatcaataccttttctggctaagaagtcatatgtggtattcactatatcagttttaactggtagttccattagcctttccacttctgcagaataatcagaaattggttctttaccagaaaatccagctactataataggctcaccgatgatcattggcaaaatcctatattgtaccagattaatgagagcatatttcatttccaataattctgctagttcttgagacattgatttatttgatgaatctagttggttctctagatactctaccatttctgccgcatacaataacttgttagataaaatcagggttatcaaagtgtttagcgtggctagaatagtgggcttgcatgtattaaagaatgcggtagtatgagtaaaccgttttaacgaattatatagtctccagaaatctgtggcgttacatacatgagccgaatgacatcgaagattgtccaatatttttaatagctgctctttgtccattatttctatatttgactcgcaacaattgtagataccattaatcaccgattcctttttcgatgccggacaatagcacaattgtttagctttggactctatgtattcagaattaatagatatatctctcaatacagattgcactatacattttgaaactatgtcaaaaattgtagaacgacgctgttctgcagccatttaactttaaataatttacaaaaatttaaaatgagcatccgtataaaaatcgataaactgcgccaaattgtggcatatttttcagagttcagtgaagaagtgtctataaatgtagactcgacggatgagttaatgtatatttttgccgccttgggcggatctgtaaacatttgggcaattatacctctaagtgcatcagtgttttaccgaggagccgaaaatattgtgtttaatcttcctgtgtccaaggtaaaatcgtgtttgtgtagttttcacaatgatgccatcatagatatagaacctgatctggaaaataatctagtaaaactttctagttatcatgtagtaagtgtcgattgtaacaaggaactgatgcctattaggacagatactactatttgtctaagtatagatcaaaagaaatcttacgtgtttaattttcacaagtatgaagaaaaatgttgtggtagaaccgtcattcatctagaatggttgttgggctttatcaagtgtattagtcagcatcagcatctggctattatgtttaaagatgacaatattattatgaagactcctggtaatactgatgcgttttccagggaatattctatgactgaatgttctcaagaactacaaaagttttctttcaaaatagctatctcgtctctcaacaaactacgaggattcaaaaagagagtcaatgtttttgaaactagaatcgtaatggataatgacgataacattttaggaatgttgttttcggatagagttcaatcctttaagatcaacatctttatggcgtttttagattaatactttcaatgagataaatatgggtggcggagtaagtgttgagctccctaaacgggatccgcctccgggagtacccactgatgagatgttattaaacgtggataaaatgcatgacgtgatagctcccgctaagcttttagaatatgtgcatataggaccactagcaaaagataaagaggataaagtaaagaaaagatatccagagtttagattagtcaacacaggacccggtggtctttcggcattgttaagacaatcgtataatggaaccgcacccaattgctgtcgcacttttaatcgtactcattattggaagaaggatggaaagatatcagataagtatgaagagggtgcagtattagaatcgtgttggccagacgttcacgacactggaaaatgcgatgttgatttattcgactggtgtcagggggatacgttcgatagaaacatatgccatcagtggatcggttcagcctttaataggagtaatagaactgtagagggtcaacaatcgttaataaatctgtataataagatgcaaacattatgtagtaaagatgctagtgtaccaatatgcgaatcatttttgcattatttacgcgcacacaatacagaagatagcaaagagatgatcgattatattctaagacaacagtctgcggactttaaacagaaatatatgagatgtagttatcccactagagataagttagaagagtcattaaaatatgcggaacctcgagaatgttgggatccagagtgttcgaatgccaatgttaatttcttactaacacgtaattataataatttaggactttgcaatattgtacgatgtaataccagcgtgaacaacttacagatggataaaacttcctcattaagattgtcatgtggattaagcaatagtgatagattttctactgttcccgtcaatagagcaaaagtagttcaacataatattaaacactcgttcgacctaaaattgcatttgatcagtttattatctctcttggtaatatggatactaattgtagctatttaaatgggtgccgcggcaagcatacagacgacggtgaatacactcagcgaacgtatctcgtctaaattagaacaagaagcgaacgctagtgctcaaacaaaatgtgatatagaaatcggaaatttttatatccgacaaaaccatggatgtaacctcactgttaaaaatatgtgctctgcggacgcggatgctcagttggatgctgtgttatcagccgctacagaaacatatagtggattaacaccggaacaaaaagcatacgtgccagctatgtttactgctgcgttaaacattcagacgagtgtaaacactgttgttagagattttgaaaattatgtgaaacagacttgtaattctagcgcggtcgtcgataacaaattaaagatacaaaacgtaatcatagatgaatgttacggagccccaggatctccaacaaatttggaatttattaatacaggatctagcaaaggaaattgtgccattaaagcgttgatgcaattgacgactaaggccactactcaaatagcacctagacaagttgctggtacaggagttcagttttatatgattgttatcggtgttataatattggcagcgttgtttatgtactatgccaagcgtatgttgttcacatccaccaatgataaaatcaaacttattttagccaataaggaaaacgtccattggactacttacatggacacattctttagaacttctccgatggttattgctaccacggatatgcaaaactgaaaatatattgataatattttaatagattaacatggaagttatcgctgatcgtctagacgatatagtgaaacaaaatatagcggatgaaaaatttgtagattttgttatacacggtctagagcatcaatgtcctgctatacttcgaccattaattaggttgtttattgatatactattatttgttatagtaatttatatttttacggtacgtctagtaagtagaaattatcaaatgttgttggtggtgctagtcatcacattaactattttttattactttatactataatagtactagactgacttctaacaaacatctcacctgccataaataaatgcttgatattaaagtcttctatttctaacactattccatctgtggaaaataatactctgacattatcgctaattgacacatcggtgagtgatatgcctataaagtaataatcttctttgggcacatataccagtgtaccaggttctaacaacctatttactggtgctcctgtagcatactttttctttaccttgagaatatccatcgtttgcttggtcaatagcgatatgtgattttttatcaaccactcaaaaaagtaattggagtgttcatatcctctacgggctattgtctcatggccgtgtatgaaatttaagtaacacgactgtggtagatttgttctatagagccgattgccgcaaatagatagaactaccaatatgtctgtacaaatgttaaacattaattgattaacagaaaaaacaatgttcgttctgggaatagaaaccagatcaaaacaaaattcgttagaatatatgccacgtttatacatggaatataaaataactacagtttgaaaaataacagtatcatttaaacatttaacttgcggggttaatctcacaactttactgtttttgaactgttcaaaatatagcatcgatccgtgagaaatacgtttagccgcctttaatagaggaaatcccaccgcctttctggatctcaccaacgacgatagttctgaccagcaactcatttcttcatcatccacctgttttaacatataataggcaggagatagatatccgtcattgcaatattccttctcgtaggcacacaatctaatattgataaaatctccattctcttctctgcatttattatcttgtctcggtggctgattaggctgtggtcttggtttaggccttggtctatcgttgttgaatctattttggtcattaaatctttcatttcttcctggtatatttctatcacctcgtttggttggatttttgtctatattatcgtttgtaacatcggtacgggtattcatttatcacaaaaaaaacttctctaaatgagtctactgctagaaaacctcatcgaagaagataccatattttttgcaggaagtatatctgagtatgatgatttacaaatggttattgccggcgcaaaatccaaatttccaagatctatgctttctatttttaatatagtacctagaacgatgtcaaaatatgagttggagttgattcataacgaaaatatcacaggagcaatgtttaccacaatgtataatataagaaacaatttgggtctaggagatgataaactaactattgaagccattgaaaactatttcttggatcctaacaatgaagttatgcctcttattattaataatacggatatgactgccgtcattcctaaaaaaagtggtaggagaaagaataagaacatggttatcttccgtcaaggatcatcacctatcttgtgcattttcgaaactcgtaaaaagattaatatttataaagaaaatatggaatccgcgtcgactgagtatacacctatcggagacaacaaggctttgatatctaaatatgcgggaattaatgtcctgaatgtgtattctccttccacatccataagattgaatgccatttacggattcaccaataaaaataaactagagaaacttagtactaataaggaactagaatcgtatagttctagccctcttcaagaacccattaggttaaatgattttctgggactattggaatgtgttaaaaagaatattcctctaacagatattccgacaaaggattgattactataaatggagaatgttcctaatgtatactttaatcctgtgtttatagagcccacgtttaaacattctttattaagtgtttataaacacagattaatagttttatttgaagtattcgttgtattcattctaatatatgtattttttagatctgaattaaatatgttcttcatgcctaaacgaaaaatacccgatcctattgatagattacgacgtgctaatctagcgtgtgaagacgataaattaatgatctatggattaccatggatgacaactcaaacatctgcgttatcaataaatagtaaaccgatagtgtataaagattgtgcaaagcttttgcgatcaataaatggatcacaaccagtatctcttaacgatgttcttcgcagatgatgattcattttttaagtatttggctagtcaagatgatgaatcttcattatctgatatattgcaaatcactcaatatctagactttctgttattattattgatccaatcaaaaaataaattagaagctgtgggtcattgttatgaatctctttcagaggaatacagacaattgacaaaattcacagactttcaagattttaaaaaactgtttaacaaggtccctattgttacagatggaagggtcaaacttaataaaggatatttgttcgactttgtgattagtttgatgcgattcaaaaaagaatcctctctagctaccaccgcaatagatcctgttagatacatagatcctcgtcgcaatatcgcattttctaacgtgatggatatattaaagtcgaataaagtgaacaataattaattctttattgtcatcatgaacggcggacatattcagttgataatcggccccatgttttcaggtaaaagtacagaattaattagacgagttagacgttatcaaatagctcaatataaatgcgtgactataaaatattctaacgataatagatacggaacgggactatggacgcatgataagaataattttgaagcattggaagcaactaaactatgtgatgtcttggaatcaattacagatttctccgtgataggtatcgatgaaggacagttctttccagacattgttgaattagatcgataaaaattaattaattacccgggtaccaggcctagatctgtcgagatccggtggtggtgcaaatcaaagaactgctcctcagtggatgttgcctttacttctaggcctgtacggaagtgttacttctgctctaaaagctgctgcagggggggggggggggtgggggggccggttagggccgccatcccctcagagcgtcgggatatcgggtggcggctcgggacggaggacgcgctagtgttcttctgtgtggcagttcagaatgatggatcaagctagatcagcattctctaacttgtttggtggagaaccattgtcatatacccggttcagcctggctcggcaagtagatggcgataacagtcatgtggagatgaaacttgctgtagatgaagaagaaaatgctgacaataacacaaaggccaatgtcacaaaaccaaaaaggtgtagtggaagtatctgctatgggactattgctgtgatcgtctttttcttgattggatttatgattggctacttgggctattgtaaaggggtagaaccaaaaactgagtgtgagagactggcaggaaccgagtctccagtgagggaggagccaggagaggacttccctgcagcacgtcgcttatattgggatgacctgaagagaaagttgtcggagaaactggacagcacagacttcaccagcaccatcaagctgctgaatgaaaattcatatgtccctcgtgaggctggatctcaaaaagatgaaaatcttgcgttgtatgttgaaaatcaatttcgtgaatttaaactcagcaaagtctggcgtgatcaacattttgttaagattcaggtcaaagacagcgctcaaaactcggtgatcatagttgataagaacggtagacttgtttacctggtggagaatcctgggggttatgtggcgtatagtaaggctgcaacagttactggtaaactggtccatgctaattttggtactaaaaaagattttgaggatttatacactcctgtgaatggatctatagtgattgtcagagcagggaaaatcacctttgcagaaaaggttgcaaatgctgaaagcttaaatgcaattggtgtgttgatatacatggaccagactaaatttcccattgttaacgcagaactttcattctttggacatgctcatctggggacaggtgacccttacacacctggattcccttccttcaatcacactcagtttccaccatctcggtcatcaggattgcctaatatacctgtccagacaatctccagagctgctgcagaaaagctgtttgggaatatggaaggagactgtccctctgactggaaaacagactctacatgtaggatggtaacctcagaaagcaagaatgtgaagctcactgtgagcaatgtgctgaaagagataaaaattcttaacatctttggagttattaaaggctttgtagaaccagatcactatgttgtagttggggcccagagagatgcatggggccctggagctgcaaaatccggtgtaggcacagctctcctattgaaacttgcccagatgttctcagatatggtcttaaaagatgggtttcagcccagcagaagcattatctttgccagttggagtgctggagactttggatcggttggtgccactgaatggctagagggatacctttcgtccctgcatttaaaggctttcacttatattaatctggataaagcggttcttggtaccagcaacttcaaggtttctgccagcccactgttgtatacgcttattgagaaaacaatgcaaaatgtgaagcatccggttactgggcaatttctatatcaggacagcaactgggccagcaaagttgagaaactcactttagacaatgctgctttccctttccttgcatattctggaatcccagcagtttctttctgtttttgcgaggacacagattatccttatttgggtaccaccatggacacctataaggaactgattgagaggattcctgagttgaacaaagtggcacgagcagctgcagaggtcgctggtcagttcgtgattaaactaacccatgatgttgaattgaacctggactatgagaggtacaacagccaactgctttcatttgtgagggatctgaaccaatacagagcagacataaaggaaatgggcctgagtttacagtggctgtattctgctcgtggagacttcttccgtgctacttccagactaacaacagatttcgggaatgctgagaaaacagacagatttgtcatgaagaaactcaatgatcgtgtcatgagagtggagtatcacttcctctctccctacgtatctccaaaagagtctcctttccgacatgtcttctggggctccggctctcacacgctgccagctttactggagaacttgaaactgcgtaaacaaaataacggtgcttttaatgaaacgctgttcagaaaccagttggctctagctacttggactattcagggagctgcaaatgccctctctggtgacgtttgggacattgacaatgagttttaaatgtgatacccatagcttccatgagaacagcagggtagtctggtttctagacttgtgctgatcgtgctaaattttcagtagggctacaaaacctgatgttaaaattccatcccatcatcttggtactactagatgtctttaggcagcagcttttaatacagggtagataacctgtacttcaagttaaagtgaataaccacttaaaaaatgtccatgatggaatattcccctatctctagaattttaagtgctttgtaatgggaactgcctctttcctgttgttgttaatgaaaatgtcagaaaccagttatgtgaatgatctctctgaatcctaagggctggtctctgctgaaggttgtaagtggtcgcttactttgagtgatcctccaacttcatttgatgctaaataggagataccaggttgaaagaccttctccaaatgagatctaagcctttccataaggaatgtagctggtttcctcattcctgaaagaaacagttaactttcagaagagatgggcttgttttcttgccaatgaggtctgaaatggaggtccttctgctggataaaatgaggttcaactgttgattgcaggaataaggccttaatatgttaacctcagtgtcatttatgaaaagaggggaccagaagccaaagacttagtatattttcttttcctctgtcccttcccccataagcctccatttagttctttgttatttttgtttcttccaaagcacattgaaagagaaccagtttcaggtgtttagttgcagactcagtttgtcagactttaaagaataatatgctgccaaattttggccaaagtgttaatcttaggggagagctttctgtccttttggcactgagatatttattgtttatttatcagtgacagagttcactataaatggtgtttttttaatagaatataattatcggaagcagtgccttccataattatgacagttatactgtcggttttttttaaataaaagcagcatctgctaataaaacccaacagatactggaagttttgcatttatggtcaacacttaagggttttagaaaacagccgtcagccaaatgtaattgaataaagttgaagctaagatttagagatgaattaaatttaattaggggttgctaagaagcgagcactgaccagataagaatgctggttttcctaaatgcagtgaattgtgaccaagttataaatcaatgtcacttaaaggctgtggtagtactcctgcaaaattttatagctcagtttatccaaggtgtaactctaattcccattttgcaaaatttccagtacctttgtcacaatcctaacacattatcgggagcagtatcttccataatgtataaagaacaaggtagtttttacctaccacagtgtctgtatcggagacagtgatctccatatgttacactaagggtgtaagtaattatcgggaacagtgtttcccataattttcttcatgcaatgacatcttcaaagcttgaagatcgttagtatctaacatgtatcccaactcctataattccctatcttttagttttagttgcagaaacattttgtggtcattaagcattgggtgggtaaattcaaccactgtaaaatgaaattactacaaaatttgaaatttagcttgggtttttgttacctttatggtttctccaggtcctctacttaatgagatagtagcatacatttataatgtttgctattgacaagtcattttaactttatcacattatttgcatgttacctcctataaacttagtgcggacaagttttaatccagaattgaccttttgacttaaagcagagggactttgtatagaaggtttgggggctgtggggaaggagagtcccctgaaggtctgacacgtctgcctacccattcgtggtgatcaattaaatgtaggtatgaataagttcgaagctccgtgagtgaaccatcattataaacgtgatgatcagctgtttgtcatagggcagttggaaacggcctcctagggaaaagttcatagggtctcttcaggttcttagtgtcacttacctagatttacagcctcacttgaatgtgtcactactcacagtctctttaatcttcagttttatctttaatctcctcttttatcttggactgacatttagcgtagctaagtgaaaaggtcatagctgagattcctggttcgggtgttacgcacacgtacttaaatgaaagcatgtggcatgttcatcgtataacacaatatgaatacagggcatgcattttgcagcagtgagtctcttcagaaaacccttttctacagttagggttgagttacttcctatcaagccagtacgtgctaacaggctcaatattcctgaatgaaatatcagactagtgacaagctcctggtcttgagatgtcttctcgttaaggagatgggccttttggaggtaaaggataaaatgaatgagttctgtcatgattcactattctagaacttgcatgacctttactgtgttagctctttgaatgttcttgaaattttagactttctttgtaaacaaatgatatgtccttatcattgtataaaagctgttatgtgcaacagtgtggagattccttgtctgatttaataaaatacttaaacactgaaaaaaaaaaaaaaaaaaaaaaaaaaaaaaaaaaaaaaaaaaaaaaaaaaaaaaaaaaaaaaaaaaaaaaaaaaaaaaaaagtaccttctgaggcggaaagaaccagccggatctcgacttcgagcttatttatattccaaaaaaaaaaaataaaatttcaatttttaagctttcactaattccaaacccacccgctttttatagtaagtttttcacccataaataataaatacaataattaatttctcgtaaaagtagaaaatatattctaatttattgcacggtaaggaagtagatcataactcgagcatgggagatcccgtcgttttacaacgtcgtgactgggaaaaccctggcgttacccaacttaatcgccttgcagcacatccccctttcgccagctggcgtaatagcgaagaggcccgcaccgatcgcccttcccaacagttgcgcagcctgaatggcgaatggcgctttgcctggtttccggcaccagaagcggtgccggaaagctggctggagtgcgatcttcctgaggccgatactgtcgtcgtcccctcaaactggcagatgcacggttacgatgcgcccatctacaccaacgtgacctatcccattacggtcaatccgccgtttgttcccacggagaatccgacgggttgttactcgctcacatttaatgttgatgaaagctggctacaggaaggccagacgcgaattatttttgatggcgttaactcggcgtttcatctgtggtgcaacgggcgctgggtcggttacggccaggacagtcgtttgccgtctgaatttgacctgagcgcatttttacgcgccggagaaaaccgcctcgcggtgatggtgctgcgctggagtgacggcagttatctggaagatcaggatatgtggcggatgagcggcattttccgtgacgtctcgttgctgcataaaccgactacacaaatcagcgatttccatgttgccactcgctttaatgatgatttcagccgcgctgtactggaggctgaagttcagatgtgcggcgagttgcgtgactacctacgggtaacagtttctttatggcagggtgaaacgcaggtcgccagcggcaccgcgcctttcggcggtgaaattatcgatgagcgtggtggttatgccgatcgcgtcacactacgtctgaacgtcgaaaacccgaaactgtggagcgccgaaatcccgaatctctatcgtgcggtggttgaactgcacaccgccgacggcacgctgattgaagcagaagcctgcgatgtcggtttccgcgaggtgcggattgaaaatggtctgctgctgctgaacggcaagccgttgctgattcgaggcgttaaccgtcacgagcatcatcctctgcatggtcaggtcatggatgagcagacgatggtgcaggatatcctgctgatgaagcagaacaactttaacgccgtgcgctgttcgcattatccgaaccatccgctgtggtacacgctgtgcgaccgctacggcctgtatgtggtggatgaagccaatattgaaacccacggcatggtgccaatgaatcgtctgaccgatgatccgcgctggctaccggcgatgagcgaacgcgtaacgcgaatggtgcagcgcgatcgtaatcacccgagtgtgatcatctggtcgctggggaatgaatcaggccacggcgctaatcacgacgcgctgtatcgctggatcaaatctgtcgatccttcccgcccggtgcagtatgaaggcggcggagccgacaccacggccaccgatattatttgcccgatgtacgcgcgcgtggatgaagaccagcccttcccggctgtgccgaaatggtccatcaaaaaatggctttcgctacctggagagacgcgcccgctgatcctttgcgaatacgcccacgcgatgggtaacagtcttggcggtttcgctaaatactggcaggcgtttcgtcagtatccccgtttacagggcggcttcgtctgggactgggtggatcagtcgctgattaaatatgatgaaaacggcaacccgtggtcggcttacggcggtgattttggcgatacgccgaacgatcgccagttctgtatgaacggtctggtctttgccgaccgcacgccgcatccagcgctgacggaagcaaaacaccagcagcagtttttccagttccgtttatccgggcaaaccatcgaagtgaccagcgaatacctgttccgtcatagcgataacgagctcctgcactggatggtggcgctggatggtaagccgctggcaagcggtgaagtgcctctggatgtcgctccacaaggtaaacagttgattgaactgcctgaactaccgcagccggagagcgccgggcaactctggctcacagtacgcgtagtgcaaccgaacgcgaccgcatggtcagaagccgggcacatcagcgcctggcagcagtggcgtctggcggaaaacctcagtgtgacgctccccgccgcgtcccacgccatcccgcatctgaccaccagcgaaatggatttttgcatcgagctgggtaataagcgttggcaatttaaccgccagtcaggctttctttcacagatgtggattggcgataaaaaacaactgctgacgccgctgcgcgatcagttcacccgtgcaccgctggataacgacattggcgtaagtgaagcgacccgcattgaccctaacgcctgggtcgaacgctggaaggcggcgggccattaccaggccgaagcagcgttgttgcagtgcacggcagatacacttgctgatgcggtgctgattacgaccgctcacgcgtggcagcatcaggggaaaaccttatttatcagccggaaaacctaccggattgatggtagtggtcaaatggcgattaccgttgatgttgaagtggcgagcgatacaccgcatccggcgcggattggcctgaactgccagctggcgcaggtagcagagcgggtaaactggctcggattagggccgcaagaaaactatcccgaccgccttactgccgcctgttttgaccgctgggatctgccattgtcagacatgtataccccgtacgtcttcccgagcgaaaacggtctgcgctgcgggacgcgcgaattgaattatggcccacaccagtggcgcggcgacttccagttcaacatcagccgctacagtcaacagcaactgatggaaaccagccatcgccatctgctgcacgcggaagaaggcacatggctgaatatcgacggtttccatatggggattggtggcgacgactcctggagcccgtcagtatcggcggaattccagctgagcgccggtcgctaccattaccagttggtctggtgtcaaaaataataataaccgggcaggggggatccaattctgtgagcgtatggcaaacgaaggaaaaatagttatagtagccgcactcgatgggacatttcaacgtaaaccgtttaataatattttgaatcttattccattatctgaaatggtggtaaaactaactgctgtgtgtatgaaatgctttaaggaggcttccttttctaaacgattgggtgaggaaaccgagatagaaataataggaggtaatgatatgtatcaatcggtgtgtagaaagtgttacatcgactcataatattatattttttatctaaaaaactaaaaataaacattgattaaattttaatataatacttaaaaatggatgttgtgtcgttagataaaccgtttatgtattttgaggaaattgataatgagttagattacgaaccagaaagtgcaaatgaggtcgcaaaaaaactgccgtatcaaggacagttaaaactattactaggagaattattttttcttagtaagttacagcgacacggtatattagatggtgccaccgtagtgtatataggatctgctcccggtacacatatacgttatttgagagatcatttctataatttaggagtgatcatcaaatggatgctaattgacggccgccatcatgatcctattttaaatggattgcgtgatgtgactctagtgactcggttcgttgatgaggaatatctacgatccatcaaaaaacaactgcatccttctaagattattttaatttctgatgtgagatccaaacgaggaggaaatgaacctagtacggcggatttactaagtaattacgctctacaaaatgtcatgattagtattttaaaccccgtggcgtctagtcttaaatggagatgcccgtttccagatcaatggatcaaggacttttatatcccacacggtaataaaatgttacaaccttttgctccttcatattcagctgaaatgagattattaagtatttataccggtgagaacatgagactgactcgagttaccaaattagacgctgtaaattatgaaaaaaagatgtactaccttaataagatcgtccgtaacaaagtagttgttaactttgattatcctaatcaggaatatgactattttcacatgtactttatgctgaggaccgtgtactgcaataaaacatttcctactactaaagcaaaggtactatttctacaacaatctatatttcgtttcttaaatattccaacaacatcaactgaaaaagttagtcatgaaccaatacaacgtaaaatatctagcaaaaattctatgtctaaaaacagaaatagcaagagatccgtacgcggtaataaatagaaacgtactactgagatatactaccgatatagagtataatgatttagttactttaataaccgttagacataaaattgattctatgaaaactgtgtttcaggtatttaacgaatcatccataaattatactccggttgatgatgattatggagaaccaatcattataacatcgtatcttcaaaaaggtcataacaagtttcctgtaaattttctatacatagatgtggtaatatctgacttatttcctagctttgttagactagatactacagaaactaatatagttaatagtgtactacaaacaggcgatggtaaaaagactcttcgtcttcccaaaatgttagagacggaaatagttgtcaagattctctatcgccctaatataccattaaaaattgttagatttttccgcaataacatggtaactggagtagagatagccgatagatctgttatttcagtcgctgattaatcaattagtagagatgagataagaacattataataatcaataatatatcttatatcttatatcttatatcttatatcttgtttagaaaaatgctaatattaaaatagctaacgctagtaatccaatcggaagccatttgatatctataatagggtatctaatttcctgatttaaatagcggacagctatattctcggtagctactcgtttggaatcacaaacattatttacatctaatttactatctgtaatggaaacgtttcccaatgaaatggtacaatccgatacattgcattttgttatatttttttttaaagaggctggtaacaacgcatcgcttcgtttacatggctcgtaccaacaataatagggtaatcttgtatctattcctatccgtactatgcttttatcaggataaatacatttacatcgtatatcgtctttgttagcatcacagaatgcataaatttgttcgtccgtcatgataaaaatttaaagtgtaaatataactattatttttatagttgtaataaaaagggaaatttgattgtatactttcggttctttaaaagaaactgacttgataaaaatggctgtaatctctaaggttacgtatagtctatatgatcaaaaagagattaatgctacagatattatcattagtcatgttaaaaatgacgacgatatcggtaccgttaaagatggtagactaggtgctatggatggggcattatgtaagacttgtgggaaaacggaattggaatgtttcggtcactggggtaaagtaagtatttataaaactcatatagttaagcctgaatttatttcagaaattattcgtttactgaatcatatatgtattcactgcggattattgcgttcacgagaaccgtattccgacgatattaacctaaaagagttatcgggacacgctcttaggagattaaaggataaaatattatccaagaaaaagtcatgttggaacagtgaatgtatgcaaccgtatcaaaaaattactttttcaaagaaaaaggtttgtttcgtcaacaagttggatgatattaacgttcctaattctctcatctatcaaaagttaatttctattcatgaaaagttttggccattattagaaattcatcaatatccagctaacttattttatacagactactttcccatccctccgttgattattagaccggctattagtttttggatagatagtatacccaaagagaccaatgaattaacttacttattaggtatgatcgttaagaattgtaacttgaatgctgatgaacaggttatccagaaggcggtaatagaatacgatgatattaaaattatttctaataacactaccagtatcaatttatcatatattacatccggcaaaaataatatgattagaagttatatcgtcgcccgacgaaaagatcagaccgctagatctgtaattggtcccagtacatctatcaccgttaatgaggtaggaatgcccgcatatattagaaatacacttacagaaaagatatttgttaatgcctttacagtggataaagttaaacaactattagcgtcaaaccaagttaaattttactttaataaacgattaaaccaattaacaagaatacgccaaggaaagtttattaaaaataaaatacatttattgcctggtgattgggtagaagtagctgttcaagaatatacaagtattatttttggaagacagccgtctctacatagatacaacgtcatcgcttcatctatcagagctaccgaaggagatactatcaaaatatctcccggaattgccaactctcaaaatgctgatttcgacggggatgaggaatggatgatattagaacaaaatcctaaagctgtaattgaacaaagtattcttatgtatccgacgacgttactcaaacacgatattcatggagcccccgtttatggatctattcaagatgaaatcgtagcagcgtattcattgtttaggatacaagatctttgtttagatgaagtattgaacatcttggggaaatatggaagagagttcgatcctaaaggtaaatgtaaattcagcggtaaagatatctatacttacttgataggtgaaaagattaattatccgggtctcttaaaggatggtgaaattattgcaaacgacgtagatagtaattttgttgtggctatgaggcatctgtcattggctggactcttatccgatcataagtcgaacgtggaaggtatcaactttattatcaagtcatcttatgtttttaagagatatctatctatttacggttttggggtgacattcaaagatctgagaccaaattcgacgttcactaataaattggaggccatcaacgtagaaaaaatagaacttatcaaagaagcatacgccaaatatctcaacgatgtaagagacgggaaaatagttccattatctaaagctttagaggcggactatgtggaatccatgttatccaacttgacaaatcttaatatccgagagatagaagaacatatgagacaaacgctgatagatgatccagataataacctcctgaaaatggccaaagcgggttataaagtaaatcccacagaactaatgtatattctaggtacgtatggacaacaaaggattgatggtgaaccagcagagactcgagtattgggtagagttttaccttactatcttccagactctaaggatccagaaggaagaggttacattcttaattctttaacaaaaggattaacgggttctcaatattacttttcgatgctggttgccagatctcaatctactgatatcgtctgtgaaacatcacgtaccggaacactggctagaaaaatcattaaaaagatggaggatatggtggtcgacggatacggacaagtagttataggtaatacgctcatcaagtacgccgccaattataccaaaattctaggctcagtatgtaaacctgtagatcttatctatccagatgagtccatgacttggtatttggaaattagtgctctgtggaataaaataaaacagggattcgtttactctcagaaacagaaacttgcaaagaagacattggcgccgtttaatttcctagtattcgtcaaacccaccactgaggataatgctattaaggttaaggatctgtacgatatgattcataacgtcattgatgatgtgagagagaaatacttctttacggtatctaatatagattttatggagtatatattcttgacgcatcttaatccttctagaattagaattacaaaagaaacggctatcactatctttgaaaagttctatgaaaaactcaattatactctaggtggtggaactcctattggaattatttctgcacaggtattgtctgagaagtttacacaacaagccctgtccagttttcacactactgaaaaaagtggtgccgtcaaacaaaaacttggtttcaacgagtttaataacttgactaatttgagtaagaataagaccgaaattatcactctggtatccgatgatatctctaaacttcaatctgttaagattaatttcgaatttgtatgtttgggagaattaaatccaaacatcactcttcgaaaagaaacagataaatatgtagtagatataatagtcaatagattatacatcaagagagcagaaataaccgaattagtcgtcgaatatatgattgaacgatttatctcctttagcgtcattgtaaaggaatggggtatggagacattcattgaggacgaggataatattagatttactgtctacctaaatttcgttgaaccggaagaattgaatcttagtaagtttatgatggttcttccgggggcagccaacaagggaaagattagtaaattcaagattcctatctctgattatacgggatatgacgacttcaatcaaacaaaaaagctcaataagatgactgtagaactcatgaatctaaaagaattgggttctttcgatttggaaaacgtcaacgtgtatcctggagtatggaatacatacgatatcttcggtatcgaggccgctcgtgaatacttgtgcgaagccatgttaaacacctatggagaagggttcgattatctgtatcagccttgtgatcttctcgctagtttactatgtgctagttacgaaccagaatcagtgaataaattcaagttcggcgcagctagtactcttaagagagctacgttcggagacaataaagcattgttaaacgcggctcttcataaaaagtcagaacctattaacgataatagtagctgccacttttttagcaaggtccctaatataggaactggatattacaaatactttatcgacttgggtcttctcatgagaatggaaaggaaactatctgataagatatcttctcaaaagatcaaggaaatggaagaaacagaagacttttaattcttatcaataacatatttttctatgatctgtcttttaaacgatggattttccacaaatgcgcctctcaagtccctcatagaatgatacacgtataaaaaatatagcataggcaatgactccttatttttagacattagatatgccaaaatcatagccccgcttctatttactcccgcagcacaatgaaccaacacgggctcgtttcgttgatcacatttagataaaaaggcggttacgtcgtcaaaatatttactaatatcggtagttgtatcatctaccaacggtatatgaataatattaatattagagttaggtaatgtatatttatccatcgtcaaatttaaaacatatttgaacttaacttcagatgatggtgcatccatagcatttttataatttcccaaatacacattattggttacccttgtcattatagtgggagatttggctttgtgcatatctccagttgaacgtagtagtaagtatttatacaaacttttcttatccatttataacgtacaaatggataaaactactttatcggtaaacgcgtgtaatttagaatacgttagagaaaaggctatagtaggcgtacaagcagccaaaacatcaacacttatattctttgttattatattggcaattagtgcgctattactctggtttcagacgtctgataatccagtctttaatgaattaacgagatatatgcgaattaaaaatacggttaacgattggaaatcattaacggatagcaaaacaaaattagaaagtgatagaggtagacttctagccgctggtaaggatgatatatttgaattcaaatgtgtggatttcggcgcctattttatagctatgcgattggataagaaaacatatctgccgcaagctattaggcgaggtactggagacgcgtggatggttaaaaaggcggcaaaggtcgatccatctgctcaacaattttgtcagtatttgataaaacacaagtctaataatgttattacttgtggtaatgagatgttaaatgaattaggttatagcggttattttatgtcaccgcattggtgttccgattttagtaatatggaatagtgttagataaatgcggtaacgaatgttcctgtaaggaaccataacagcttagatttaacgttaaagatgagcataaacataataaacaaaattacaatcaaacttataacattaatatcaaacaatccaaaaaatgaaatcagtggagtagtaaacgcgtacataactcctggataacgtttagcagctgccgttcctattctagaccaaaaattcggtttcatgttttcgaaacggtattctgcaacaagtcgaggatcgtgttctacatatttggcggcattatccagtatctgcctattgatcttcatttcgttttcgattctggctatttcaaaataaaatcccgatgatagacctccagactttataatttcatctacgatgttcagcgccgtagtaactctaataatataggctgataagctaacatcataccctcctgtatatgtgaatatggcatgatttttgtccattacaagctcggttttaactttattgcctgtaataatttctctcatctgtaggatatctatttttttgtcatgcattgccttcaagacgggacgaagaaacgtaatatcctcaataacgttatcgttttctacaataactacatattctacctttttattttctaactcggtaaaaaaattagaatcccatagggctaaatgtctagcgatatttcttttcgtttcctctgtacacatagtgttacaaaaccctgaaaagaagtgagtatacttgtcatcatttctaatgtttcctccagtccactgtataaacgcataatccttgtaatgatctggatcatccttgactaccacaacatttcttttttctggcataacttcgttgtcctttacatcatcgaacttctgatcattaatatgctcatgaacattaggaaatgtttctgatggaggtctatcaataactggcacaacaataacaggagttttcaccgccgccatttagttattgaaattaatcatatacaactctttaatacgagttatattttcgtctatccattgtttcacattgacatatttcgacaaaaagatataaaatgcgtattccaatgcttctctgtttaatgaattactaaaatatacaaacacgtcactgtctggcaataaatgatatcttagaatattgtaacaatttattttgtattgcacatgttcgtgatctatgagttcttcttcgaatggcataggatctccgaatctgaaaacgtataaataggagttagaataataatatttgagagtattggtaatatataaactctttagcggtataattagtttttttctctcaatttctatttttagatgtgatggaaaaatgactaattttgtagcattagtatcatgaactctaatcaaaatcttaatatcttcgtcacacgttagctctttgaagtttttaagagatgcatcagttggttctacagatggagtaggtgcaacaattttttgttctacacatgtatgtactggagccattgttttaactataatggtgcttgtatcgaaaaactttaatgcagatagcggaagctcttcgccgcgactttctacgtcgtaattgggttctaacgccgatctctgaatggatactagttttctaagttctaatgtgattctctgaaaatgtaaatccaattcctccggcattatagatgtgtatacatcggtaaataaaactatagtatccaacgatcccttctcgcaaattctagtcttaaccaaaaaatcgtatataaccacggagatggcgtatttaagagtggattcttctaccgttttgttcttggatgtcatataggaaactataaagtccgcactactgttaagaatgattactaacgcaactatatagtttaaattaagcattttggaaacataaaataactctgtagacgatacttgactttcgaataagtttgcagacaaacgaagaaagaacagacctctcttaatttcagaagaaaactttttttcgtattcctgacgtctagagtttatatcaataagaaagttaagaattagtcggttaatgttgtatttcattacccaagtttgagatttcataatattatcaaaagacatgataatattaaagataaagcgctgactatgaacgaaatagctatatggttcgctcaagaatatagtcttgttaaacgtggaaacgataactgtatttttaatcacgtcagcggcatctaaattaaatataggtatatttattccacacactctacaatatgccacaccatcttcataataaataaattcgttagcaaaattattaattttagtgaaatagttagcgtcaactttcatagcttccttcaatctaatttgatgctcacacggtgcgaattccactctaacatcccttttccatgcctcaggttcatcgatctctataatatctagttttttgcgtttcacaaacacaggctcgtctctcgcgatgagatctgtatagtaactatgtaaatgataactagatagaaagatgtagctatatagatgacgatcctttaagagaggtataataactttaccccaatcagatagactgttgttatggtcttcggaaaaagaatttttataaatttttccagtattttccaaatatacgtacttaacatctaaaaaatccttaatgataataggaatggataatccgtctattttataaagaaatacatatcgcacattatacttttttttggaaatgggaataccgatgtgtctacataaatatgcaaagtctaaatattttttagagaatcttagttggtccaaattcttttccaagtacggtaatagatttttcatattgaacggtatcttcttaatctctggttctagttccgcattaaatgatgaaactaagtcactatttttataactaacgattacatcacctctaacatcatcatttaccagaatactgatcttcttttgtcgtaaatacatgtctaatgtgttaaaaaaaagatcatacaagttatacgtcatttcatctgtggtattcttgtcattgaaggataaactcgtactaatctcttctttaacagcctgttcaaatttatatcctatatacgaaaaaatagcaaccagtgtttgatcatccgcgtcaatattctgttctatcgtagtgtataacaatcgtatatcttcttctgtgatagtcgatacgttataaaggttgataacgaaaatatttttatttcgtgaaataaagtcatcgtaggattttggacttatattcgcgtctagtagatatgcttttatttttggaatgatctcaattagaatagtctctttagagtccatttaaagttacaaacaactaggaaattggtttatgatgtataatttttttagtttttatagattctttattctatacttaaaaaatgaaaataaatacaaaggttcttgagggttgtgttaaattgaaagcgagaaataatcataaattatttcattatcgcgatatccgttaagtttgtatcgtaatggcgtggtcaattacgaataaagcggatactagtagcttcacaaagatggctgaaatcagagctcatctaaaaaatagcgctgaaaataaagataaaaacgaggatattttcccggaagatgtaataattccatctactaagcccaaaaccaaacgagccactactcctcgtaaaccagcggctactaaaagatcaaccaaaaaggaggaagtggaagaagaagtagttatagaggaatatcatcaaacaactgaaaaaaattctccatctcctggagtcagcgacattgtagaaagcgtggccgctgtagagctcgatgatagcgacggggatgatgaacctatggtacaagttgaagctggtaaagtaaatcatagtgctagaagcgatctctctgacctaaaggtggctaccgacaatatcgttaaagatcttaagaaaattattactagaatctctgcagtatcgacggttctagaggatgttcaagcagctggtatctctagacaatttacttctatgactaaagctattacaacactatctgatctagtcaccgagggaaaatctaaagttgttcgtaaaaaagttaaaacttgtaagaagtaaatgcgtgcacttttttataaagatggtaaactctttaccgataataattttttaaatcctgtatcagacgataatccagcgtatgaggttttgcaacatgttaaaattcctactcatttaacagatgtagtagtatatgaacaaacgtgggaggaggcgttaactagattaatttttgtgggaagtgattcaaaaggacgtagacaatacttttacggaaaaatgcatgtacagaatcgcaacgctaaaagagatcgtatttttgttagagtatataacgttatgaaacgaattaattgttttataaacaaaaatataaagaaatcgtccacagattccaattatcagttggcggtttttatgttaatggaaactatgttttttattagatttggtaaaatgaaatatcttaaggagaatgaaacagtagggttattaacactaaaaaataaacacatagaaataagtcccgatgaaatagttatcaagtttgtaggaaaggacaaagtttcacatgaatttgttgttcataagtctaatagactatataaaccgctattgaaactgacggatgattctagtcccgaagaatttctgttcaacaaactaagtgaacgaaaggtatacgaatgtatcaaacagtttggtattagaatcaaggatctccgaacgtatggagtcaattatacgtttttatataatttttggacaaatgtaaagtccatatctcctcttccgtcaccaaaaaagttaatagcattaactatcaaacaaactgctgaagtggtaggtcatactccatcaatttcaaaaagagcttatatggcaacgactattttagaaatggtaaaggataaaaattttttagatgtagtatctaaaactacgttcgatgaattcctatctatagtcgtagatcacgttaaatcatctacggatggatgatatagatctttacacaaataattacaagaccgataaatggaaatggataagcgtatgaaatctctcgcaatgacagctttcttcggagagctaagcacattagatattatggcattgataatgtctatatttaaacgccatccaaacaataccattttttcagtggataaggatggtcagtttatgattgatttcgaatacgataattataaggcttctcaatatttggatctgaccctcactccgatatctggagatgaatgcaagactcacgcatcgagtatagccgaacaattggcgtgtgcggatattattaaagaggatattagcgaatatatcaaaactactccccgtcttaaacgatttataaaaaaataccgcaatagatcagatactcgtatcagtcgagatacagaaaagcttaaaatagctctagctaaaggcatagattacgaatatataaaagacgcttgttaataagtaaatgaaaaaaaactagtcgtttataataaaacacgatatggatgccaacgtagtatcattttctactattgcgacgtatatagacgctttagcgaagaatgcttcggaattagaacagaggtctaccgcatacgaaataaataatgaattggaactagtatttattaagccgccattgattactttgacaaatgtagtgaatatctctacgattcaggaatcgtttattcgatttaccgttactaataaggaaggtgttaaaattagaactaagattccattatctaaggtacatggtctagatgtaaaaaatgtacagttagtagatgctatagataacatagtttgggaaaagaaatcattagtgacggaaaatcgtcttcacaaagaatgcttgttgagactatcgacagaggaacgtcatatatttttggattacaagaaatatggatcctctatccgactagaattagtcaatcttattcaagcaaaaacaaaaaactttacgatagactttaagctaaaatattttctaggatccggtgcccagtctaaaagttctttgttgcacgctattaatcatccaaagtcaaggcctaatacatctctggaaatagaattcacacctagagacaatgaaacagttccatatgatgaactaataaaggaattgacgactctctcgcgtcatatatttatggcttctccagagaatgtaattctttctccgcctattaacgcgcctataaaaacctttatgttgcctaaacaagatatagtaggtttggatctggaaaatctatatgccgtaactaagactgacggcattcctataactatcagagttacatcaaacgggttgtattgttattttacacatcttggttatattattagatatcctgttaagagaataatagattccgaagtagtagtctttggtgaggcagttaaggataagaactggaccgtatatctcattaagctaatagagcctgtgaatgcaatcaatgatagactagaagaaagtaagtatgttgaatctaaactagtggatatttgtgatcggatagtattcaagtcaaagaaatacgaaggtccgtttactacaactagtgaagtcgtcgatatgttatctacatatttaccaaagcaaccagaaggtgttattctgttctattcaaagggacctaaatctaacattgattttaaaattaaaaaggaaaatactatagaccaaactgcaaatgtagtatttaggtacatgtccagtgaaccaattatctttggagaatcgtctatctttgtagagtataagaaatttagcaacgataaaggctttcctaaagaatatggttctggtaagattgtgttatataacggcgttaattatctaaataatatctattgtttggaatatattaatacacataatgaagtgggtattaagtccgtggttgtacctattaagtttatagcagaattcttagttaatggagaaatacttaaacctagaattgataaaaccatgaaatatattaactcagaagattattatggaaatcaacataatatcatagtcgaacatttaagagatcaaagcatcaaaataggagatatctttaacgaggataaactatcggatgtgggacatcaatacgccaataatgataaatttagattaaatccagaagttagttattttacgaataaacgaactagaggaccgttgggaattttatcaaactacgtcaagactcttcttatttctatgtattgttccaaaacatttttagacgattccaacaaacgaaaggtattggcgattgattttggaaacggtgctgacctggaaaaatacttttatggagagattgcgttattggtagcgacggatccggatgctgatgctatagctagaggaaatgaaagatacaacaaattaaactctggaattaaaaccaagtactacaaatttgactacattcaggaaactattcgatccgatacatttgtctctagtgtcagagaagtattctattttggaaagtttaatatcatcgactggcagtttgctatccattattcttttcatccgagacattatgctaccgtcatgaataacttatccgaactaactgcttctggaggcaaggtattaatcactaccatggacggagacaaattatcaaaattaacagataaaaagacttttataattcataagaatttacctagtagcgaaaactatatgtctgtagaaaaaatagctgatgatagaatagtggtatataatccatcaacaatgtctactccaatgactgaatacattatcaaaaagaacgatatagtcagagtgtttaacgaatacggatttgttcttgtagataacgttgatttcgctacaattatagaacgaagtaaaaagtttattaatggcgcatctacaatggaagatagaccgtctacaaaaaactttttcgaactaaatagaggagccattaaatgtgaaggtttagatgtcgaagacttacttagttactatgttgtttatgtcttttctaagcggtaaataataatatggtatgggttctgatctcccagttctaaatgcattaaataattccaatagagcgatttttgttcctataggaccttccaactgtggatactctgtattgttaatagatatattaatacttttgtcgggtaacagaggttctacgtcttctaaaaataaaagttttataacatctggcctgttcataaataaaaacttggcgattctatatatactcttattatcaaatctagccattgtcttatagatgtgagctactgtaggtgtaccatttgattttctttctaatactatatatttctctcgaagaagttcttgcacatcatctgggaataaaatactactgttgagtaaatcagttattttttttatatcgatattgatggacatttttatagttaaggataataagtatcccaaagtcgataacgacgataacgaagtatttatacttttaggaaatcacaatgactttatcagattaaaattaacaaaattaaaggagcatgtatttttttctgaatatattgtgactccagatacatatggatctttatgcgtcgaattaaatgggtctagttttcagcacggcggtagatatatagaggtggaggaatttatagatgctggaagacaagttagatggtgttctacatccaatcatatatctaaagatatacccgaagatatgcacactgataaatttgtcatttatgatatttatacgtttgattcgttcaagaataaacgattggtattcgtacaggtacctccgtcgttaggagatgatagtcatttgactaatccgttattgtcaccgtattatcgtaattcagtagccagacaaatggtcaatgatatgatttttaatcaagattcatttttaaaatatttattagaacatctgattagaagccactatagagtttctaaacatataacaatagttagatacaaggataccgaagaattaaatctaacgagaatatgttataatagagataagtttaaggcgtttgtattcgcttggtttaacggcgtttcggaaaatgaaaaggtactagatacgtataaaaaggtatctaatttgatataatgaattcagtgactgtatcacacgcgccatatactattacttatcacgatgattgggaaccagtaatgagtcaattggtagagttttataacgaagtagccagttggctgctacgagacgagacgtcgcctattcctgataagttctttatacagttgaaacaaccgcttagaaataaacgagtatgtgtgtgtggtatagatccgtatccgaaagatggaactggtgtaccgttcgaatcaccaaattttacaaaaaaatcaattaaggagatagcttcatctatatctagattaaccggagtaattgattataaaggttataaccttaatataatagacggggttataccctggaattattacttaagttgtaaattaggagaaacaaaaagtcacgcgatttactgggataagatttccaagttactgctgcagcatataactaaacacgttagtgttctttattgtttgggtaaaacagatttctcgaatatacgggccaagttagaatccccggtaactaccatagtcggatatcatccagcggctagagaccgccaattcgagaaagatagatcatttgaaattatcaacgttttactggaattagacaacaaggcacctataaattgggctcaagggtttatttattaatgctttagtgaaattttaacttgtgttctaaatggatgcggctattagaggtaatgatgttatctttgttcttaagactataggtgtcccgtcagcgtgcagacaaaatgaagatccaagatttgtagaagcatttaaatgcgacgagttagaaagatatattgagaataatccagaatgtacactattcgaaagtcttagggatgaggaagcatactctatagtcagaattttcatggatgtagatttagacgcgtgtctagacgaaatagattatttaacggccattcaagattttattatcgaggtgtcaaactgtgtagctagattcgcgtttacagaatgcggcgccattcatgaaaatgtaataaaatccatgagatctaatttttcattgactaagtctacaaatagagataaaacaagttttcatattatctttttagatacgtataccactatggatacattgatagctatgaaacgaacactattagaattaagtagatcatctgaaaatccactaaccagatcgatagacactgccgtatataggagaaaaacaactcttcgggttgtaggtactaggaaaaatccaaattgcgacactattcatgtaatgcaaccaccgcatgataatatagaagattacctattcacttacgtggatatgaacaacaatagttattacttttctctacaacaacgattggaggatttagttcctgataagttatgggaaccagggtttatttcattcgaagacgctataaaaagagtttcaaaaatattcattaattctataataaactttaatgatctcgatgaaaataattttacaacggtaccactggtcatagattacgtaacaccttgtgcattatgtaaaaaacgatcgcataaacatccgcatcaactatcgttggaaaatggtgctattagaatttacaaaactggtaatccacatagttgtaaagttaaaattgttccgttggatggtaataaactgtttaatattgcacaaagaattttagacactaactctgttttattaaccgaacgaggagaccatatagtttggattaataattcatggaaatttaacagcgaagaacccttgataacaaaactaattttgtcaataagacatcaactacctaaggaatattcaagcgaattactctgtccaagaaaacgaaagactgtagaagctaacatacgagacatgttagtagattcagtggagaccgatacctatccggataaacttccgtttaaaaatggtgtattggacctggtagacggaatgttttactctggagatgatgctaaaaaatatacgtgtactgtatcaaccggatttaaatttgacgatacaaagttcgtcgaagacagtccagaaatggaagagttaatgaatatcattaacgatatccaaccattaacggatgaaaataagaaaaatagagagctatatgaaaaaacattatctagttgtttatgcggtgctaccaaaggatgtttaacattcttttttggagaaactgcaactggaaagtcgacaaccaaacgtttgttaaagtctgctatcggtgacctgtttgttgagacgggtcaaacaattttaacagatgtattggataaaggacctaatccatttatcgctaacatgcatttgaaaagatctgtattctgtagcgaactacctgattttgcctgtagtggatcaaagaaaattagatctgacaatattaaaaagttgacagaaccttgtgtcattggaagaccgtgtttctccaataaaattaataatagaaaccatgcgacaatcattatcgatactaattacaaacctgtttttgataggatagataacgcattaatgagaagaattgccgtcgtgcgattcagaacacacttttctcaaccttctggtagagaggctgctgaaaataatgacgcgtacgataaagtcaaactattagacgaggggttagatggtaaaatacaaaataatatatatagatttgcatttctatacttgttggtgaaatggtacaaaaaatatcatgttcctattatgaaactatatcctacacccgaagagattcctgactttgcattctatctcaaaataggtactctgttggtatctagctctgtaaagcatattccattaatgacggacctctccaaaaagggatatatattgtacgataatgtggtcactcttccgttgactactttccaacagaaaatatccaagtattttaattctagactatttggacacgatatagagagcttcatcaatagacataagaaatttgccaatgttagtgatgaatatctgcaatatatattcatagaggatatttcatctccgtaaatatatgctcatatatttatagaagatatcacatatctaaatgaataccggaatcatagatttatttgataatcatgttgatagtataccaactatattacctcatcagttagctactctagattatctagttagaactatcatagatgagaacagaagcgtgttattgttccatattatgggatcaggtaaaacaataatcgctttgttgttcgccttggtagcttccagatttaaaaaggtttacattctagtgccgaacatcaacatcttaaaaattttcaattataatatgggtgtagctatgaacttgtttaatgacgaattcatagctgagaatatctttattcattccacaacaagtttttattctcttaattataacgataacgtcattaattataacggattatctcgctacaataactctatttttatcgttgatgaggcacataatatctttgggaataatactggagaacttatgaccgtgataaaaaataaaaacaagattccttttttactattgtctggatctcccattactaacacacctaatactctgggtcatattatagatttaatgtccgaagagacgatagattttggtgaaattattagtcgtggtaagaaagtaattcagacacttcttaacgaacgcggtgtgaatgtacttaaggatttgcttaaaggaagaatatcatattacgaaatgcctgataaagatctaccaacgataagatatcacggacgtaagtttctagatactagagtagtatattgtcacatgtctaaacttcaagagagagattatatgattactagacgacagctatgttatcatgaaatgtttgataaaaatatgtataacgtgtcaatggcagtattgggacaacttaatctgatgaataatttagatactttatttcaggaacaggataaggaattgtacccaaatctgaaaataaataatggcgtgttatacggagaagaattggtaacgttaaacattagttccaaatttaaatactttattaatcggatacagacactcaacggaaaacattttatatacttttctaattctacatatggcggattggtaattaaatatatcatgctcagtaatggatattctgaatataatggttctcagggaactaatccacatatgataaacggcaaaccaaaaacatttgctatcgttactagtaaaatgaaatcgtctttagaggatctattagatgtgtataattctcctgaaaacgatgatggtagtcaattgatgtttttgttttcatcaaacattatgtccgaatcctatactctaaaagaggtaaggcatatttggtttatgactatcccagatactttttctcaatacaaccaaattcttggacgatctattagaaaattctcttacgccgatatttctgaaccagttaatgtatatcttttagccgccgtatattccgatttcaatgacgaagtgacgtcattaaacgattacacacaggatgaattaattaatgttttaccatttgacatcaaaaagctgttgtatctaaaatttaagacgaaagaaacgaatagaatatactctattcttcaagagatgtctgaaacgtattctcttccaccacatccatcaattgtaaaagttttattgggagaattggtcagacaatttttttataataattctcgtattaagtataacgataccaagttacttaaaatggttacatcagttataaaaaataaagaagacgctaggaattacatagatgatattgtaaacggtcacttctttgtatcgaataaagtatttgataaatctcttttatacaaatacgaaaacgatattattacagtaccgtttagactttcctacgaaccatttgtttggggagttaactttcgtaaagaatataacgtggtatcttctccataaaactgatgagatatataaagaaataaatgtcgagctttgttaccaatggatacctttccgttacattggaaccacacgagctgacgttagacataaaaactaatattaggaatgccgtatataagacgtatctccatagagaaattagtggtaaaatggccaagaaaatagaaattcgtgaagacgtggaattacctctcggcgaaatagttaataattctgtagttataaacgttccgtgtgtaataacctacgcgtattatcacgttggggatatagtcagaggaacattaaacatcgaagatgaatcaaatgtaactattcaatgtggagatttaatctgtaaactaagtagagattcgggtactgtatcatttagcgattcaaagtactgcttttttcgaaatggtaatgcgtatgacaatggcagcgaagtcactgccgttctaatggaggctcaacaaggtatcgaatctagttttgtttttctcgcgaatatcgtcgactcataaaaaagagaatagcggtaagtataaacacgaatactatggcaataattgcgaatgttttattctcttcgatatatttttgataatatgaaaaacatgtctctctcaaatcggacaaccatctcataaaatagttctcgcgcgctggagaggtagttgccgctcgtataatctctccagaataatatacttgcgtgtcgtcgttcaatttatacggatttctatagttctctgttatataatgcggtttgccctcatgattagacgacgacaatagtgttctaaatttagatagttgatcagaatgaatgtttattggcgttggaaaaattatccatacagcgtctgcagagtggttgatagttgttcctagatatgtaaaataatccaacttactaggcagcaaattgtctagataaaatactgaatcaaacggtgcagacgtattggcggatctaatggaatccaattgattaactatcttttgaaaatatacatttttatgatccaatacttgtaagaatatagaaataatgataagtccatcatcgtgtttttttgcctcttcataagaactatattttttcttattccaatgaacaagattaatctctccagagtatttgtacacatctatcaagtgattggatccataatcgtcttcctttccccaatatatatgtagtgatgataacacatattcattggggagaaaccctccacttatatatcctcctttaaaattaatccttactagttttccagtgttctggatagtggttggtttcgactcattataatgtatgtctaacggcttcaatcgcgcgttagaaattgcttttttagtttctatattaataggagatagttgttgcggcatagtaaaaatgaaatgataactgtttaaaaatagctcttagtatgggaattacaatggatgaggaagtgatatttgaaactcctagagaattaatatctattaaacgaataaaagatattccaagatcaaaagacacgcatgtgtttgctgcgtgtataacaagtgacggatatccgttaataggagctagaagaacttcattcgcgttccaggcgatattatctcaacaaaattcagattctatctttagagtatccactaaactattacggtttatgtactacaatgaactaagagaaatctttagacggttgagaaaaggttctatcaacaatatcgatcctcactttgaagagttaatattattgggtggtaaactagataaaaaggaatctattaaagattgtttaagaagagaattaaaagaggaaagtgatgaacgtataacagtaaaagaatttggaaatgtaattctaaaacttacaacacgggataaattatttaataaagtatatataagttattgcatggcgtgttttattaatcaatcgttggaggatttatcgcatactagtatttacaatgtagaaattagaaagattaaatcattaaatgattgtattaacgacgataaatacgaatatctgtcttatatttataatatgctagttaatagtaaatgaacttttacagatctagtataattagtcagattattaagtataatagacgactagctaagtctattatttgcgaggatgactctcaaattattacactcacggcattcgttaaccaatgcctatggtgtcataaacgagtatccgtgtccgctattttattaactactgataacaaaatattagtatgtaacagacgagatagttttctctattctgaaataattagaactagaaacatgtttagaaagaaacgattatttctgaattattccaattatttgaacaaacaggaaagaagtatactatcgtcatttttttctctagatccagctactactgataatgatagaatagacgctatttatccgggtggcatacccaaaaggggtgagaatgttccagagtgtttatccagggaaattaaagaagaagttaatatagacaattcttttgtattcatagacactcggttttttattcatggcatcatagaagataccattattaataaattttttgaggtaatcttctttgtcggaagaatatctctaacgagtgatcaaatcattgatacatttaaaagtaatcatgaaatcaaggatctaatatttttagatccgaattcaggtaatggactccaatacgaaattgcaaaatatgctctagatactgcaaaacttaaatgttacggccatagaggatgttattatgaatcattaaaaaaattaactgaggatgattgattaaaaaatataaattaatttaccatcgtgtatttttataacgggattgtccggcatatcatgtagatagttaccgtctacatcgtatactcgaccatctacgcctttaaatcctctatttattgacattaatctattagaattggaataccaaatattagtaccctcaattagtttattggtaatattttttttagacgatagatcgatggctcttgaaaccaaggttttccaaccggactcattgtcgatcggtgagaagtctttttcattagcatgaatccattctaatgatgtatgtttaaacactctaaacaattggacaaattcttttgatttgctttgaatgatttcaaataggtcttcgtctacagtaggcataccattagataatctagccattataaagtgcacgtttacatatctacgttctggaggagtaagaacgtgactattgagacgaatggctcttcctactatctgacgaagagacgcctcgttccatgtcatatctaaaatgaagatatcattaattgagaaaaaactaataccctcgcctccactagaagagaatacgcatgttttaatgcattctccgttagtgtttgattcttggttaaactcagccaccgccttgattctagtatcttttgttctagatgagaactctatattagagataccaaagactttgaaatatagtaataagatttctattcctgactgattaacaaatggttcaaagactagacatttaccatgggatgctaatattcccaaacatacatctataaatttgacgcttttctcttttaattcagtaaatagagagatatcagccgcactagcatcccctttcaatagttctccctttttaaaggtatctaatgcggatttagaaaactctctatctcttaatgaatttttaaaatcattatatagtgttgctatctcttgcgcgtattcgcccggatcacgattttgtctttcaggaaagctatcgaacgtaaacgtagtagccatacgtctcagaattctaaatgatgatatacctgtttttatttcagcgagtttagccttttgataaatttcttcttgctttttcgacatattaacgtatcgcattaatactgttttcttagcgaatgatgcagacccttctacgtcatcaaaaatagaaaactcgttattaactatatacgaacatagtcctcctagtttggagactaattctttttcatcgactagacgtttattctcaaatagcgattggtgttgtaaggatcctggtcgtagtaagttaaccaacatggtgaattcttgcacactattgacgataggtgtagccgataaacaaatcatcttatggttttttaacgcaatggtcttagataaaaaattatatactgaacgagtaggacggatcttaccatcttctttgattaatgatttagaaatgaagttatgacattcatcaataatgacgcatattctactcttggaattaatagttttgatattagtaaaaaatttatttctaaaattttgatcatcgtaattaataaaaatacaatccttcgttatctctggagcgtatctgagtatagtgttcatccaaggatcttctatcaaagcctttttcaccaataagataatagcccaattcgtataaatatccttaagatgtttgagaatatatacagtagtcattgttttaccgacacccgtttcatggaacaataaaagagaatgcatactgtctaatcctaagaaaactcttgctacaaaatgttgataatccttgaggcgtactacgtccgaccccatcatttcaacgggcatattagtagttctgcgtaaggcataatcgatataggccgcgtgtgatttactcatttatgagtgataagtaataactatgttttaaaaatcacagcagtagtttaactagtcttctctgatgtttgttttcgatactttttgaatcagaagtcatactagaataaagcaacgagtgaacgtaatagagagcttcgtatactctattcgaaaactctaagaacttattaatgaattccgtatccactggattgtttaaaatactaaattgaacactgttcacatccttccaagaagaagacttagtgacggacttaacatgagacataaataaatccaaattttttttacaaacatcactagccaccataatggcgctatctttcaaccagctatcgcttacgcattttagcagtctaacatttttaaagagactacaatatattctcatagtatcgattacacctctaccgaataaagttggaagtttaataatacaatatttttcgtttacaaaatcaaataatggtcgaaacacgtcgaaggttaacatcttataatcgctaatgtatagattgttttcagtgagatgattattagatttaatagcatctcgttcacgtttgaacagtttattgcgtgcgctgaggtcggcaactacggcgtccgctttagtactcctcccataatactttacgctattaatctttaaaatttcatagactttatctagatcgctttctggtaacatgatatcatgtgtaaaaagttttaacatgtcggtcggcattctatttagatcattaactctagaaatctgaagaaagtaattagctccgtattccagactaggtaatgggcttttacctagagacagattaagttctggcaatgtttcataaaatggaagaaggacatgcgttccctcccggatattttttacaatttcatccatttacaactctatagtttgttttcattattattagttattatctcccataatcttggtaatacttaccccttgatcgtaagataccttatacaggtcattacatacaactaccaattgtttttgtacataatagattggatggttgacatccatggtggaataaactactcgaacagatagtttatctttccccctagatacattagccgtaatagttgtcggcctaaagaatatctttggtgtaaagttaaaagttagggttcttgttccattattgctttttgtcagtagttcattataaattctcgagatgggtccgttctctgaatatagaacatcatttccaaatctaacttctagtctagaaataatatcggtcttattcttaaaatctattcccttgatgaagggatcgttaatgaacaaatccttggcctttgattcggctgatctattatctccgttatagacgttacgttgactagtccaaagacttacaggaatagatgtatcgatgatgttgatactatgtgatatgtgagcaaagattgttctcttagtggcatcactatatgttccagtaatggcggaaaactttttagaaatgttatatataaaagaattttttcgtgttccaaacattagcagattagtatgaagataaacactcatattatcaggaacattatcaatttttacatacacatcagcatcttgaatagaaacgataccatcttctggaacctctacgatctcggcagactccggataaccagtcggtgggccatcgctaacaataactagatcatccaacaatctactcacatatgcatctatataatctttttcatcttgtgagtaccctggatacgaaataaatttattatccgtatttccataataaggtttagtataaacagagagagatgttgccgcatgaacttcagttacagtcgccgttggttggtttatttgacctattactctcctaggtttctctataaacgatggtttaatttgtacattcttaaccatatatccaataaagctcaattcaggaacataaacaaattctttgttgaacgtttcaaagtcgaacgaagagtcacgaataacgatatcggatactggattgaaggttaccgttacggtaatttttgaatcggatagtttaagactgctgaatgtatcttccacatcaaacggagttttaatataaacgtatactgtagatggttctttaatagtgtcattaggagttaggccaatagaaatatcattaagttcactagaatatccagagtgtttcaaagcaattgtattattgatacaattattatataattcttcgccctcaatttcccaaataacaccgttacacgaagagatagatacgtgattaatacatttatatccaacatatggtacgtaactgaatcttcccatacctttaacttctggaagttccaaactcagaaccaaatgattaagcgcagtaatatactgatccctaatttcgaagctagcgatagcctgattgtctggaccatcgtttgtcataactccggatagagaaatatattgcggcatatacaaagttggaatttgactatcgactgcgaagacattagaccgtttaatagagtcatccccaccgatcaaagaattaatgatagtattattcattttctatttaaaatggaaaaagcttacaataaactccgtagagaaatatctataatttgtgagttttccttaaagtaacagcttccgtaaacgccgtctttatctcttagtaggtttattgtatttatgaccttttccttatcttcatagaatactaaaggcaacaaagaaatttttggttcttctctaagagctacgtgagacttaaccatagaagccaacgaatccctacatattttagaacagaaataccctacttcaccacccttgtatgtctcaatactaataggtctaaaaaccaaatcttgattacaaaaccaacacttatcaattacactatttgtcttaatagacacatctgccatagatttataatactttggtagtatacaagcgagtgcttcttctttagcgggcttaaagactgctttaggtgctgaaataaccacatctggaaggcttactcgcttagccatttaattacggaactatttttttatacttctaatgagcaagtagaaaacctctcatctacaaaaacgtactcgtgtccataatcctctaccatagttacacgttttttagatctcatatgtgctaaaaagttttcccatactaattggttactattatttttcgtataatttttaacagtttgaggttttagatttttagttacagaagtgatatcgaatattttatccaaaaagaatgaataattaattgtcttagaaggagtgttttcttggcaaaagaataccaagtgcttaaatatttctactacttcattaatcttttctgtactcagattcagtttctcatcttttacttgattgattatttcaaagactaacttataatcctttttatttattctctcgttagccttaagaaaactagatacaaaatttgcatctacatcatccgtggatatttgatttttttccatgatatccaagagttccgagataatttctccagaacattgatgagacaataatctccgcaatacatttctcaaatgaataagtttattagacacgtggaagtttgactttttttgtacctttgtacatttttgaaataccgactcgcaaaaaatacaatattcatatccttgttcagatactataccgttatgtctacaaccgctacataatcgtagattcatgttaacactctacgtatctcgtcgtccaatattttatataaaaacattttatttctagacgttgccagaaaatcctgtaatatttttagttttttgggctgtgaataaagtatcgccctaatattgttaccgtcttccgccaatatagtagttaaattatccgcacatgcagaagaacaccgcttaggcggattcagtacaatgttatatttttcgtaccaactcatttaaatatcataatctaaaatagttctgtaatatgtctagcgctaatatattgatcataatcctgtgcataaattaagatacaacaatgtctcgaaatcatcgacatggcttcttccatagttagaagatcgtcgtcaaagttagcaacgtgattcatcaacatttgctgttttgaggcagcaaatactgaaccgtcgccattcaaccattcataaaaaccatcgtctgaatccattgataatttcttgtactggtttttgagagctcgcatcaatctagcatttctagctcccggattgaaaacagaaagaggatcgtacatccagggtccattttctgtaaatagaatcgtataatgtcccttcaagaagatatcagacgatccacaatcaaagaattggtctccgagtttgtaacaaactgcggactttaacctatacatgataccgtttagcataatttctggtgatacgtcaatcggagtatcatctattagagatctaaagccggtgtaacattctccaccaaacatattcttattctgacgtcgttctacataaaacatcattgctccattaacgataacaggggaatgaacagcactacccatcacattagttcccaatggatcaatgtgtgtaactccagaacatcttccatagcctatgttaggaggagcgaacaccactcttccactattgccatcgaatgccatagaataaatatccttggaattgatagaaatcggactgtcggatgttgtgatcatcttcataggattaacaactatgtatggtgccgcctgaagtttcatatcgtaactgatgccgtttataggtctagccacagaaaccaacgtaggtctaaatccaactatagacaaaatagaagccaatatctgttcctcatctgtcataacttgagagcatccagtatgaataatcttcattagatggggatctaccgcatcatcatcgttacaataaaaaattcccattctaatgttcataattgcttttctaatcatggtatgcatgtttgctctctgaatctctgtggaaattagatctgatacacctgtaatcactatcggattatcctccgtaagacgattaaccaacaacatataattataagactttacttttctaaattcataaagttgctggattaggctataggtgtctccatgtacatacgcgttctcgagcgcaggaagtttaataccgaatagtgccatcagaataggatgaatatagtaattagtttctggttttctataaataaaagacaaatcttgtgaactagacatatcggtaaaatgcatggattggaatcgtgtagtcgacagaagaatatgatgattagatggagagtatattttatctaactctttgagttggtcaccgattctaggactagctcgagaatgaataagtactaaaggatgagtacatttcacagaaacactagcattgttcaatgtgctctttacatgggtaaggagttgaaatagctcgtttctatttgttctgacaatatttagtttattcataatgttaagcatatcctgaatagtaaagttagatgtgtcatacttgttagtagttagatatttagcaattgcattcccatcatttctcaatctcgtactccaatcatgcgtggatgctacttcgtcgatggaaaccatacaatcctttttgataggctgttgagattgatcatttcctgcacgtttaggtttggtacgttgatttctagcccctgcggatataaagtcatcgtctacaatttgggacaatgaattgcatacactacaagacaaagatttatcagaagtgtgaatatgatcttcatctaccaaagaaagagtttgattagtataactagattttagtcctgcgttagatgttaaaaaaacatcgctattgaccacggcttccattatttatattcgtagtttttactcgaaagcgtgattttaatatccaatcttattacttttggaatcgttcaaaacctttgactagttgtagaatttgatctattgccctacgcgtatactcccttgcatcatatacgttcgtcaccagatcgtttgtttcggcctgaagttggtgcatatctctttcaacattcgacatgagatccttaagggccatatcgtctagattttgttgagatgctgctcctggatttggattttgttgtgctgttgtacatactgtaccaccagtaggtgtaggagtacatacagtggccacaataggaggttgagaaagtgtaaccgttggagtagtacaagaaatacttccatccgattgttgtgtacatgtagttgttggtaacgtctgagaaggttgggtagatggcggcgtcgtcgttttttgatctttattaaatttagagataatatcctgaacagcattgctcggcgtcaacgctggaaggagtgaactcgccggcgcatcagtatcttcagacagccaatcaaaaagattagacatatcagatgatgtattagtttgttgtcgtggttttggtgtaggagcagtactactaggtagaagaataggagccgatgtagctgttggaaccggctgtggagttatatgaatagttggttgtagcggttggataggctgtctgctggcggccatcatattatctctagctagttgttctcgcaactgtctttgataatacgactcttgagactttagtcctatttcaatcgcttcatcctttttcgtatccggatccttttcttcagaataatagattgacgactttggtgtagaggattctgccagcctctgtgagaacttgttaaagaagtccatttaaggctttaaaattgaattgcgattataagattaaatggcagacacagacgatattatcgactatgaatccgatgatctcaccgaatacgaggatgatgaagaagaggaagaagatggagagtcactagaaactagtgatatagatcccaaatcttcttataagattgtagaatcagcatccactcatatagaagatgcgcattccaatcttaaacatatagggaatcatatatctgctcttaaacgacgctatactagacgtataagtctatttgaaatagcgggtataatagcagaaagctataacttgcttcaacgaggaagattacctctagtttcagaattttctgacgaaacgatgaagcaaaatatgctacatgtaattatacaagagatagaggagggttcttgtcctatagtcatcgaaaagaacggagaattgttgtcggtaaacgattttgacaaagatggtctaaaattccatctagactatattatcaaaatttggaaacttcaaaaacgatattagaatttatacgaatatcgttctctaaatgtcacaatcaagtctcgcatgttcagcaatttattgtcgtactttatatcgtgttcattaacgatatcttgcaaaatagtaatgattctatcttccttcgatagatattcttcagagattattgtcttatattctttcttgttatcagatatgaatttgataagactttgaacattattgatacccgtctgtttaattttttctacagatattttagttttggcagattctatcgtatctgtcaatagacatccaacatcgacattcgacgtcaattgtctataaatcaacgtataaattttagaaataacattagcgaattgttgtgcgttgatgtcgttattctgaaacagtatgattttaggtagcattttcttaacaaagagaacgtatttattgttactcagttgaacagatgatatatccagattactaacgcatctgattccgtataccaaactttcagaagaaatggtatacaattgtttgtattcattcaatgtctctttttcagaaattagtttagagtcgaatactgcaataattttcaagagatagttttcatcagataagattttatttagtgtagatatgataaaactattgttttgttggagaacttgatacgccgcgttctctgtagtcgacgctctcaaatgggaaacaatctccattatttttttggaatcggatactatatcttcggtatcttgacgcagtctagtatacatagagttaagagagattagagtttgtacattaagcaacatgtctctaaatgtggctacaaacttttcctttttcacatcatctagtttattatataccgatttcacaacggcaccagatttaaggaaccagaatgaaaaactctgataactacaatatttcatcatagttacgattttatcatcttctatagttggtgtaatagcgcatacctttttctccaagactggaaccaacgtcataaaaatgtttaaatcaaaatccatatcaacatctgatgcgctaagaccagtctcgcgttcaagattatctttactaatggtgacgaactcatcgtataaaactctaagtttgtccattatttatttacagatttagttgtttaatttatttgtgctcttccagagttgggatagtatttttctaacgtcggtattatattattaggatctacgttcatatgtatcataatattaatcatccacgttttgataaatctatctttagcttctgaaataacgtatttaaacaaaggagaaaaatatttagctacggcatcagacgcaataacattttttgtaaatgtaacgtatttagacgacagatcttcgttaaaaagttttccatctatgtagaatccatcggttgttaacaccattcccgcgtcagattgaataggagtttgaatagtttgttttggaaatagatccttcaataacttatagttgggtgggaaaaaatcgattttatcactagactctttcttttttactatcattacctcatgaactatttcttgaatgagtatatgtattttctttcctatatcggacgcgttcattggaaaatataccatgtcgttaactataagaatatttttatcctcgtttacaaactgaataatatcagatgtagttcgtaaacgaactatatcatcaccagcacaacatctaactatatgatatccactagtttcctttagccgtttattatcttgttccatattagcagtcattccatcatttaagaaggcgtcaaaaataatagggagaaatgacattttggattctgttacaactttaccaaaattaaggatatacggacttactatctttttctcaacgtcaatttgatgaacacacgatgaaaatgtgcttctatgagattgatcatgtagaaaacaacaagggatacaatatttccgcatatcatgaaatatattaagaaatcccaccttattatatttccccaaaggatccatgcacgtaaacattatgccgttatcattaataaagacttctttctcatcggatctgtaaaagttgttactgatttttttcattccaggatctagataattaataatgatgggttttctattcttattctttgtattttggcatatcctagaccagtaaacagtttccactttggtaaaatcagcagacttttgaacgctattaaacatggcattaatggcaataactaaaaatgtaaaatatttttctatgttaggaatatggtttttcactttaatagatatatggtttttggccaaaatgatagatatttttttatccgaggatagtaaaatattattagtcgccgtctctataaaaatgaagctagtctcgatatccaattttattctagaattgataggagtcgccaaatgtaccttatacgttatatctcccttgatgcgttccatttgtgtatctatatcggacacaagatctgtaaatagttttacgttattaatcatcacggtatcgccgtcgctagataacgctaatgtaccatccaagtcccaaatggagagatttaactgttcatcgtttagaataaaatgattaccggtcatattaataaagtgttcatcgtatctagataacaacgacttataattaatgtccaagtcttgaactcgctgaatgatcttttttaacccagttagttttagattggtacgaaatatattgttaaactttgattctacagtaatgtccaaatctagttgtggaaatacttccatcaacattgtttcaaacttgataatattattatctacatcttcgtacgatccaaattccggaatagatgtatcgcacgctctggccacccagataaccaaaaagtcacacgctccaggatatacattgtataaaaagctatcgttttttagtagggtttttttctgcgtgtatacgaagggattaaaaatagtattatcaacgtaactatattccaaattattcttatgagaatagataataatatcgtccttaatatctaacaaatttcctaaatatccctttaattgagtcattcgaagcgtcaatagaatatgtctcttaactatttccggctgttgtatatttaaatgacttcgtaaaaaataatatatgggcgacttctcatctatgtaatcatatggagtgagatatagggctcgttctacctcctgccccttacccacctgtaataccaattgcggacttactatatatcgcatatttatatcgtggggtaaagtgaaaatctactaccgatgatgtaagtcttacaatgttcgaaccagtaccagatcttaatttggaggcctccgtagaactaggggaggtaaatatagatcaaacaacacctatgataaaggagaatagcggttttatatcccgcagtagacgtctattcgcccatagatctaaggatgatgagagaaaactagcactacgattctttttacaaagactttattttttagatcatagagagattcattatttgttcagatgcgttgacgctgtaaaagacgtcactattaccaaaaaaaataacattatcgtggcgccttatatagcacttttaactatcgcatcaaaaggatgcaaacttacagaaacaatgattgaagcattctttccagaactatataatgaacatagtaagaaatttaaattcaactctcaagtatccatcatccaagaaaaactcggataccagtttggaaactatcacgtttatgattttgaaccgtattactctacagtagctctggctattcgagatgaacattcatctggcatttttaatatccgtcaagagagttatctggtaagttcattatctgaaataacatatagattttatctaattaatctaaaatctgatcttgttcaatggagtgctagtacgggcgctgtaattaatcaaatggtaaatactgtattgattacagtgtatgaaaagttacaactggtcatagaaaatgattcacaatttacatgttcattggctgtggaatcaaaacttccaataaaattacttaaagatagaaatgaattatttacaaaattcattaacgagttaaaaaagaccagttcattcaagataagcaaacgcgataaggatacgctactaaaatattttacttaggactggagttagaatttatagacgactcatttcgtttatcattgttactattattactattactatcattattagtgttggcattattagtattcttcttgtcatcttgttcagaaatatacagcaatgctatacctaatactaaatacattatcatgctcgcaatggctctaacaacaacgaaccaaaatgaatttggtcgtagcttttgttcacaaaaatacataaagaaatgtctacataaatctatggcgccattggctacttgaaatagcgccagtcctcctacagattttaatatagctgtataacatgacatttattcatcatcaaaagagacagagtcaccatctgtcatatttagattttttttcatgtgttcaaagtatcctctactcatttcattataatagtttatcatacttagaattttaggacggatcaatgagtaagacttgactagatcgtcagtagtaatttgtgcatcgtctattctgcatccgcttcgtcgaataatgtatagcatcgctttgagattctccatagctatcaagtctttatacaatgacatggaaatatctgtgaatactttatacttctccaacatcgatgccttaacatcatcgcctactttagcattgaaaatacgttctattgtgtagatggatgtagcaagatttttaaacaacaatgccatcttacacgatgattgcctcaagtctccaatcgtttgtttagaacgattagctacagagtccaatgcttggctgactagcatattattatctttagaaattgtattcttcaatgaggcgtttatcatatctgtgatttcgttagtcatattacagtctgactgggttgtaatgttatccaacatatcacctatggatacggtacacgtaccagcatttgtaataatcctatctaagatgttgtatggcattgcgcagaaaatatcttctcctgtaatatctccactctcgataaatctactcagattattcttaaatgccttattctctggagaaaagatatcagtgtccatcatttcattaatagtatacgcagaaaagataccacgagtatcaattctatccaagatacttatcggttccgagtcacagataatggtttcctctccttcgggagatcctgcatagaaatatctaggacaatagtttctatactgtctgtaactctgataatctctaaagtcactaactgataccatgaaattgagaagatcaaacgctgaagtaattaatttttctgcctcgtttttactacaactagttttcatcaatgtagtgacgatgtattgtttagttacttttggtctaatactgatgatagagatattattgcttcccataatggatcttctagtagtcaccttaaagcccattgatgcgaatagcagatagataaagtcttggtatgactcctttctaatatagtacggactacctttgtcacccaactttatacccacataagccataacaacctctttaatagccgtttcatgaggtttatcagccatgagcctgagtagttggaagaatctcatgaatcccgtctcagaaagtcctatatgcatgatagatttatctttcctgggaaactctcgtatagtcatagatgaaatactctttaaagtttctgaaataagattagtaacagtcttacctccgactactctaggtaacaaacaaactctaataggtgttttctctgcggagataatatcagaaaggatagagcaataagtagtattattgtgattataaagaccgaatacataacaggtagaatttataaacatcatgtcctgaaggtttttagacttgtattcctcgtaatccataccgtcccaaaacatggatttggtaactttgatagccgtagatctttgttccttcgccaacaggttaaagaaattaataaagaatttgttgtttctatttatgtccacaaattgcacgtttggaagcgccacggttacattcactgcagcattttgaggatcgcgagtatgaagtacgatgttattgtttactggtatatctggaaagaaatctaccagtctaggaataagagattgatatcgcatagaaatagtaaagtttataatctcatcatcgaagagcattttgttaccattgtaataaatatccactctgtcatatgtataaatgaagtactgttcaaacatgatgagatgtttatatgttggcatagtagtgagatcgacgtttggtaatggcaatgtattaagattaactccataatgtctagcagcatctgcgatgttataagcgtcgtcaaagcggggtcgatcttgtattgttatatattgtctaacacctataagattatcaaaatcttgtctgcttaatacaccgttaacaatttttgccttgaattcttttattggtgcattaataacatccttatagaggatgttaaacaaataagtgttatcaaagttaagatctggatatttcttttctgctagaacatccattgagtcggagccatctggtttaatataaccaccgataaatctagctctgtattctgtatccgtcaatctaatattaagaaggtgttgagtgaaaggtggaagatcgtaaaagctgtgagtattaatgataggattagtttccgaactaatgttaattggggtattaataatatctatatttccagcgttaagtgtaacattaaacagttttaattcacgtgacgtggtatcaattaaataattaatgcccaatttggatatagcagcctgaagctcatcttgtttagttacggatcctaatgagttattaagcaatatatcgaacggatgaacgaaggttgttttaagttggtcacatactttgtaatctagacatagatgcggaagaacggtagaaactatacgaaataaatattcagagtcctctaattgatcaagagtaactattgacttaataggcatcatttatttagtattaaatgacgaccgtaccagtgacggatatacaaaacgatttaattacagagttttcagaagataattatccatctaacaaaaattatgaaataactcttcgtcaaatgtctattctaactcacgttaacaacgtggtagatagagaacataatgccgccgtagtgtcatctccagaggaaatatcctcacaacttaatgaagatctatttccagatgatgattcaccggccactattatcgaacgagtacaacctcatactactattattgacgatactccacctcctacgtttcgtagagagttattaatatcggaacaacgtcaacaacgagaaaaaagatttaatattacagtatcgaaaaatgctgaagcaataatggaatctagatctatgataacttctatgccaacacaaacaccatccttgggagtagtttatgataaagataaaagaattcagatgttagaggatgaagtggttaatcttagaaatcaacgatctaatacaaaatcatctgataatttagataattttaccaaaatactatttggtaagactccgtacaaatcaacagaagttaataagcgtatagccatcgttaattatgcaaatttgaacgggtcccccttatcagtcgaggacttggatgtttgttcggaggatgaaatagatagaatctataaaacgattaaacaatatcacgaaagtagaaaacgaaaaattatcgtcactaacgtgattattattgtcataaacattatcgagcaggcattgctaaaactcggatttgaagaaatcaaaggactgagtaccgatatcacttcagaaattatcgatgtggagatcggagatgactgcgatgctgtagcatctaaactaggaatcggtaacagtccggttcttaatattgtattgtttatactcaagatattcgttaaacgaattaaaattatttaatttaatacattcccatatccagacaacaatcgtctggattaatctgttcctgtcgtctcataccggacgacatattaatctttttattagtgggcatctttttagatggtttctttttcccagcattaactgagtcgatacctagaagatcgtgattgatctctccgaccattccacgaacttctaattggccgtctctgacggtaccataaactattttaccagcattagtaacagcttggacaatctgaccatccatcgcattgtacgatgtagtagtaactgttgttctacgtctaggagcaccagaagtatttttggagcccttggatgttgatgtagaagaagacgaggattttgattttggtttacatgtaatacattttgaactctttgattttgtatcacatgcgccggcagtcacatctgtttgagaattaagattattgttgcctcctttgacggctgcatctccaccgatttgcgctagtagatttttaagctgtggtgtaatcttattaactgtttcgatataatcatcgtaactgcttctaacggctaaattttttttatccgccatttagaagctaaaaatatttttatttatgcagaagatttaactagattatacaatgaactaatatgatccttttccagattatttacaaacttggtattttttggttctggaggaggcgaatttaaattcggacttggattcggattttgtaagttcttgatcttattatacatcgagtataggatggcgacagtaactgctacacaaataccgatcaaaagaagaataccaatcatttattgacaataacttcactattgatcaagtatgcaatatatcatcttttcactaaataagtagtaataatgattcaacaatgtcgagatatatggacgataataatttagttcatggaaatatcgctatgattggtgtgaatgactccgctaactctgtggggtgcgcagtgctttccccacatagaataaattagcattccgactgtgataataataccaagtataaacgccataatactcaatactttccatgtacgagtgggactggtagacttactaaagtcaataaaggcgaagatacacgaaagaatcaaaagaatgattccagcgattagcacgccggaaaaataatttccaatcataagcatcatgtccatttaactaataaaaattttaaatcgccgaatgaacaaagtggaatataaaccatataaaaacaatagtttgtactgcaaaaataatatctatttttgttttcgaagatatggtaaaattaaatagtagtacacagcatgttataactaacagcagcaacggctcgtaattacttatcatttactagacgaaaaggtggtgggatattttcttgctcaaataatacgaatatatcacccatccattttatgcgatgtttatatactctaatctttaatagatctatagacgacgggtttaccaacaatatagattttatcgattcatctaatttaaacccttccttaaacgtgaatgatctattatctggcataacgatgaccctacctgatgaatcggacaatgtactgggccatgtagaataaattatcaacgaattatcgtctacgaacatttatatcatttgttttaattttaggacgcgaataaatggatataaaatagaaaataacagatattacaaccagtgttatggccgcgcccaaccaggtaggcagttttattttatcttttactacaggttctcctggatgtacgtcaccaacggcggacgtagttctagtacaattagacgtaagttccgcttgggaattttttaacgctaaagagttaacgttaatcgtgcacccaacgtatttacatctagttcgttgaacatcttgattataatataaccattttctatctctagattcgtcagtgcactcatgtaaccaacataccctaggtcctaaatatttatctccggaattagattttggataattcgcgcaccaacaatttctatttcctttatgatcgttacaaaagacgtataatgccgtatccccaaaagtaaaataatcaggacgaataattctaataaactcagaacaatatctcgcatccatatgtttggagcaaatatcggaataagtagacatagccggtttccgttttgcacgtaaccattctaaacaattggggtttccaggatcgtttctacaaaatccagtcatgaaatcgtcacaatgttctgtcttgtaattattattaaatatttttggacagtgtttggtatttgtcttagaacaacattttgccacgctatcactatcgcccaggagataatccttttttataaaatgacatcgttgcccggatgctatataatcagtagcgtgttttaaatccttaatatattcaggagttacctcgttctgataatagattaatgatccaggacgaaatttgaaagaactacatggttctccatgaattaatacatattgtttagcaaattcaggaactataaaactactacaatgatctatcgacataccatctatcaaacaaaacttgggtttaatttctcccggagatgtttcataatagtacgtataactttcttctgcaaacttaacagctctattatattcaggataattaaaacctaattccatatatttgtctcgtatatctgctattcctggtgctattttgattctattaagagtaacagctgcccccattcttaataatcgtcagtatttaaactgttaaatgttggtatatcaacatctaccttatttcccgcagtataaggtttgttgcaggtatactgttcaggaatggttacatttatacttcttctatagtcctgtctttcgatgttcatcacatatgcaaagaacagaataaacaaaataatgtaagaaataatattaaatatctgtgaattcgtaaatacattgattgccataataattacagcagctacaatacacacaatagacattcccacagtgttgccattacctccacgatacatttgagttactaagcaataggtaataactaagctagtaagaggcaatagaaaagatgagataaatatcatcaatatagagattagaggagggctatatagagccaagacgaacaaaatcaaaccgagtaacgttctaacatcattatttttgaagattcccaaataatcattcattcctccataatcgttttgcatcatacctccatctttaggcataaacgattgctgctgttcctctgtaaataaatctttatcaagcactccagcacccgcagagaagtcgtcaagcatattgtaatatcttaaataactcatttatatattaaaaaatgtcactattaaagatggagtataatctttatgccgaactaaaaaaaatgacttgtggtcaacccctaagtctttttaacgaagacggggatttcgtagaagttgaaccgggatcatcctttaagtttctgatacctaagggattttacgcctctccttccgtaaagacgagtctagtattcgagacattaacaacgaccgataataaaatcactagtatcaatccaacaaatgcgccaaagttatatcctcttcaacgcaaagtcgtatctgaagtagtttctaatatgaggaaaatgatcgaatcaaaacgtcctctatacatcactcttcacttggcgtgtggatttggtaagactattaccacgtgttatcttatggctacacacggtagaaaaaccgtcatttgcgtacccaataaaatgttaatacatcaatggaagacacaggtagaggcagtcggattggaacataagatatccatagatggagtaagtagtctattaaaggaactaaagactcaaagtccggatgtattaatagtagtcagtagacatctgacaaacgatgccttttgtaaatatatcaataagcattatgatttgttcatcttggatgaatcacatacgtataatctgatgaacaatacagcagttacaagatttttagcgtattatcctccgatgatgtgttattttttaactgctacacctagaccatctaaccgaatttattgtaacagtattattaatattgccaagttatccaatctaaaaaaaactatctatgcagtagatagtttttttgagccatattccacagataatattagacatatggtaaaacgactagatggaccatctaataaatatcatatatataccgagaagttattatctgtagacgagcctagaaatcaacttattcttgataccctggtagaagaattcaagtcaggaactattaatcgcattttagttattactaaactacgtgaacatatggtattattctacaaacgattattagattttttcggaccagaggttgtatttataggagacgcccaaaatagacgtactccagatatggtcaaatcaatcaaggaactaaatagatttatattcgtatccaccttattttattccggtactggtttagatattcctagtttggattcgttgttcatttgctcggcagtaatcaacaatatgcaaatagagcaattactagggagggtatgtcgagaaacagaactattagataggacggtatatgtatttcctaacacatccatcaaagaaataaagtacatgataggaaatttcatgcaacgaattattagtctgtctgtagataaactaggatttaaacaaaaaagttatcggaaacatcaagaatccgatcccacttctgcatgtacaacatcatccagagaagaacgtgtattaaatagaatatttaactcgcaaaatcgttaagaagtttaagcgacgatccgcatgctgcgcaggccagtgtattacccctcatagtattaatataatccaatgatacttttgtgatgtcggaaatcttaaccaatttagactgacaggcagaacacgtcatgcaatcatcatcgtcatcgataactgtagtcttgggcttctttttgcgactcttcattccggaacgcacattggtgctatccatttaggtagtaaaaaataagtcagaatatgccctataacacgatcgtgcaaaacctggtatatcgtctctatctttatcacaatatagtgtatcgacatttttattattattgacctcgtttatcttggaacatggaatgggaacatttttgttatcaacggccatctttgccttaattccagatgttgtaaaattataactaaacagtctatcatcgacacaaatgaaattcttgtttagacgtttgtagtttacgtatgcggctcgttcgcgtctcattttttcagatattgcaggtactataatattaaaaataagaatgaaataacataggattaaaaataaagttatcatgacttctagcgctgatttaactaacttaaaagaattacttagtctgtacaaaagtttgagattttcagattctgcggctatagaaaagtataattctttggtagaatggggaacatctacttactggaaaataggcgtgcaaaaggtagctaatgtcgagacgtcaatatctgattattatgatgaggtaaaaaataaaccgtttaatattgatccgggctattacattttcttaccggtatattttgggagcgtctttatttattcgaagggtaaaaatatggtagaacttggatctggaaactcttttcaaataccagatgatatgcgaagtgcgtgtaacaaagtattagacagcgataacggaatagactttctgagatttgttttgttaaacaatagatggataatggaagatgctatatcaaaatatcagtctccagttaatatatttaaactagctagtgagtacggattaaacatacccaaatatttagaaattgaaatagaggaagacacattatttgacgacgagttatactctattatagaacgctctttcgatgataaatttccaaaaatatccatatcgtatattaagttgggagaacttagacggcaagttgtagactttttcaaattctcattcatgtatattgagtccatcaaggtagatcgtataggagataatatttttattcctagcgttataacaaaatcaggaaaaaagatattagtaaaagatgtagaccatttaatacgatccaaggttagagaacatacatttgtaaaagtaaaaaagaaaaacacattttccattttatacgactatgatggaaacggaacagaaactagaggagaagtaataaaacgaattatagacactataggacgagactattatgttaacggaaagtatttctctaaggttggtagtgcaggcttaaagcaattgactaataaattagatattaatgagtgcgcaactgtcgatgagttagttgatgagattaataaatccggaactgtaaaacgaaaaataaaaaaccaatcagcatttgatttaagcagagaatgtttgggatatccagaagcggattttataacgttagttaataacatgcggttcaaaatagaaaattgtaaggttgtaaatttcaatattgaaaatactaattgtttaaataacccgagtattgaaactatatatggaaactttaaccagttcgtctcaatctttaatgtcgtcaccgatgtcaaaaaaagattattcgagtgaaataatatgcgcctttgatataggtgcaaaaaatcctgccagaactgttttagaagtcaaggataactccgttagggtattggatatatcaaaattagactggagttctgattgggaaaggcgcatagctaaagatttgtcacaatatgaatacactacagttcttctagaacgtcagcctagaaggtcgccgtatgttaaatttatctattttattaaaggctttttatatcatacatcggctgccaaagttatttgcgtctcgcctgtcatgtctggtaattcatatagagatcgaaaaaagagatcggtcgaagcatttcttgattggatggacacattcggattgcgagactccgttccggatagacgcaaattagacgatgtagcggatagtttcaatttggctatgagatacgtattagataaatggaatactaattatacaccttataataggtgtaaatctagaaattacataaaaaaaatgtaataacgttagtaacgccattatggataatctatttacctttctacatgaaatagaagatagatatgccagaactatttttaactttcatctaataagttgcgatgaaataggagatatatatggtcttatgaaagaacgcatttcctcagaggatatgtttgataatatagtgtataataaagatatacatcctgccattaagaaactagtgtattgcgacatccaacttactaaacacattattaatcagaatacgtatccggtatttaacgattcttcacaagtgaaatgttgtcattatttcgacataaactcagataatagcaatattagctctcgtacagtagagatatttgagagggaaaagtcatctcttgtatcatatattaaaactaccaataagaagagaaaggtcaattacggcgaaataaagaaaactgttcatggaggcactaatgcaaattacttttccggtaaaaagtctgacgagtatctgagtactacagttagatccaacattaatcaaccttggatcaaaaccatctctaagaggatgagagttgatatcattaatcactctatagtaacgcgtggaaaaagctctatattacaaactatagaaattatttttactaatagaacatgtgtgaaaatattcaaggattctactatgcacattattctatccaaggacaaggatgaaaaggggtgtatacacatgattgacaaattattctatgtctattataatttatttctgttgttcgaagatatcatccaaaacgagtactttaaagaagtagctaatgttgtaaaccacgtactcacggctacggcattagatgagaaattattcctaattaagaaaatggctgaacacgatgtttatggagttagcaatttcaaaatagggatgtttaacctgacatttattaagtcgttggatcataccgttttcccctctctgttagatgaggatagcaaaataaagttttttaaggggaaaaagctcaatattgtagcattacgatctctggaggattgtataaattacgtgactaaatccgagaatatgatagaaatgatgaaggaaagatcgactattttaaatagcatagatatagaaacggaatcggtagatcgtctaaaagaattgcttctaaaatgaaaaaaaacactaattcagaaatggatcaacgactagggtataagtttttggtgcctgatcctaaagccggagttttttatagaccgttacatttccaatatgtatcgtattctaattttatattgcatcgattgcatgaaatcttgaccgtcaagcggccactcttatcgtttaagaataatacagaacgaattatgatagaaattagcaatgttaaagtgactcctccagattactcacctataatcgcgagtattaaaggtaagagttatgacgcattagccacgttcactgtaaatatctttaaagaggtaatgaccaaagagggtatatccatcactaaaataagtagttatgagggaaaagattctcatttgataaaaattccgctactaataggatacgggaataaaaatccacttgatacagccaagtatcttgttcctaatgtcataggtggagtctttatcaataaacaatctgtcgaaaaagtaggaattaatctagtagaaaagattacaacatggccaaaatttagggttgttaagccaaactcattcactttctcgttttcctccgtatcccctcctaatgtattaccgacaagatatcgccattacaagatatctctggatatatcacaattggaagcgttgaatatatcatcgacaaagacatttataacggtcaatattgttttgctgtctcaatatttatctagagtgagtctagaattcattagacgtagtttatcatacgatatgcctccagaagttgtctatctagtaaacgcgataatagatagtgctaaacgaattactgaatctattactgactttaatattgatacatacattaatgacctggtggaagctgaacacattaaacaaaaatctcagttaacgatcaacgagttcaaatatgaaatgctgcataactttttacctcatatgaactatacacccgatcaactaaagggattttatatgatatctttactaagaaagtttctctactgtatcttccacacttctagatatccagatagagattcgatggtttgtcatcgcatcctaacgtacggcaaatattttgagacgttggcacatgatgaattagagaattacataggcaacatccgaaacgatatcatgaacaatcacaagaacagaggcacttacgcggtaaacattcatgtactaacaactcccggacttaatcacgcgttttctagcttattgagtggaaagttcaaaaagtcagacggtagttatcgaacacatcctcactattcatggatgcagaatatttctattcctaggagtgttggattttatccggatcaagtaaagatttcaaagatgttttctgtcagaaaataccatccaagtcaatatctttacttttgttcatcagacgttccggaaagaggtcctcaggtaggtttagtatctcaattgtctgtcttgagttccattacaaatatactaacgtctgagtatttggatttggaaaagaaaatttgtgagtatatcagatcatattataaagatgatataagttactttgaaacaggatttccaatcactatagaaaatgctctagtcgcatctcttaatccaaatatgatatgtgattttgtaactgactttagacgtagaaaacggatgggattcttcggtaacttggaggtaggtattactttagttagggatcacatgaatgaaattcgcattaatattggagcgggaagattagtcagaccattcttggttgtggataacggagagctcatgatggatgtgtgtccggagttagaaagcagattagacgacatgacattctctgacattcagaaagagtttccgcatgtcatcgaaatggtagatatagaacaatttacttttagtaacgtatgtgaatcggttcaaaaatttagaatgatgtcaaaggatgaaagaaagcaatacgatttatgtgactttcctgccgaatttagagatggatatgtagcatcttcattagtgggaatcaatcacaattctggacccagagctattcttggatgtgctcaagctaaacaagctatctcttgtctgagctcggatatacgaaataaaatagacaatggaattcatttgatgtatccagagaggccaatcgtgattagtaaggctttagaaacttcaaagattgcggctaattgcttcggccaacatgttactatagcattaatgtcgtacaaaggtatcaatcaagaggatggaattatcatcaaaaaacaatttattcagagaggcggtctcgatattgttacagccaagaaacatcaagtagaaattccattggaaaactttaataacaaagaaagagataggtctaacgcctattcaaaattagaaagtaatggattagttagactgaatgctttcttggaatccggagacgctatggcacgaaatatctcatcaagaactcttgaagatgattttgctagagataatcagattagcttcgatgtttccgagaaatataccgatatgtacaaatctcgcgttgaacgagtacaagtagaacttactgacaaagttaaggtacgagtattaaccatgaaagaaagaagacccattctaggagacaaatttaccactagaacgagtcaaaagggaacagtcgcgtatgtcgcggatgaaacggaacttccatacgacgaaaatggtatcacaccagatgtcattattaattctacatccatcttctctagaaaaactatatctatgttgatagaagttattttaacagccgcatattctgctaagccgtacaacaataagggagaaaaccgacctgtctgttttcctagtagtaacgaaacatccatcgatacatatatgcaattcgctaaacaatgttatgagcattcaaatccgaaattgtccgatgaagaattatcggataaaatcttttgtgaaaagattctctatgatcctgaaacggataagccttatgcatccaaagtattttttggaccaatttattacttgcgtctgaggcatttaactcaggacaaggcaaccgttagatgtagaggtaaaaagacgaagctcattagacaggcgaatgagggacgaaaacgtggaggaggtatcaagttcggagaaatggagagagactgtttaatagcgcatggtgcagccaatactattacagaagttttgaaagattcggaagaagattatcaagatgtgtatgtttgtgaaaattgtggagacatagcagcacaaatcaagggtattaatacatgtcttagatgttcaaaacttaatctctctcctctcttaacaaaaattgataccacgcacgtatctaaagtatttcttactcaaatgaacgccagaggcgtaaaagtcaaattagatttcgaacgaaggcctccttcgttttataaaccattagataaagttgatctcaagccgtcttttctggtgtaatattctagtttggtagtagatacatatcaatatcatcaaattcgagatccgaattataaaatgggcgtggattgttaactatagaatcggacgtctgatattcgaaaatctgtggagtttcaggttttggtggaggtgtaactgctacttgggatactgaagtctgatattcagaaagctgtggatgttctggttcggcatccaccgatggtgtcacatcactaatcggttcggtaacgtctgtggatggaggtgctacttctacagaacctgtagcctcagttgtcaacggagatacatttttaatgcgagaaaatgtataatttggtaatggtttcttatgtggatctgaagaagaggtaagatatctactagaaagataccgatcacgttctagttctcttttgtagaacttaactttttctttctccgcatctagttgatattccaacctcttcacgttactacgttcagattccaattcacgttcgcatgggttacctccgcagtttttacgagcgatttcacgttcagccttcatgcgtctctccctctctctatcgagtttatcagagcagtctttctgaaggcgatcgaactccataaatttctccaacgctttgattgtttccatagatttccgaagttcagcttttaggactgtgattctttttctttcgaattcacagctggatgtacaaccgtttccattaccgccatctctaagtttcttttctagatcggcaacatttcatccccatgccttttacattcctcgagtctactgtcgtcgaaatatcgttccagctccttttcgacatcaataactttagcacgttgtctctcaagctctcttttgtagttatctgattccctggcacgtttaagatcttcatgcaattgagtcagctcttaacttcctctcttgcttcttcgtcatagtacgcgcaatcactgtgagatccattgttaccacgtctacactcggcgagctcgcgtttaagagattcaatttcccgtttgtattggtccatgtttccattgctaccaccattagatttacaggctgctagttgtcgttcgagatcagaaatacgggttttcttggaattgatttcgtcgatgtacttggcatcgaaacacttattaagttctttttccaattctacgattttatttctttcgcgagtcaattccctcctgtagtaactatctgttttgtcagattcacgctctctacgtagactttcttgcaagttactaatttgttccctagcacgtccgagtttagttttatatgctgaatagagttctgattcatcctttgagcagatctctagcgatcgtttaagattcctaattctagtctttagcctatttacctcctcagaagatgttccgttaccgttgcgtttacactcgttaagctgtctatcaagatccatgattctatctctaagacgttgcatctctctttccatatcagcattgctttcattattacgtctgcagtcactcaactgtctttcaatatctgagattctatctctaagacgtcgcatctctctctgtttcggcattggtttcattattacgtttacagtcgttcaactgtctttcaagatctgatattctagattggagtctgctaatctctgtagcattttcacggcattcactcagttgtctttcaagatctgaaattttagattggagtctgctaatctctgtaagatttcctcctccgctctcgatgcagtcggtcaacttattctctagttctctaatacgcgaacgcagtgcatcaacttcttgcgtgtcttcctggttgcgtgtacattcatcgagatctctaacgcgtcgtcgttcttcctcaagttctctgcgtactacagaaagcgtgtccctatcttgttgatatttagcaatttctgattctagagtactgattttgcttacgtagttactaatagttgtcttggccttatcaagatcctccttgtatttgtcgcattccttgatatccctacgaagtctggacagttcccattcgacattacgacgtttatcgatttcagctcggagatcgtcatcgcgttgttttagccacatacgactgagttcaagttctcgttgacaagatccatctacttttccattcctaatagtatccagttccttttctagttctgaacgcatttctcgttccctatcaagcgattctctcaattctcggatagtcttcttatcaatttctaataaatctgaaccatcatctgtcccattttgaatatccctgtgttctttgatctcttttgtaagtcggtcgattctttcggttttataaacagaatccctttccaaagtcctaatcttactgagtttatcactaagttctgcattcaattcggtgagttttctcttggcttcttccaactctgttttaaactctccactatttccgcattcttcctcgcatttatctaaccattcaattagtttattaataactagttggtaatcagcgattcctatagccgttcttgtaattgtgggaacataattaggatcttctaatggattgtatggcttgatagcatcatctttatcattattagggggatggacaaccttaattggttggtcctcatctcctccagtagcgtgtggttcttcaataccagtgttagtaataggcttaggcaaatgcttgtcgtacgcgggcacttcctcatccatcaagtatttataatcgggttctacttcagaatattcttttctaagagacgcgacttcgggagttagtagaagaactctgtttctgtatctatcaacgctggaatcaatactcaagttaaggatagcgaatacctcatcgtcatcatccgtatcttctgaaacaccatcatatgacatttcatgaagtctaacgtattgataaatagaatcagatttagtattaaacagatccttaacctttttagtaaacgcatatgtatattttagatctccagatttcataatatgatcacatgccttaaatgtcagtgcttccatgatataatctggaacactaatgggtgacgaaaaagatacagcaccatatgctacgttgataaataaatctgaaccactaagtagataatgattaatgttaagaaagaggaaatattcagtgtataggtatgtcttggcgtcatatcttgtactaaacacgctaaacagtttgttaatgtgatcaatttccaatagattaattagagcagcgggaataccaacaaacatattaccacatccgtattttctatgaatatcacatatcatgttaaaaaatcttgatagaagagcgaatatctcgtctgacttaatgagtcgtagttcagcagcaacataagtcataactgtaaatagaacatactttcctgtagtgttgattctagactccacatcaacaccattattaaaaatagttttatatacatctttaatctgctctccgttaatcgtcgaacgttctagtatacggaaacactttgatttcttatctgtagttaatgacttagtgatatcacgaagaatattacgaattacatttcttgtttttcttgagagacctgattcagaactcaactcatcgttccatagtttttctacctcagtggcgaaatctttggagtgcttggtacatttttcaataaggttcgtgacctccatttattataaaaaatttattcaaaacttaactacaatcgggtaattataagatcgtagatctcccatgtggcggaatactaccatctatcgcatgtggatggacagtaggtaatggccatgggaacagtaatgtttgcatatttatctttcttgctagtattactgcatattgtcccaatgtttcgatgtgatgttctaacctatcaactgccgctgtatcacaacaatagtgtccgatgaaattaagattatgatccaatgtgtttaatatatgattatcaagtcttatacgatccgcgtcttttttgacaggatcaggttcttctacaggaagaagtttcggcctcttatgatattcatgtctgggaaacggtggtctagggtgaggctccggtatcggagtgggttttggattataatcatcatcgtctatgacatcatcttcgacttcgatatttattttgctatcttgatgatgtcctgtatcagttgcattttcagcactcgactgaatattagcgcattcattgtctattattaccatatttctaaacccaaaatgtatgtgttgaacatcagtactatcgttgatgagtcttatagcatgaattcgcttatcgttatcgggtttatcttctgtcaccttagcaattccttttttattaaactctacataatcatatccatttctattgtttgttctaatataaacgagtatagcatcattgctaaatttttcaatagtatcaaaaacagaatatcctaaaccatataatatatattcaggaacactcaaactaaatgtccaggattctcctaaatacgtaaactttaatagtgcgaaatcattcaaaaatctaccacttatagatagatagtacataaatgcgtatagtagtctacctatctctttattatgaaaaccggcattacgatcatatatgtcgtgatatacctgtgatccgtttacgttaaaccataaatacatgggtgatcctataaacatgaatttatttctaattctcagagctatagttaattgaccgtgtaatatttgcttacatgcatacttgatacgcttattaataagatttttatcattgctcgttatttcagaatcgtatatataaggagtaccatcgtgattcttaccagatattatacaaaatactatatataaaatatattgacccacgttagtaatcatataaatgtttaacgttttaaattttgtattcaatgatccattatcatacgctatcatggtcttgtaatattcattctttaaaatataatattgtgttagccattgcattggagctcctaatggagattttctattctcatccattttaggataggctttcataaagtccctaataacttcgtgaataatgtttctatgttttctactgatgcatgtatttgcttcgatttttttatcccatgtttcatctatcatagatttaaacgcagtaatgctcgcaacattaacatcttgaaccgttggtacaattccgttccataaatttataatgttcgccatttatataactcattttttgaatatacttttaattaacaaaagagttaagttactcatatggacgccgtccagtctgaacatcaatctttttagccagagatatcatagccgctcttagagtttcagcgtgattttccaacctaaatagaacttcatcgttgcgtttacaacacttttctatttgttcaaactttgttgttacattagtaatctttttttccaaattagttagccgttgtttgagagtttcctcattgtcgtcttcatcggctttaacaattgcttcgcgtttagcctctggctttttagcagcctttgtagaaaaaaattcagttgctggaattgcaagatcgtcatctccggggaaaagagttccgtccatttaaagtacagattttagaaactgacactctgcgttatttatatttggtacaacacatggattataaatattgatgttaataacatcagaaaatgtaaagtctatacattgttgcatcgtgttaaattttctaatggatctagtattattgggtccaacttctgcctgaaatccaaatatggaagcggatacaaaaccgtttcctggataaaccacacatctccacttttgctttacatcagaaattgtgtcgttgacatcttgaactctcctatctaatgccggtgttccacctatagattttgaatattcgaatgctgcatgagtagcattaaattccttaatattgccataattttcatatattgagtaaccctggataaaaagtaaacacaccgcagccgtcgctaccacaataaaaaaaattgatagagagttcatttataatctattagaagctgacaaaatttttttacacgcatcagacaatgctttaataaatagttcaacatctacttttgtcatatcgaaccgatggtatgattctaacctagaattacatccgaaaaagttgactatgttcatagtcattaagtcattaacaaacaacattccagactctggattataagacgatactgtttcgtcacaattacctaccttaatcatgtgattatgaatattggctattagagcaccttctaagaaatctataatatctttgaaacacgatttaaaatcaaaccacgaatatacttctacgaagaaagttagtttacccataggagaaataactataaatggagatctaaatacaaaatccggatctatgatagttttaacattattatattctctattaaatacctccacatctaaaaatgttaattttgaaactatgtcttcgtttattaccgtacctgaactaaacgctataagctctattgtttgagaactctttaaacgatattcttgaaatacatgtaacaaagtttcctttaactcggtcggtttatctaccatagttacagaatttgtatccttatctataatataataatcaaaatcgtataaagttatataattatcgcgttcagattgtgatcttttcaaatagactaaaaaccccatttctctagtaagtatcttatgtatatgtttgtaaaatatcttcatggtgggaatatgctctaccgcagttagccattcctcattgacagcggtagatgtattagacaaaactattccaatgtttaacaagggccattttacgagattattaaatccttgtttgataaatgtagccaatgagggttcgagttcaacgacgattgaattctcttcccgcggatgctgcatgatgaacgacgggatgttgttcgattgatttggaattctttttcgactttttgtttatattaaatattttaaaatttatagcggatagcaattcatgtaccacggataatgtagacgcgtattgcgcatcgatatctttattattagataaatttatcaataaatgtgagaagtttgcctcgttaaggtcttccatttaaatattatataaacatttgtgtttgtatcttattcgtcttttatggaatagttttttactagtaaagctgcaattacacactttgtccgtaaaacataaatataaacaccagcttttatcaatcgttccaaaaagtcgacggcggacatttttaacatggcatctattttaaatacacttaggtttttggaaaaaacatcattttataattgtaacgattcaataactaaagaaaagattaagattaaacataagggaatgtcatttgtattttataagccaaagcattctaccgttgttaaatacttgtctggaggaggtatatatcatgatgatttggttgtattggggaaggtaacaattaataatctaaagatgatgctattttacatggatttatcatatcatggagtgacaagtagtggagcaatttacaaattgggatcgtctatcgatagactttctctaaataggactattgttacaaaagttaataattatgatgatacattttttgacgacgatgattgatcgctattgcacaattttgtttttgtactttctaatatagtgtttaggttctttttcatatgagaatattgatttactaaaatatctatgtttaacttttgttctatgacgtccttatcggcggtatcggtacatatacgtaattcaccttcacaaaatacggagtcttcgataataatagccaatcgattattggatctagctgtctgtatcatattcaacatgtttaatatatcctttcgtttcccctttacaggcatcgatcgtagcatattttccgcgtctgatatggaaatgttaaaactacaaaaatgcgtaatgttagcccgtcctaatattggtacgtgtctataagtttggcatagtagaataatagacgtgtttaaatgccttccaaagtttaagaattctattagagtattgcattttgatagtttatcgcctacatcatcaaaaataagtaaaaagtgtgctgattttttatgattttgtgcgacagcaatacatttttctatgttacttttagttcgtatcagattatattctagagattcctgactactaacgaaattaatatgatttggccaaatgtatccatcataatctgggttataaacgggtgtaaacaagaatatatgtttatattttttaactagtgtagaaaacagagatagtaaatagatagtttttccagatccagatcctcctgttaaaaccattctaaacggcatttttaataaattttctcttgaaaattgtttttcttggaaacaattcataattatatttacagttactaaattaatttgataataaatcaaaatatggaaaactaaggttgttagtagggaggagaacaaagaaggcacatcgtgatataaataacatttattatcatgatgacaccagaaaacgacgaagagcagacatctgtgttctccgctactgtttacggagacaaaattcagggaaagaataaacgcaaacgcgtgattggtctatgtattagaatatctatggttatttcactactatctatgattaccatgtccgcgtttctcatagtgcgcctaaatcaatgcatgtctgctaacgaggctgctattactgacgccgctgttgccgttgctgctgcatcatctactcatagaaaggttgcgtctagcactacacaatatgatcacaaagaaagctgtaatggtttatattaccagggttcttgttatatattacattcagactaccagttattctcggatgctaaagcaaattgcactgcggaatcatcaacactacccaataaatccgatgtcttgactacctggctcattgattatgttgaggatacatggggatctgatggtaatccaattacaaaaactacatccgattatcaagattctgatgtatcacaagaagttagaaagtatttttgtgttaaaacaatgaactaatatttatttttgtacattaataaatgaaatcgcttaatagacaaactgtaagtaggtttaagaagttgtcggtgccggccgctataatgatgatactctcaaccattattagtggcataggaacatttctgcattacaaagaagaactgatgcctagtgcttgcgccaatggatggatacaatacgataaacattgttatttagatactaacattaaaatgtctacagataatgcggtttatcagtgtcgtaaattacgagctagattgcctagacctgatactagacatctgagagtattgtttagtattttttataaagattattgggtaagtttaaaaaagaccaatgataaatggttagatattaataatgataaagatatagatattagtaaattaacaaattttaaacaactaaacagtacgacggatgctgaagcgtgttatatatacaagtctggaaaactggttaaaacagtatgtaaaagtactcaatctgtactatgtgttaaaaaattctacaagtgacaacaaaaaatgaattaataataagtcgttaacgtacgccgccatggacgccgcgtttgttattactccaatgggtgtgttgactataacagatacattgtatgatgatctcgatatctcaatcatggactttataggaccatacattataggtaacataaaaactgtccaaatagatgtacgggatataaaatattccgacatgcaaaaatgctactttagctataagggtaaaatagttcctcaggattctaatgatttggctagattcaacatttatagcatttgtgccgcatacagatcaaaaaataccatcatcatagcatgcgactatgatatcatgttagatatagaagataaacatcagccattttatctattcccatctattgatgtttttaacgctacaatcatagaagcgtataacctgtatacagctggagattatcatctaatcatcaatccttcagataatctgaaaatgaaattgtcgtttaattcttcattctgcatatcagacggcaatggatggatcataattgatgggaaatgcaatagtaattttttatcataaaagttgtaaagtaaataataaaacaataaatattgaactagtagtacgtatattgagcaatcagaaatgatgctggtacctcttatcacggtgaccgtagttgcgggaacaatattagtatgttatatattatatatttgtaggaaaaagatacgtactgtctataatgacaataaaattatcatgacaaaattaaaaaagataaagagttctaattccagcaaatctagtaaatcaactgatagcgaatcagactgggaggatcactgtagtgctatggaacaaaacaatgacgtagataatatttctaggaatgagatattggacgatgatagcttcgctggtagtttaatatgggataacgaatccaatgttatggcgcctagcacagaacacatttacgatagtgttgctggaagcacgctgctaataaataatgatcgtaatgaacagactatttatcagaacactacagtagtaattaatgaaacggagactgttgaagtacttaatgaagataccaaacagaatcctaactattcatccaatcctttcgtaaattataataaaaccagtatttgtagcaagtcaaatccgtttattacagaacttaacaataaatttagtgagaataatccgtttagacgagcacatagcgatgattatcttaataagcaagaacaagatcatgaacacgatgatatagaatcatcggtcgtatcattggtgtgattagtttcctttttataaaattgaagtaatatttagtattattgctgccgtcacgttgtacaaatggagatattccctgtattcggcatttctaaaattagcaattttattgctaataatgactgtagatattatatagatacagaacatcaaaaaattatatctgatgagatcaatagacagatggatgaaacggtacttcttaccaacatcttaagcgtagaagttgtaaatgacaatgagatgtaccatcttattcctcatagattatcgacgattatactctgtattagttctgtcggaggatgtgttatctctatagataatgacatcaatggcaaaaatattctaacctttcccattgatcatgctgtaatcatatccccactgagtaaatgtgtcgtagttagcaagggtcctacaaccatattggttgttaaagcggatatacctagcaaacgattggtaacatcgtttacaaacgacatactatatgtaaacaatctgtcactgattaattatttgccgttgtctgtattcattattagacgagtcaccgactatttggatagacacatatgcgatcagatatttgctaataataagtggtattcccttataaccatcgacgataagcaatatcctattccatcaaactgtataggtatgtcctctgccaagtacataaattctagcatcgagcaagatactttaatccatgtttgtaacctcgagcatccgttcgactcagtatacaaaaaaatgcagtcgtacaattctctacctatcaaggaacaaatattgtacggtagaattgataatataaatatgagcattagtatttctgtggattaatagatttctagtatggggatcattaatcatctctaatctctaaatacctcataaaacgaaaaaaaagctattatcaaatactgtacggaatggattcattctcttctctttttatgaaactctgttgtatatctactgataaaactggaagcaaaaaatctgatagaaagaataagaataagatcaaggattatatggaacacgattattataaaataacaatagttcctggttcctcttccacgtctactagctcgtggtattatacacatgcctagtaatagtctctttgcgttgacggaaagcagactagaaataacaggctaaaatgttcagacaccataatagttcccaacccagataataacagagttccatcaacacattcctttaaactcaatcccaaacccaaaaccgttaaaatgtatccggccaattgatagtagataatgaggtgtacagcgcatgataatttacacagtaaccaaaatgaaaatactttagtaattataagaaatatagacggtaatgtcatcatcaacaatccgataatatgcctgagagtaaacattgacggataaaacaaaaatgctccgcataactctatcatggcaataacacaaccaaatacttgtaagattcctaaattagtagaaaatacaacgaatatcgatgtataagtgatctcgagaaataataagaataaagtaatgcccgtaaagataaacatcaacattgtttggtaatcattaaaccaattagtatgaagttgaactaatttcacagtagattttattccagtgttatcctcgcatgtataagtacctggtaagatatctttatattccataatcaatgagacatcactatctgataacgaatgaagtctagcactagtatgccatttacttaatattgtcgtcttggaagttttattataagttaaaatatcatggttatccaatttccatctaatatactttgtcggattatctatagtacacggaataatgatggtatcattacatgctgtatactctatggtctttgtagttgttataacaaccaacgtatagaggtatatcaacgatattctaactcttgacattttttatttatttaaaatgatacctttgttatttattttattctattttgctaacggtattgaatggcataagtttgaaacgagtgaagaaataatttctacttacttattagacgacgtattatacacgggtgttaatggggcggtatacacattttcaaataataaactaaacaaaactggtttaactaataataattatataacaacatctataaaagtagaggatgcggataaggatacattagtatgcggaaccaataacggaaatcccaaatgttggaaaatagacggttcagacgacccaaaacatagaggtagaggatacgctccttatcaaaatagcaaagtaacgataatcagtcacaacggatgtgtactatctgacataaacatatcaaaagaaggaattaaacgatggagaagatttgacggaccatgtggttatgatttattcacggcggataacgtaattccaaaagatggtttacgaggagcattcgtcgataaagacggtacttatgacaaagtttacattcttttcactgatactatcggctcaaagagaattgtcaaaattccgtatatagcacaaatgtgcctaaacgacgaaggtggtccatcatcattgtctagtcatagatggtcgacgtttctcaaagtcgaattagaatgtgatatcgacggaagaagttatagacaaattattcattctagaactataaaaacagataatgatacgatactatatgtattcttcgatagtccttattccaagtccgcattatgtacctattctatgaataccattaaacaatctttttctacgtcaaaattggaaggatatacaaagcaattgccgtctccagctcctggtatatgtttaccagctggaaaagttgttccacataccacgtttgaagtcatagaacaatataatgtactagatgatattataaagcctttatctaaccaacctatcttcgaaggaccgtctggtgttaaatggttcgatataaaggagaaggaaaatgaacatcgggaatatagaatatacttcataaaagaaaattctatatattcgttcgatacaaaatctaaacaaactcgtagctcgcaagtcgatgcgcgactattttcagtaatggtaactgcgaaaccgttatttatagcagatatagggataggagtaggaatgccacaaatgaaaaaaatacttaaaatgtaatcttaatcgagtacaccacacgacaatgaacaaacataagacagattatgctggttatgcttgctgcgtaatatgcggtctaattgtcggaattatttttacagcgacactattaaaagttgtagaacgtaaattagttcatacaccattaatagataaaacgataaaagatgcatatattagagaagattgtcctactgactggataagctataataataaatgtatccatttatctactgatcgaaaaacctgggaggaaggacgtaatgcatgcaaagctctaaattcaaattcggatctaattaagatagagactccaaacgagttaagttttttaagaagccttagacgaggctattgggtaggagaatccgaaatattaaaccagacaaccccatataattttatagctaagaatgccacgaagaatggaactaaaaaacggaaatatatttgtagcacaacgaatactcccaaactgcattcgtgttacactatataacaattacactacatttttatcataccactacttcggttagatgttttagaaaaaaataaatatcgccgtaccgttcttgtttttataaaaataacaattaacaattatcaaattttttctttaatattttacgtggttgaccattcttggtggtaaaataatctcttagtgttggaatggaatgctgtttaatgtttccacactcatcgtatattttgacgtatgtagtcacatcgtttacgcaatagtcagactgtagttctatcatgcttcctacatcagaaggaggaacagttttaaagtctcttggttttaatctattaccgttagttttcatgaaatcctttgttttatccacttcacattttaaataaatgtccactatacattcttttgttaattttactagatcgtcatgggtcatagaatttataggttccgtagtccatggatccaaactagcaaacttcgcgtatacggtatcgcgattagtgtatacaccaactgtatgaaaattaagaaaacagtttaataaatcaacagaaatatttaatcctccgtttgatacagatgcgccatatttatggatttcggattcacacgttgtttgtctgaggtgttcgtctagtgttgcttctacgtaaacttcgattcccatatattctttattgtcagaatcgcataccgatttatcatcatacactgtttgaaaactaaatggtatacacatcaaaataataaataataacgagtacattctgcaatattgttatcgtaattggaaaaatagtgttcgagtgagttggattatgtgagtattggattgtatattttattttatattttgtaataagaataaaatgctaatgtcaagtttattccaatagatgtcttattaaaaacatatataataaataacaatggctgaatggcataaaattatcgaggatatctcaaaaaataataagttcgaggatgccgccatcgttgattacaagactacaaagaatgttctagctgctattcctaacagaacatttgccaagattaatccgggtgaaattattcctctcatcactaatcgtaatattctaaaacctcttattggtcagaaatattgtattgtatatactaactctctaatggatgagaacacgtatgctatggagttgcttactgggtacgcccctgtatctccgatcgttatagcgagaactcataccgcacttatatttttgatgggtaagccaacaacatccagacgtgacgtgtatagaacgtgtagagatcacgctacccgtgtacgtgcaactggtaattaaaataaaaagtaatattcatatgtagtgtcaattttaaatgatgatgatgaaatggataatatccatattgacgatgtcaataatgccggtattggcatacagttcatcgatttttagatttcattcagaggatgtggaattatgttatgggcatttgtattttgataggatctataatgtagtaaatataaaatataatccgcatattccatatagatataattttattaatcgcacgttaaccgtagatgaactagacgataatgtcttttttacacatggttattttttaaaacacaaatatggttcacttaatcctagtttgattgtctcattatcaggaaacttaaaatataatgatatacaatgctcagtaaatgtatcgtgtctcattaaaaatttggcaacgagtacatctactatattaacatctaaacataagacttattctctacatcggtccacgtgtattactataataggatacgattctattatatggtataaagatataaatgacaagtataatgacatctatgattttactgcaatatgtatgctaatagcgtctacattgatagtgaccatatacgtgtttaaaaaaataaaaatgaactcttaattatgctatgctattagaaatggataaaatcaaaattacggttgattcaaaaattggtaatgttgttaccatatcgtataacttggaaaagataactattgatgtcacacctaaaaagaaaaaagaaaaggatgtattattagcgcaatcagttgctgtcgaagaggcaaaagatgtcaaggtagaagaaaaaaatattatcgatattgaagatgacgatgatatggatgtagaaagcgcgtaatacgatctataaaaataagtatataaatactttttatttactgtactcttactgtgtagtggtgataccctactcgattatttttttaaaaaaaaaatacttattctgattcttctagccatttccgtgttcgtttgaatgccacatcgacgtcaaagataggggagtagttgaaatctagttctgcattgttggtacgcacctcaaatgtagtgttggatatcttcaacgtatagttgttgagtagtgatggttttctaaatagaattctcttcatatcattcttgcacgcgtacatttttagcatccatcttggaatcctagatccttgttctattcccaatggtttcatcaatagaagattaaacatatcgtacgaacacgatggagagtaatcgtagcaaaagtaagcatttcctttaatcttagatcccggatactggatatattttgcagccaacacgtgcatccatgcagcatttcctacatatacccggctatgcaccgcgtcatcatcgactgtacgatacataatgttaccgtgttgcttacattgctcgtaaaagactttcatcaatttgtctccttctccgtaaattccagtgggtcttaggcaacaagtatacaattttgctccattcatgattacggaattattggctttcataaccagttgctcggccatacgtttactttttgcgtatacatgtcctggtgatatatcataaagggtatgctcatggccgatgaatggatcaccgtgtttattgggtcctattgcttccatgctactagtatagatcaaatacttgattcctaggtccacacaagctgccaaaatagtctgtgttccataatagtttactttcatgatttcattatcggtgtattttccaaatacatccactagagcagccgtatgaataatcagatttaccccatctagcgcttctctcaccttatcaaagtcgtttatatcacattgtatatagtttataaccttaactttcgaggttattggttgtggatcttctacaatatctatgactctgatttcttgaacatcatctgcactaattaacagttttactatatacctgcctagaaatccggcaccaccagtaaccgcgtacacggccattgctgccactcataatatcagactacttattctattttactaaataatggctgtttgtataatagaccacgataatatcagaggagttatttactttgaaccagtccatggaaaagataaagttttaggatcagttattggattaaaatccggaacgtatagtttgataattcatcgttacggagatattagtcaaggatgtgattccataggcagtccagaaatatttatcggtaacatctttgtaaacagatatggtgtagcatatgtttatttagatacagatgtaaatatatttacaattattggaaaggcgttatctatttcaaaaaatgatcagagattagcgtgtggagttattggtatttcttacataaatgaaaagataatacattttcttacaattaacgagaatggcgtttgatatatcagttaatgcgtctaaaacaataaatgcattagtttacttttctactcagcaaaataaattagtcatacgtaatgaagttaatgatacacactacactgtcgaatttgatagggacaaagtagttgacacgtttatttcatataatagacataatgacaccatagagataagaggggtgcttccagaggaaactaatattggttgcgcggttagtatgacttacttgtataataagtatagttttaaactgattttagcagaatatataagacacagaaatactatatccggcaatatttattcggcattgatgacactagatgatttggctattaaacagtatggagacattgatctattatttaatgagaaacttaaagtagactccgattcgggactatttgactttgtcaactttgtaaaggatatgatatgttgtgattctagaatagtagtagctctatctagtctagtatctaaacattgggaattgacaaataaaaaatataggtgtatggcattagccgaacatatatctgatagtattccaatatctgagctatctagactacgatacaatctatgtaagtatctacgcggacacactgagagcatagaggataaatttgattattttgaagacgatgattcgtctacatgttctgccgtaaccgacagggaaacggatgtataattttttttatagcgtgaaggatatgataaaaaatataattgttgtatttatcccattccaatcaccttatatgattctgtaacacaataaaggagtcttatagatgtatagaggtcagatactggtttgataaactgtttattccacataagtatgtttgactttatggttagacccgcatactttaacaaatcactgaaaattggagttaggtattgacctctcagaatcagttgccgttctggaacattaaatgtattttttatgatatactccaacgcatttatgtgggcatacaacaagtcattactaatggaatattccaagagttttagttgtctagtatttaacaagagaagagatttcaacagactgtttatgaactcgaatgccgcctcattgtcgcttatattgatgatgtcgaattctcccaatatcatcaccgatgagtagctcatcttgttatcgggatccaagttttctaaagatgtcattaaaccctcgatcatgaatggatttatcatcatcgtttttatgttggacatgagcttagtccgtttgtccacatctatagaagatgatttctgaattatttcatatatctctctctttaactccaggaacttgtcaggatggtctactttaatatgttctcgtctaagagatgaaaatctttggatggttgcacgcgacttttctctaaaggatgacgttgcccaagatcctctcttaaatgaatccatcttatccttggacaagatggacagtctattttccttagatggtttaatatttttgttacccatgatctataaaggtagacctaatcgtctcggatgaccatatatttattttcagttttattatacgcataaattgtaaaaaatatgttaggtttacgaaaatgtctcgtggggcattaatcgtttttgaaggattggacaaatctggaaaaacaacacaatgtatgaacatcatggaatcaataccttcaaacacaataaaataccttaactttcctcagagatccactgtcactggaaagatgatagatgactatctaactcgtaaaaaaacctataatgatcatatagttaatctattattttgtgcaaatagatgggagtttgcatcttttatacaagaacaactagaacagggaattactttaatagttgatagatacgcattttctggagtagcgtatgccgccgctaaaggcgcgtcaatgactctcagtaagagttatgaatctggattgcctaaacccgacttagttatattcttggaatctggtagcaaagaaattaatagaaacgtcggtgaggaaatttatgaagatgttacattccaacaaaaggtattacaagaatataaaaaaatgattgaagaaggagatattcattggcaaattatttcttctgaattcgaggaagatgtaaagaaggagttgattaagaatatagttatagaggctatacacacggttactggaccagtggggcaactgtggatgtaatagtgaaattacattttttataaatagatgttagtacagtgttataaatggatgaagcatattactctggcaacttggaatcagtactcggatacgtgtccgatatgcataccgaactcgcatcaatatctcaattagttattgccaagatagaaactatagataatgatatattaaacaaggacattgtaaattttatcatgtgtagatcaaacttggataatccatttatctctttcctagatactgtatatactattatagatcaagagaactatcagactgagttgattaattcattagacgacaatgaaattatcgattgtatagttaataagtttatgagcttttataaggataacctagaaaatatagtagatgctatcattactctaaaatatataatgaataatccagattttaaaactacgtatgccgaagtactcggttccagaatagccgatatagatattaaacaagtgatacgtaagaatatactacaattgtctaataatatccgcgaacgatatttgtgaaaatattaaaaaaaaatactttttttattaaatgacgtcttttcgtgaatttagaaaattatgctgtgctatatatcacgcatcaggatataaagaaaaatctaaattaattagagactttataacagatagggatgataaatatttgatcattaagctattgcttcccggattagacgatagaatttataacatgaacgataaacaaattataaaattatatagtataatatttaaacaatctcaggaagatatgctacaagatttaggatacggatatataggagacactattaggactttcttcaaagagaacacagaaatccgtccacgagataaaagcattttaactttagaagaagtggatagttttttaactacgttatcatccgtaactaaagaatcgcatcaaataaaattattgactgatgtagcatctgtttgtacatgtaatgatttaaaatgtgtagtcatgcttattgataaagatctaaaaattaaagcgggtcctcggtacgtacttaacgctattagtcctaatgcctatgatgtgtttagaaaatctaataacttgaaagagataatagaaaattcatctaaacaaaatctagactctatatctatttctgttatgactccaattaatcccatgttagcggaatcgtgtgattctgtcaataaggcgtttaaaaaatttccatcaggaatgtttgcggaagtcaaatacgatggtgaaagagtacaagttcataaaaataataacgagtttgccttctttagtagaaacatgaaaccagtactctctcataaagtggattatctcaaagaatacataccgaaagcatttaaaaaagctacgtctatcgtattggattctgaaattgttcttgtagacgaacataatgtaccgctcccgtttggaagtttaggtatacacaaaaagaaagaatataaaaactctaacatgtgtttgttcgtgtttgactgtttgtactttgatggattcgatatgacggacattccattgtacgaacgaagatcttttctcaaagatgttatggttgaaatacccaatagaatagtattctcagagttgacgaatattagtaacgagtctcagttaactgacgtattggatgatgcactaacgagaaaattagaaggattggtcttaaaagatattaatggagtatacgaaccgggaaagagaagatggttaaaaataaagcgagactatttgaacgagggttccatggcagattctgccgatttagtagtactaggtgcctactatggtaaaggagcaaagggtggtatcatggcagtctttctaatgggttgttacgacgatgaatccggtaaatggaagacggttaccaagtgttcaggacacgatgataatacgttaagggagttgcaagaccaattaaagatgattaaaattaacaaggatcccaaaaaaattccagagtggttagtagttaataaaatctatattcccgattttgtagtagaggatccgaaacaatctcagatatgggaaatttcaggagcagagtttacatcttccaagtcccataccgcaaatggaatatccattagatttcctagatttactaggataagagaggataaaacgtggaaagaatctactcatctaaacgatttagtaaacttgactaaatcttaatagttacatacaaactgaaaattaaaataacactatttagttggtggtcgccatggatggtgttattgtatactgtctaaacgcgctagtaaaacatggcgaggaaataaatcatataaaaaatgatttcatgattaaaccatgttgtgaaagagtttgtgaaaaagtcaagaacgttcacattggcggacaatctaaaaacaatacagtgattgcagatttgccatatatggataatgcggtatccgatgtatgcaattcactgtataaaaagaatgtatcaagaatatccagatttgctaatttgataaagatagatgacgatgacaagactcctactggtgtatataattattttaaacctaaagatgccattcctgttatcatatctataggaaaggataaagatgtctgtgaactattaatctcatcagacatatcgtgtgcatgcgtggagttaaattcatatcacgtagccattcttcccatggatgtttccttttttaccaaaggaaatgcatcattgattattctcctgtttgatttctctatcgatgcggcacctctcttaagaagtgtaaccgataataatgttattatatctagacaccagcgtctacatgacgagcttccgagttccaattggttcaagttttacataagtataaagtccgactattgttctatattatatatggttgttgatggatctgtgatgcatgcgatagctgataatagaactcacgcaattattagcaaaaatatattagacaatactacgattaacgatgagtgtagatgctgttattttgaaccacagattaggattcttgatagagatgagatgctcaatggatcatcgtgtgatatgaacagacattgtattatgatgaatttacctgatgtaggcgaatttggatctagtatgttggggaaatatgaacctgacatgattaagattgctctttcggtggctggtaatttaataagaaatcgagactacattcccgggagacgaggatatagctactacgtttacggtatagcctctagataatttttttaagcacgaaataaaaaacataattttaaaccaatctatttcatactattttgtgtgatcaccatggacataaagatagatattagtatttctggtgataaatttacggtgactactaggagggaaaatgaagaaagaaaaaaatatctacctctccaaaaagaaaaaactactgatgttatcaaacctgattatcttgagtacgatgacttgttagatagagatgagatgtttactattctagaggaatattttatgtacagaggtctattaggcctcagaataaaatatggacgactctttaacgaaattaaaaaattcgacaatgatgcggaagaacaattcggtactatagaagaactcaagcagaaacttagattaaattctgaagagggagcagataactttatagattatataaaggtacaaaaacaggatatcgtcaaacttactgtatacgattgcatatctatgataggattgtgtgcatgcgtggtagatgtttggagaaatgagaaactgttttctagatggaaatattgtttacgagcgattaaactgtttattgatgatcacatgcttgataagataaaatctatactgcagaatagactagtatatgtggaaatgtcatagaaagttaaaagttaatgagagcaaaaatatataaggttgtattccatatttgttatttttttctgtaatagttagaaaaatacattcgatggtctatctatcagattattatgtgttataaggtactttttctcataataaactagagtatgagtaagatagtgtttttcaaaacatataaatctaaaattgatggatgagatatacagctattaatttcgaaaatatattttaatctgataactttaaacatggatttttaatggtggtttaacgttttaaaaaaagattttgttattgtagtatatgataatattaaaagatggatataaagaatttgctgactgcatgtactattttttacattactacattggctacggcagatatacctacttcgtcactgccacacgctccggtaaacggggcatgtgacgagggagaatatcttgataagaggcataatcaatgttgtaatcagtgtccacctggagaatttgccaaggttagatgtaatggtaacgataacacaaaatgtgaacgctgcccacctcatacatataccgcaatccccaattactctaatggatgtcatcaatgtagaaaatgcccaacaggatcatttgataaggtaaagtgtaccggaacacagaacagtaaatgttcgtgtcttcctggttggtattgcgctactgattcttcacagactgaagattgtcgagattgtataccaaaaaggagatgtccatgcggatactttggtggaatagatgaacaaggaaatcctatttgtaaatcgtgttgtgttggtgaatattgcgactacctacgtaattatagacttgatccatttcctccatgcaaactatctaaatgtaattaattatgattttgatgataatgttaccatacattatatcgctacttggttagtgtattattcagtatgaagacctattaataattacttatcttttgacgatcttgttataattataatataaaaatacttatggcatagtaactcataattgctgacgcgataaattcgtaataatctgttttgttcaaatttttataaggaatctacaggcataaaaataaaaatataatttataatatactcttacagcgcgccatcatgaataacagcagtgaattgattgctgttattaatggatttagaaatagtggacgattttgtgatattaatatagttattaatgatgaaaggataaacgctcacagactcatcctatctggagcctccgaatatttttccattctgttttccaataattttatcgattctaatgaatacgaagttaatctaagtcatttagattatcaaagtgttaacgatttgatcgattacatttatgggatacctttgagcctaactaacgataacgtgaaatatattctttcaaccgctgattttttacaaattggatctgctattacggagtgtgaaaattacatacttaaaaatctttgttctagaaactgtatcgatttctacatatacgctgataaatataataacaagaaaatagaatcagcgtcgtttaacacaatattacaaaatattttgagactcatcaacgatgaaaactttaaatacttaacagaggaatcaatgataaaaattttaagcgatgatatgttaaatataaaaaatgaggatttcgccccactaattctcattaaatggttagagagtactcaacaaccatgcaccgtcgagttacttaaatgcctcagaatatcattgctttccccacaagttataaaatcactttatagtcatcgactggttagttcaatctacgaatgtataacattcttaaacaatatagcattcttggatgaatcatttcctagataccatagcatcgagttgatatctatcggtataagtaattcgcatgataagatttccataaactgctacaatcataaaaaaaatacatgggaaatgatatcttcacgtagatataggtgtagtttcgcagtggccgtcctggataatattatctatatgatgggtggatatgatcagtccccgtatagaagttcaaaggttatagcgtacaatacatgtacaaattcttggatatatgatataccagagctaaaatatcctcgttctaattgtgggggactggctgatgacgaatacatttattgtataggcggcatacgcgatcaggattcatcgttgacatctagtattgatagatggaagccatcaaaaccatattggcagaagtatgctaaaatgcgcgaaccaaaatgtgatatgggggttgcgatgttaaacggattaatatatgttataggtggaatcgttaaaggtgacacgtgtaccgacgcactagagagtttatcagaagatggatggatgaagcatcaacgtcttccaataaaaatgtccaatatgtcgacgattgttcatgatggcaagatttatatatctggaggttacaacaatagtagtgtagttaatgtaatatcgaatctagtccttagctataattcgatatatgatgaatggaccaaattatcatcattaaacattcctagaattaatcccgctctatggtcagcgcataataaattatatgtaggaggaggaatatctgatgatgttcgaactaatacatctgagacatacgacaaagaaaaagattgttggacattggataatggtcacgtgttaccacgcaattatataatgtataaatgcgaaccgattaaacataaatatccattggaaaaaacacagtacacgaatgattttctaaagtatttggaaagttttataggtagttgatagaacaaaatacataattttgtaaaaataaatcactttttatactaatatgacacgattaccaatacttttgttactaatatcattagtatacgctacaccttttcctcagacatctaaaaaaataggtgatgatgcaactctatcatgtaatcgaaataatacaaatgactacgttgttatgagtgcttggtataaggagcccaattccattattcttttagctgctaaaagcgacgtcttgtattttgataattataccaaggataaaatatcttacgactctccatacgatgatctagttacaactatcacaattaaatcattgactgctagagatgccggtacttatgtatgtgcattctttatgacatcaactacaaatgacactgataaagtagattatgaagaatactccacagagttgattgtaaatacagatagtgaatcgactatagacataatactatctggatctacacattcaccggaaactagttctgagaaacctgattatatagataattctaattgctcgtcggtattcgaaatctaagctcttttttttttttttttttttggcatataaataagtcgaccaccatggtgggtgaggatagcgtgctgatcaccgagaacatgcacatgaaactgtacatggagggcaccgtgaacgaccaccacttcaagtgcacatccgagggcgaaggcaagccctacgagggcacccagaccatgaagatcaaggtggtcgagggcggccctctccccttcgccttcgacatcctggctaccagcttcatgtacggcagcaaaacctttatcaaccacacccagggcatccccgacttctttaagcagtccttccctgagggcttcacatgggagaggatcaccacatacgaagacgggggcgtgctgaccgctacccaggacaccagcctccagaacggctgcctcatctacaacgtcaagatcaacggggtgaacttcccatccaacggccctgtgatgcagaagaaaacactcggctgggaggccagcaccgagatgctgtaccccgctgacagcggcctgagaggccatagccagatggccctgaagctcgtgggcgggggctacctgcactgctccctcaagaccacatacagatccaagaaacccgctaagaacctcaagatgcccggcttctacttcgtggacaggagactggaaagaatcaaggaggccgacaaagagacctacgtcgagcagcacgagatggctgtggccaggtactgcgacctgcctagcaaactggggcacagctgattaattaatttttatcgatctaattcaacaatgtctggagagcttcgcaggatcccgactccggaaccaattactgataaagaagatcatacagttacagacactgtctcatacactacagtaagtacatcatctggaattgtcactactaaatcaaccaccgatgatgcggatctttatgatacgtacaatgataatgatacagtaccaccaactactgtaggcggtagtacaacctctattagcaattataaaaccaaggactttgtagaaatatttggtattaccgcattaattatattgtcggccgtggcaattttctgtattacatattatatatataataaacgttcacgtaaatacaaaacagagaacaaagtctagatttttgacttacataaatgtctgggatagtaaaatctatcatattgagcggaccatctggtttaggaaagacagccatagccaaaagactatgggaatatatttggatttgtggtgtcccataccactagatttcctcgtcctatggaacgagaaggtgttgattaccattacgttaacagagaggccatctggaagggaatagccgccggaaactttctagaacatactgagtttttaggaaatatttacggaacttctaaaacagctgtgaatacagcggctattaataatcgtatttgtgtgatggatctaaacatcgacggtgttagaagtcttaaaaatacgtacctaatgccttactcggtgtatataagacctacctctcttaaaatggttgagaccaagcttcgtcgtagaaacactgaagctaacgatgagattcatcgtcgtgtgatgttggcaaaaactgacatggatgaggcaggtgaagccggtctattcgacactattatcattgaagatgatgtgaatttagcatatagtaagttaattcagatactacaggaccgtattagaatgtattttaacactaattagagacttaagacttaaaacttgataattaataatataactcgtttttatatgtgtctatttcaacgtctaatgtattagttaaatattaaaacttaccacgtaaaacttaaaatttaaaatgatatttcattgacagatagatcacacattatgaactttcaaggacttgtgttaactgacaattgcaaaaatcaatgggtcgttggaccattaataggaaaaggtggattcggtagtatttatactactaatgacaataattatgtagtaaaaatagagcccaaagctaacggatcattatttaccgaacaggcattttatactagagtacttaaaccatccgttatcgaagaatggaaaaaatctcacaatataaagcacgtaggtcttatcacgtgcaaggcatttggtctatacaaatccattaatgtggaatatcgattcttggtaattaatagattaggtgcagatctagatgcggtgatcagagccaataataatagactaccaaaaaggtcggtgatgttgatcggaatcgaaatcttaaataccatacaatttatgcacgagcaaggatattctcacggagatattaaagcgagtaatatagtcttagatcaaatagataagaataaattatatctagtggattacggattggtttctaaattcatgtctaatggcgaacatgttccatttataagaaatccaaataaaatggataacggtactctagaatttacacctatagattcgcataaaggatacgttgtatctagacgtggagatctagaaacacttggatattgtatgattagatggttgggaggtatcttaccatggactaagatatctgaaacaaagaattgtgcattagtaagtgccacaaaacagaaatatgttaacaatactgcgactttgttaatgaccagtttgcaatatgcacctagagaattgctgcaatatattaccatggtaaactctttgacatattttgaggaacccaattacgacaagtttcggcacatattaatgcagggtgtatattattaagtgtggtgtttggtcgataaaaattaaaaaataacttaatttattattgatctcgtgtgtacaaccgaaatcatggcgatgttttacgcacacgctctcggtgggtacgacgagaatcttcatgcctttcctggaatatcatcgactgttgccaatgatgtcaggaaatattctgttgtgtcagtttataataacaagtatgacattgtaaaagacaaatatatgtggtgttacagtcaggtgaacaagagatatattggagcactgctgcctatgtttgagtgcaatgaatatctacaaattggaaatccgatccatgatcaagaaggaaatcaaatctctatcatcacatatcgccacaaaaactactatgctctaagcggaatcgggtacgagagtctagacttgtgtttggaaggagtagggattcatcatcacgtacttgaaacaggaaacgctgtatatggaaaagttcaacatgattattctactatcaaagagaaggccaaagaaatgagtgcacttagtccaggacctatcatcgattaccacgtctggataggagattgtatctgtcaagttactgctgtggacgtacatggaaaggaaattatgaaaatgagattcaaaaagggtgcggtgcttccgatcccaaatctggtaaaagttaaacttggggagaatgatacagaaaatctttcttctactatatcggcggcaccatcgaggtaaccacctctctggaagacagcgtgaatcatgtactcatgaaacgtttggaaactatacgccatatgtggtctgttgtatatgatcattttgatattgtgaatggtaaagaatgctgttatgtgcatacgcattcatctaatcaaaatcctataccgagtactgtaaaaacaaatttgtacatgaagactatgggatcatgcattcaaatggattccatggaagctctagagtatcttagcgaactgaaggaatcaggtggatggagtcccagaccagaaatgcaggaatttgaatatccagatggagtggaagacactgaatcaattgagagattggcagaggagttcttcaatagatcagaacttcaggctggtgaatcagtcaaatttggtaattctattaattgttaaacatacatctgtttcagctaagcaactaagaacacgtatacggcagcagcttccttctatactctcatcttttaccaacacaaagggtggatatttgttcattggagttgataataatacacacaaagtatttggattcacggtgggttacgactacctcagactgatagagaatgatatagaaaagcatatcaaaagacttcgtgttgtgcatttctgtgagaagaaagaggacatcaagtacgcgtgtcgattcatcaaggtatataaacctggggatgagactacctcgacatacgtgtgcgctatcaaagtggaaagatgctgttgtgctgtgtttgcagattggccagaatcatggtatatggatactaatggtatcaagaagtattctccagatgaatgggtgtcacatataaaattttaattaatgtaactatagagaacaaataataaggttgtaatatcatatagacaataactaacaattaattagtaactgttatctcttttttaactaaccaactaactatatacctattaatacatcgtaattatagttcttaacatctattaatcattaattcgcttctttaattttttataaactaacattgttaattgaaaagggataacatgttacagaatataaattatatatggatttttttaaaaaggaaatacttgactggagtatatatttatctcttcattatatagcacgcgtgttttccaatttttccacatcccatataatacaggattataatctcgttcgaacatacgagaaagtggataaaacaatagttgattttttatctaggttgccaaatttattccatattttagaatatggggaaaatattctacatatttattctatggatgatgctaatacgaatattataattttttttctagatagagtattaaatattaataagaacgggtcatttatacacaatctcgggttatcatcatccattaatataaaagaatatgtatatcaattagttaataatgatcatccagataataggataagactaatgcttgaaaatggacgtagaacaagacattttttgtcctatatatcagatacagttaatatctatatatgtattttaataaatcatggattttatatagatgccgaagacagttacggttgtacattattacatagatgtatatatcactataagaaatcagaatcagaatcatacaatgaattaattaagatattgttaaataatggatcagatgtagataaaaaagatacgtacggaaacacaccttttatcctattatgtaaacacgatatcaacaacgtggaattgtttgagatatgtttagagaatgctaatatagactctgtagactttaatagatatacacctcttcattatgtctcatgtcgtaataaatatgattttgtaaagttattaatttctaaaggagcaaatgttaatgcgcgtaataaattcggaactactccattttattgtggaattatacacggtatctcgcttataaaactatatttggaatcagacacagagttagaaatagataatgaacatatagttcgtcatttaataatttttgatgctgttgaatctttagattatctattatccagaggagttattgatattaactatcgtactatatacaacgaaacatctatttacgacgctgtcagttataatgcgtataatacgttggtctatctattaaacaaaaatggtgattttgagacgattactactagtggatgtacatgtatttcggaagcagtcgcaaacaacaacaaaataataatggaagtactattgtctaaacgaccatctttgaaaattatgatacagtctatgatagcaattactaaacataaacagcataatgcagatttattgaaaatgtgtataaaatatactgcgtgtatgaccgattatgatactcttatagatgtacagtcgctacagcaatataaatggtatattttaagatgtttcgatgaaatagatatcatgaagagatgttatataaaaaataaaactgtattccaattagttttttgtatcaaagacattaatactttaatgagatacggtaaacatccttctttcgtgaaatgcactagtctcgacgtatacggaagtcgtgtacgtaatatcatagcatctattagatatcgtcagagattaattagtctattatccaagaagctggatcctggagataaatggtcgtgttttcctaacgaaataaaatataaaatattggaaaactttaacgataacgaactatccacatatctaaaaatcttataaacattattaaaatataaaatctaagtaggataaaatcacactacatcattgtttccttttagtgctcgacagtgtatactatttttaacgctcataaataaaaatgaaaacgatttccgttgttacgttgttatgcgtactacctgctgttgtttattcaacatgtactgtacccactatgaataacgctaaattaacgtctaccgaaacatcgtttaatgataaccagaaagttacgtttacatgtgatcagggatatcattctttggatccaaatgctgtctgtgaaacagataaatggaaatacgaaaatccatgcaaaaaaatgtgcacagtttctgattatgtctctgaactatataataaaccgctatacgaagtgaattccaccatgacactaagttgcaacggcgaaacaaaatattttcgttgcgaagaaaaaaatggaaatacttcttggaatgatactgttacgtgtcctaatgcggaatgtcaacctcttcaattagaacacggatcgtgtcaaccagttaaagaaaaatactcatttggggaatatatgactatcaactgtgatgttggatatgaggttattggtgcttcgtacataagttgtacagctaattcttggaatgttattccatcatgtcaacaaaaatgtgatatgccgtctctatctaacggattaatttccggatctacattttctatcggtggcgttatacatcttagttgtaaaagtggttttacactaacggggtctccatcatccacatgtatcgacggtaaatggaatcccatactcccaatatgtgtacgaactaacgaaaaatttgatccagtggatgatggtcccgacgatgagacagatttgagcaaactctcgaaagacgttgtacaatatgaacaagaaatagaatcgttagaagcaacttatcatataatcatagtggcgttgacaattatgggcgtcatatttttaatctccgttatagtattagtttgttcctgtgacaaaaataatgaccaatataagttccataaattgctaccgtaaatataaatccgttaaaataattaataatttaataacaaacaagtatcaaaagattaaagacttatagctagaatcaattgagatgtcttcttcagtggatgttgatatctacgatgccgttagagcatttttactcaggcactattataacaagagatttattgtgtatggaagaagtaacgccatattacataatatatacaggctatttacaagatgcgccgttataccgttcgatgatatagtacgtactatgccaaatgaatcacgtgttaaacaatgggtgatggatacacttaatggtataatgatgaatgaacgcgatgtttctgtaagcgttggcaccggaatactattcatggaaatgtttttcgattacaataaaaatagtatcaacaatcaactaatgtatgatataattaatagcgtatctataattctagctaatgagagatatagaagcgcttttaacgacgatggtatatacatccgtagaaatatgattaacaagttgtacggatacgcatctctaactactattggcacgatcgctggaggtgtttgttattatctgttgatgcatctagttagtttgtataaataattatttcaatatactagttaaaattttaagattttaaatgtataaaaaactaataacgtttttatttgtaataggtgcattagcatcctattcgaataatgagtacactccgtttaataaactgagtgtaaaactctatatagatggagtagataatatagaaaattcatatactgatgataataatgaattggtgttaaattttaaagagtacacaatttctattattacagagtcatgcgacgtcggatttgattccatagatatagatgttataaacgactataaaattattgatatgtataccattgactcgtctactattcaacgcagaggtcacacgtgtagaatatctaccaaattatcatgccattatgataagtacccttatattcacaaatatgatggtgatgagcgacaatattctattactgcagagggaaaatgctataaaggaataaaatatgaaataagtatgatcaacgatgatactctattgagaaaacatactcttaaaattggatctacttatatatttgatcgtcatggacatagtaatacatattattcaaaatatgatttttaaaaatttaaaatatattatcacttcagtgacagtagtcaaataacaaacaacaccatgagatatattataattctcgcagttttgttcattaatagtatacatgctaaaataactagttataagtttgaatccgtcaattttgattccaaaattgaatggactggggatggtctatacaatatatcccttaaaaattatggcatcaagacgtggcaaacaatgtatacaaatgtaccagaaggaacatacgacatatccgcatttccaaagaatgatttcgtatctttctgggttaaatttgaacaaggcgattataaagtggaagagtattgtacgggactatgcgtcgaagtaaaaattggaccaccgactgtaacattgactgaatacgacgaccatatcaatttgtacatcgagcatccgtatgctactagaggtagcaaaaagattcctatttacaaacgcggtgacatgtgtgatatctacttgttgtatacggctaacttcacattcggagattctaaagaaccagtaccatatgatatcgatgactacgattgcacgtctacaggttgcagcatagactttgtcacaacagaaaaagtgtgcgtgacagcacagggagccacagaagggtttctcgaaaaaattactccatggagttcgaaagtatgtctgacacctaaaaagagtgtatatacatgcgcaattagatccaaagaagatgttcccaatttcaaggacaaaatggccagagttatcaagagaaaatttaatacacagtctcaatcttatttaactaaatttctcggtagcacatcaaatgatgttaccacttttcttagcatgcttaacttgactaaatattcataactaatttttattaatgatacaaaaacgaaataaaactgcatattatacactggttaacgcccttataggctctaaccattttcaagatgaggtccctgattatagtccttctgttcccctctatcatctactccatgtctattagacgatgtgagaagactgaagaggaaacatggggattgaaaatagggttgtgtataattgccaaagatttctatcccgaaagaactgattgcagtgttcatctcccaactgcaagtgaaggattgataactgaaggcaatggattcagggatatacgaaacaccgataaattataaaaaaagcaatgtgtccgctgtttccgttaataatactattttcgtaactggcggattattcataaataactctaatagcacgatcgtggttaacaatatggaaaaacttgacatttataaagacaaacaatggtcgattatagaaatgcctatggctagggtatatcacggcattgactcgacatttggaatgttatattttgccggaggtctatccgttaccgaacaatatggtaatttagagaaaaacaacgagatatcttgttacaatcctagaacgaataagtggtttgatatttcatatactatttataagatatccatatcatcattgtgtaaactaaataacgtcttctatgtatttagtaaggacattggatatgtggaaaagtatgatggtgcatggaagttagtacatgatcgtctccccgctataaaggcattatcaacttctccttattgattgaaaatgaaaatataaatagtttttatgtatagcagtattaccctatagttttattgcttactactaacatggatacagatgttacaaatgtagaagatatcataaatgaaatagatagagagaaagaagaaatactaaaaaatgtagaaattgaaaataataaaaacattaacaagaatcatcccaatgaatatattagagaagcactcgttattaataccagtagtaatagtgattccattgataaagaagttatagaatgtatcagtcacgatgtaggaatatagatcatatctactaatttttataatcgatacaaaacataaaaaacaactcgttattacatagcaggcatggaatccttcaagtattgttttgataacgatggcaagaaatggattatcggaaatactttatattctggtaattcaatactctataaggtcagaaaaaatttcactagttcgttctacaattacgtaatgaagatagatcacaaatcacacaagccattgttgtctgaaatacgattctatatatctgtattggatcctttgactatcgacaactggacacgggaacgtggtataaagtatttggctattccagatctgtatggaattggagaaaccgatgattatatgttcttcgttataaagaattcgggaagagtattcgccccaaaggatactgaatcagtcttcgaagcatgcgtcactatgataaacacgttagagtttatacactctcgaggatttacccatggaaaaatagaaccgaggaatatactgattagaaataaacgtctttcactaattgactattctagaactaacaaactatacaagagtggaaactcacatatagattacaacgaggacatgataacttcaggaaatatcaattatatgtgtgtagacaatcatcttggagcaacagtttcaagacgaggagatttagaaatgttgggatattgcatgatagaatggttcggtggcaaacttccatggaaaaacgaaagtagtataaaagtaataaaacaaaaaaaagaatataaaaaatttatagctactttctttgaggactgttttcctgaaggaaatgaacctctggaattagttagatatatagaattagtatacacgttagattattctcaaactcctaattatgacagactacgtaaactgtttatacaagattgaaattatattcttttttttatagagtgtggtagtgttacggatatctaatattaatattagactatctctatcgcgctacacgaccaatatcgattactatggatatcttctatgaaaggagagaatgtatttatttctccagcgtcaatctcgtcagtattgacaatactgtattatggagctaatggatccactgctgaacagctatcaaaatatgtagaaacggaggagaacacggataaggttagcgctcagaatatctcattcaaatccatgaataaagtatatgggcgatattctgccgtgtttaaagattcctttttgagaaaaattggcgataagtttcaaactgttgacttcactgattgtcgcactatagatgcaatcaacaagtgtgtagatatctttactgaggggaaaatcaatccactattggatgaaccattgtctcctagcaattagtgccgtatactttaaagcaaaatggttgacgccattcgaaaaggaatttaccagtgattatcccttttacgtatctccgacggaaatggtagacgtaagtatgatgtctatgtacggcaaggcatttaatcacgcatctgtaaaagaatcattcggcaacttttcaatcatagaactgccatatgttggagatactagtatgatggtcattcttccagacaagattgatggattagaatccatagaacaaaatctaacagatacaaattttaagaaatggtgtgactttatggatgctatgtttatagatgttcacattcccaagtttaaggtaacaggctcgtataatctggtggatactctagtaaagtcaggactgacagaggtgttcggttcaactggagattatagcaatatgtgtaatttagatgtgagtgtcgacgctatgatccacaaaacgtatatagatgtcaatgaagagtatacagaagcagctgcagcaacttctgtactagtggcagactgtgcatcaacaattacaaatgagttctgtgcagatcatccgttcatctatgtgattaggcatgttgatggaaaaattcttttcgttggtagatattgctctccgacaactaattgttaaccattttttttaaaaaaaatagaaaaaacatgtggtattagtgcaggtcgttgttcttccaattgcaattggtaagatgacggccaactttagtacccacgtcttttcaccacagcactgtggatgtgacagactgaccagtattgatgacgtcaaacaatgtttgactgaatatatttattggtcgtcctatgcataccgcaacaggcaatgcgctggacaattgtattccacactcctctcttttagagatgatgcggaattagtgttcatcgacattcgcgagctggtaaaaaatatgccgtgggatgatgtcaaagattgtacagaaatcatccgttgttatataccggatgagcaaaaaaccatcagagagatttcggccatcatcggactttgtgcatatgctgctacttactggggaggtgaagaccatcccactagtaacagtctgaacgcattgtttgtgatgcttgagatgctaaattacgtggattataacatcatattccggcgtatgaattgatgagttgtacatcttgacattttctttcttctcttctccctttcttctcttctcccttcctccctcttctccctttcccagaaacaaacttttttacccactataaaataaaatgagtatactacctattatatttcttcctatatttttttattcttcattcgttcagacttttaacgcgtctgaatgtatcgacaaagggcaatattttgcatcattcatggagttagaaaacgagccagtaatcttaccatgtcctcaaataaatacgctatcatccggatataatatattagatattttatgggaaaaacgaggagcggataatgatagaattataccgatagataatggtagcaatatgctaattctgaacccgacacaatcagactctggtatttatatatgcattaccacgaacgaaacctactgtgacatgatgtcgttaaatttgacaatcgtgtctgtctcagaatcaaatatagatcttatctcgtatccacaaatagtaaatgagagatctactggcgaaatggtatgtcccaatattaatgcatttattgctagtaacgtaaacgcagatattatatggagcggacatcgacgccttagaaataagagacttaaacaacggacacctggaattattaccatagaagatgttagaaaaaatgatgctggttattatacatgtgttttagaatatatatacggtggcaaaacatataacgtaaccagaattgtaaaattagaggtacgggatagaataataccttctactatgcaattaccagatggcattgtaacttcaataggtagtaatttgactattgcatgcagagtatcgttgagacctcccacaacggacaccgacgtcttttggataagtaatggtatgtattacgaagaagatgatggggacggaaacggtagaataagtgtagcaaataaaatctatatgaccgataagagacgtgttattacatcccggttaaacattaatcctgtcaaggaagaagatgctacaacgtttacgtgtatggcgtttactattcctagcatcagcaaaacagttactgttagtataacgtgaatgtatgttgttacatttccatgtcaattgagtttataagaatttttatacattatcttccaacaaacaattgacgaacgtattgctatgattaactcccacgatactatgcatattattaatcattaacttgcagactatacctagtgctattttgacatactcgtgttcttgtgtaattgcggtatctatattattaaagtacgtaaatctagctatagttttattatttaattttagataatataccgtctccttatttttaaaaattgccacatcctttattaaatcatgaatgggaatttctatgtcatcgttagtatattgtgaacaacaagagcagatatctataggaaagggtggaatgcgatacattgatctatgtagttttaaaacacacgcgaactttgaagaatttatataaatcattccatcgatacatccttctatgttgacatgtatatatccaggaattcttttattaatgtcaggaaatgtataaactaaaacattgcccgaaagcggtgcctctatctgcgttatatccgttcttaacttacaaaatgtaaccaatacctttgcatgacttgttttgttcggcaacgttagtttaaacttgacgaatggattaattacaatagcatgatccgcgcatctattaagtttttttactttaacgcccttgtatgtttttacagagactttatctaaatttctagtgcttgtatgtgttataaatataacgggatatagaaccgaatcacctaccttagatacccaattacattttatcagatccagataataaacaaattttgtcgccctaactaattctatattgttatatattttacaattggttatgatatcatgtaataacttggagtctaacgcgcatcgtcgtacgtttatacaattgtgatttagtgtagtatatctacacatgtatttttccgcactatagtattctggactagtgataaaactatcgttatatctgtcttcaatgaactcatcgagatattgctctctgtcatattcatacacctgcataaactttctagacatcttacaatccgtgttattttaggatcatatttacatatttacgggtatatcaaagatgttagattagttaatgggaatcgtctataataatgaatattaaacaattatatgaggacttttaccacaaagcatcataaaaatgagtcgtcgtctgatttatgttttaaatatcaaccgcaaatcaactcataaaatacaagagaatgaaatatatacatattttagtcattgcaatatagaccatacttctacagaacttgattttgtagttaaaaactatgatctaaacagacgacaacctgtaactgggtatactgcactacactgctatttgtataataattactttacaaacgatgtactgaagatattattaaatcatgacgtaaatgtaacgatgaaaaccagtagcggacgtatgcctgtttatatattgcttactagatgttgtaatatttcacatgatgtagtgatagatatgatagacaaagataaaaaccacttattacatagagactattccaacctattactagagtatataaaatctcgttacatgttattgaaggaagaggatatcgatgagaacatagtatccactttattagataagggaatcgatcctaactttaaacaagacggatatacagcgttacattattattatttgtgtctcgcacacgtttataaactaggtgagtgtagaaaaccgataacgataaaaaaggccaagcgaattatttctttgtttatacaacatggagctaatctaaacgcgttagataattgtggtaatacaccattccatttgtatcttagtattgaaatgtgtaataatattcatatgactaaaatgctgttgacttttaatccgaatttcaaaatatgtaataatcatggattaacgcctatactatgttatataacttccgactacatacaacacgatattcttgttatgttaatacatcactatgaaacaaatgttggagaaatgccgatagatgagcgtcgtatgatcgtattcgagtttatcaaaacatattctacacgtccggcagattcgataacttatttgatgaataggtttaaaaatataaatatttatacccgctatgaaggaaagacattattacacgtagcatgtgaatataataatacacaagtaatagattatcttatacgtatcaacggagatataaatgcgttaaccgacaataacaaacacgctacacaactcattatagataacaaagaaaattccccatataccattaattgtttactgtatatacttagatatattgtagataagaatgtgataagatcgttggtggatcaacttccatctctacctatcttcgatataaaatcatttgagaaattcatatcctactgtatacttttagatgacacattttacgataggcacgttaagaatcgcgattctaaaacgtatcgatacgcattttcaaaatacatgtcgtttgataaatacgatggtataataactaaatgtcacgacgaaacaatgttactcaaactgtccactgttctagacactacactatatgcagttttaagatgtcataattcgagaaagttaagaagatacctcaacgagttaaaaaaatataataacgataagtcctttaaaatatattctaatattatgaatgagagataccttaatgtatattataaagatatgtacgtgtcaaaggtatatgataaactatttcctgttttcacagataaaaattgtctactaacattactaccttcagaaattatatacgaaatattatacatgctgacaattaacgatctttataatatatcgtatccacctaccaaagtatagttgtatttttctcatgcgatgtgtgtaaaaaaactgatattatataaatattttagtgccgtataataaagatgacgatgaaaatgatggtacatatatatttcgtatcattattgttattgctattccacagttacgccatagacatcgaaaatgaaatcacagaattcttcaataaaatgagagatactctaccagctaaagactctaaatggttgaatccagcatgtatgttcggaggcacaatgaatgatatagccgctctaggagagccattcagcgcaaagtgtcctcctattgaagacagtcttttatcgcacagatataaagactatgtggttaaatgggagaggctagaaaagaatagacggcgacaggtttctaataaacgtgttaaacatggtgatttatggatagccaactatacatctaaattcagtaaccgtaggtatttgtgcaccgtaactacaaagaatggtgactgtgttcagggtatagttagatctcatattaaaaaacctccttcatgcattccaaaaacatatgaactaggtactcatgataagtatggcatagacttatactgtggaattctttacgcaaaacattataataatataacttggtataaagataataaggaaattaatatcgacgacattaagtattcacaaacgggaaaggaattaattattcataatccagagttagaagatagcggaagatacgactgttacgttcattacgacgacgttagaatcaagaatgatatcgtagtatcaagatgtaaaatacttacggttataccgtcacaagaccacaggtttaaactaatactagatccgaaaatcaacgtaacgataggagaacctgccaatataacatgcactgctgtgtcaacgtcattattgatcgacgatgtactgattgaatgggaaaatccatccggatggcttataggattcgattttgatgtatactctgttttaactagtagaggcggtatcaccgaggcgaccttgtactttgaaaatgttactgaagaatatataggtaatacatataaatgtcgtggacacaactattattttgaaaaaacccttacaactacagtagtattggagtaaatatacaatgcatttttatatacattactgaattattattactgaattattattactgaattattattaattatatcgtatttgtgctatagaatggatgaagatacgcgactatctaggtatttgtatctcaccgatagagaacatataaatgtagactctattaaacagttgtgtaaaatatcagatcctaatgcatgttatagatgtggatgtacggctttacatgagtacttttataattatagatcagtcaacggaaaatacaagtatagatacaacggttactatcaatattattcatctagcgattatgaaaattataatgaatattattatgatagaactggtatgaacagtgagagtgataatatatcaatcaaaacagaatatgaattctatgatgaaacacaagatcaaagtacacaactagtaggttacgacattaaactcaaaaccaatgaggatgattttatggctatgatagatcagtgggtgtccatgattatatagatgaatcaattaataaagtagtatatggaagagagtctcacgtaagatggcgggatatatggcaagaacataatgatggcgtatacagtataggaaaggagtgcatagataatatatacgaagacaaccataccgtagacgaattctacaagatagacagcgtatcagatgtagatgacgcggaacacatatctccgataactaaaaaaccatagaatcagttgatgataatacctacatttctaatcttccgtataccatcaaatacaaaatattcgagcaacaataagtattttttatacctttaaaactgataaataaattttttctagtgatattttggcaagatgagaatcctatttctcatcgctttcatgtatgggtgtgttcactcatatgttaacgcggttgaaaccaaatgtccaaatctagacattgtaacatcttctggagaatttcattgttcaggatgtgtggaacatatgcctgagtttagctatatgtattggttggcaaaggatatgaaatcggacgaggataccaagtttatagaacatctgggtgatggcatcaaagaagatgaaaccgttcgtaccacagatagtggaatcgtcactctacgtaaagtccttcatgtgactgatactaataaatttgataattataggttcacttgtgtcctcgctacgctagatggcatttataaaaagaatgtttgctgaagtagttgtgtgctactatttttatttatgatataatctaatggaattaatttgaattgatatttatccaatactaaagattatattagaatcaaattaatcttttatacgagaaaaaataacgacatacgtcgtcaacaaattaaactttttatttattagttaactagcttatagaacttgctcattgttatgtttctaaaacgggtacggcatataggacaattatccgacgcaccggtttctcttcgtgttctatgccatatattgatgcatgttatgcaaaatatatgagtacacgaatccaataaaccaaagtatctatcgttttgagtaaacaacttcatagcaaattccacattctttttctttacttactctatacacgtcctcgtatttatttagtattttgatgatatccaactcagaaatggttgttgtattattgggtgtatttggagtataggtattattagctatgtaccaatttaccaaccctcttaatattgattgataatcacatcggttatccaattaataactaaattgtagtgtatatatagaccatatatgtttctatttttttgacagttacgtatagtttcagtaagttttgattgttgtattcctgtatctctagataagttagtcatatagtcccttccggcgatacgttttttccaagcccgaaattgattagccaaatgtgtatttatttttgtgatattgatataatatttcggataatgcatactgttagtcttatatcatttggttcatctatgtattgtaatattgttacatgatctatagatgatgtattgattttggcaggatcgaattccatatccgcgactaaacagtgaaaaaaatgtaaatactttttaaattttaaattagtaaaacttttttttattttttatgattccaaaaatactgaatacaaagtcctaaattataaatatggagatcatactaccacaacttattattatgtatacaaggccggtgtaatagatagatatatataattctattacaccggcagacaattaccgaccggtatttgtcgttaccaacataccgtataatatgtaatatacaattccataacccattgacagttgttatacatcaaaattgcaattcttttgattacgatgttataagaatgtagttaattgatgtatgatgttaatgtgtcctctttcctcttataacatcgtaatcaaaaacttttttataatatatacctaataatgtgtcttaatagttctcgtgattcgtcaaacaatcattcttataaaatataataaagcaacgtaaaaacacataaaaataagcgtaactaataagacaatggatatttacgacgataaaggtctacagactattaaactgtttaataatgaatttgattgtataaggaatgacatcagagaattatttaaacatgtaactgattccgatagtatacaacttccgatggaagacaattctgatattatagaaaatatcagaaaaatactatatagacgattaaaaaatgtagaatgtgttgacatcgataacacaataacttttatgaaatacgatccaaatgatgataataagcgtacgtgttctaattgggtacccttaactaataactatatggaatattgtctagtaatatatttggaaacaccgatatgtggaggcaaaataaaattataccaccctacaggaaatataaagtcggataaggatattatgtttgcaaagactctagactttaaatcaacgaaagtgttaactggacgtaaaacaattgccgttctagacatatccgtttcatataatagatcaatgactactattcactacaacgacgacgttgatatagatatacatactgataaaaatggaaaagagttatgttattgttatataacaatagatgatcattacttggttgatgtggaaactataggagttatagtcaatagatctggaaaatgtctgttagtaaataaccatctaggtataggtatcgttaaagataaacgtataagcgatagttttggagatgtatgtatggatacaatatttgacttttctgaagcacgagagttattttcattaactaatgatgataacaggaatatagcatgggacactgataaactagacgatgatacagatatatggactcccgtcacagaagatgattacaaatttctttctagactagtattgtatgcaaaatctcaatcggatactgtatttgactattatgttcttactggtgatacggaaccacccactgtattcattttcaaggtaactagattttactttaatatgccgaaataaaaaatttttgtataatatctagaggtagaggtattgtttagataaatacaaataacatagatacatcgcatacttagcatttttataaatatacataagacatacactttatacatttttgtaaaaatactcataaaaaaatttataaaaattatggcacaaccatatcttgtataggtagtttagttcgtcgagtgaacctataaacagataatagacaacacataataatgcctactaatacaagcataataccgggagatgggatatatgacgttgtagtgtttgggttttctgaacgttgatagtctactaatactacatgctgacatctaatgcctgtataaccatgagagcatctacaatacataccgtcaatatctctagcgtggatacagtcaccgtgtaaacaatatccatctccctctggaccgcataatctgatagctggaatatctgttgtagcgtttgtaatttctggcaatgtcgtttcgatagcgttaccactatcggcgaatgatctgattatcatagcagcgaacaacaacatcagataatttatcaacatttttgatggattctgtgtttatgctgtttctcagtgtgtgtttatgacaagattgggaattttatattattaattcagtaatataaactaataatatattgttaattgtgtaaataatataaaaataacaatacaatattgaatgtgttgctgttaaaaatgtatgtgttaatataatagaataaaataaatgagtatgatcattttagataacgattgattttatcattaccgcttcattcttatattctttgcttacggaacctatatttagaaacatctactaacaattttttatgcttgcattattaatggtatgtaatatgattgattgtgtacgcaataccaatttgttaagtatgaatacggggtacaaacataaattgaaatttaacattatttatttatgatatatatcgttatcgttaggtctataccatggatatctttaaagaactaatcttaaaacaccctgatgaaaatgttttgatttctccagtttccattttatctactttatctattctaaatcatggagcagctggttctacagctgaacaactatcaaaatatatagagaatatgaatgagaatacacccgatgacaataatgatgacatggaggtagatattccgtattgtgcgacactagctaccgcaaataaaatatacggtagcgatagtatcgagttccacgcctccttcctacaaaaaataaaagacgattttcaaactgtaaactttaataatgctaaccaaacaaaggaactaatcaacgaatgggttaagacaatgacaaatggtaaaattaattccttattgactagtccgctatccattaatactcgtatgacagttgttagcgccgtccattttaaagcaatgtggaaatatccattttctaaacatcttacatatacagacaagttttatatttctaagaatatagttaccagcgttgatatgatggtgggtaccgagaataacttgcaatatgtacatattaatgaattattcggaggattctctattatcgatattccatacgagggaaactctagtatggtaattatactaccggacgacatagaaggtatatataacatagaaaaaaatataacagatgaaaaatttaaaaaatggtgtggtatgttatctactaaaagtatagacttgtatatgccaaagtttaaagtggaaatgacagaaccgtataatctggtaccgattttagaaaatttaggacttactaatatattcggatattatgcagattttagcaagatgtgtaatgaaactatcactgtagaaaaatttctacatacgacgtttatagatgttaatgaggagtatacagaagcatcggccgttacaggagtatttacgattaacttttcgatggtatatcgtacgaaggtctacataaaccatccattcatgtacatgattaaagacaccacaggacgtatactttttatagggaaatactgctatccgcaataaatataaacaaatagacttttataaagagtcttcaacgataagtatatcgacatactacttatgctgcgaaagattctgaacgagaacgactatctcaccctcttggatcatatccgcactgctaaatactaaatctccactacactttttatcatcttatgaggaatgattgccttcgtgaaataggaataattagcaccagaatagctatggattattgtggtagagagtgcactattctatgtcgtctactggatgaagatgtgacgtacaaaaaaataaaactagaaattgaaacgtgtcacaacttatcaaaacatatagatagacgaggaaacaatgcgctacattgttacgtctccaataaatgcgatacagacattaagattgttctctcgcggagtcgagagactttgtagaaacaacgaaggattaactccgctaggagtatacagtaagcatagatacgtaaaatctcagattgtgcatctactgatatccagctattcaaattcctctaacgaactcaagtcgaatataaatgatttcgatctgtattcggataatatcgacttacgtctgctaaaatacctaattgtggataaacggatacgtccgtccaagaatacgaattatgcaatcaatggtctcggattggtggatatatacgtaacgacgcctaatccgagaccagaagtattgctatggcttcttaaatcagaatgttacagcaccggttacgtatttcgtacctgtatgtacgacagtgatatgtgtaagaactctcttcattactatatatcgtctcatagagaatctcaatctctatccaaggatgtaattaaatgtttgatcgataacaatgtttccatccatggcagagacgaaggaggatctttacccatccaatactactggtctttctcaaccatagatatagagattgttaaattattattaataaaggatgtggacacgtgtagagtatacgacgtcagccctatattagaggcgtattatctaaacaagcgatttagagtaaccccatataatgtagacatggaaatcgttaatcttcttattgagagacgtcatactcttgtcgacgtaatgcgtagtattacttcgtacgattccagagaatataaccactacatcatcgataacattctaaagagatttagacaacaggatgaatccatcgtacaagccatactgataaactacttacattacggcgatatggtcgttcgatgcatgttagataacggacaacaactatcctctacacgactactttgttaataataatctcgtcgatgtaaacgtcgtaaggtttatcgtggaaaatatggacacgcggctgtaaatcacgtatcgaacaatggccgtctatgtatgtacggtctgatattatcgagatttaataattgcgggtatcactgttatgaaaccatactgatagatgtatttgatatactaagcaagtacatggatgatatagatatgatcgataactctactatattacgcggtcgatgtcaataatatacaatttgcaaagcggttattggaatatggagcgagtatcacgctcgataatcaatacggccatccagaaaagcagttacagaagagaaaacaaaacgaaatcgttgttctacaagatgtctctccctacgacgattactacgtaaaaaagatactagcctactgcctattaagggacgagtcattcgcggaactacatagtaaattctgtttaaacgaggactataaaagtgtatttatgaaaaatatatcattcgataagatagattccatcatcgtgacataagtcgcctcaaagagattcgaatctccgacaccgacctgtatacggtatcacagctatcttaaagccatacattcagacagtcacatttcatttcccatgtacgacgatctcatagaacagtgccatctatcgatggagcgtaaaagtaaactcgtcgacaaagcactcaataaattagagtctaccatcggtcaatctagactatcgtatttgcctccggaaattatgcgcaatatcatctaaacagtatgttgtacggaaagaaccattacaaatattatccatgatagaaagaaaatatctatatgattggagaagtaggaaacaggaacaagacaacgattactacattattaaatcatgaagtccgtattatactcgtatatattgtttctctcatgtataataataaacggaagagatatagcaccgcatgcaccatccgatggaaagtgtaaagacaacgaatacaaacgccataatttgtgtccgggaacatacgcttccagattatgcgatagcaagactaacacacgatgtacgccgtgtggttcgggtaccttcacatctcgcaataatcatttacccgcttgtctaagttgtaacggaagacgcgatcgtgtaacacgactcacaatagaatctgtgaatgctctcccggatattattgtcttctcaaaggatcatccggatgcaaggcatgtgtttcccaaacaaaatgtggaataggatacggagtatccggagacgtcatctgttctccgtgtggtctcggaacatattctcacaccgtctcttccgcagataaatgcgaacccgtacccagaaatacgtttaactatatcgatgtggaaattaacctgtatccagttaacgacacgtcgtgtactcggacgaccactaccggtctcagcgaatccatctcaacgtcggaactaactattactatgaatcataaagactgtaatcccgtatttcgtgatggatacttctccgttcttaataaggtagcgacttcaggtttctttacaggagaaaggtgtgcactctgaatttcgagattaaatgcaataacaaagattcttcctccaaacagttaacgaaagcaaagaatgatactatcatgccgcattcggagacagtaactctagtgggcgacatctatatactatatagtaataccaatactcaagactacgaaactgatacaatctcttatcatgtgggtaatgttctcgatgtcgatagccatatgcccggtagttgcgatatacataaactgatcactaattccaaacccacccactttttatagtaagtttttcacccataaataataaatacaataattaatttctcgtaaaagtagaaaatatattctaatttattgcacggtaaggaagtagaatcataaagaacagtactcaatcaatagcaattatgaaacaatatatcgtcctggcatgcatgtgcctggcggcagctgctatgcctgccagtcttcagcaatcatcctcatcctcctcctcgtgtacggaagaagaaaacaaacatcatatgggaatcgatgttattatcaaagtcacaaagcaagaccaaacaccgaccaatgataagatttgccaatccgtaacggaaattacagagtccgagtcagatccagatcccgaggtggaatcagaagatgattccacatcagtcgaggatgtagatcctcctaccacttattactccatcatcggtggaggtctgagaatgaactttggattcaccaaatgtcctcagattaaatccatctcagaatccgctgatggaaacacagtgaatgctagattgtccagcgtgtccccaggacaaggtaaggactctcccgcgatcactcatgaagaagctcttgctatgatcaaagactgtgaagtgtctatcgacatcagatgtagcgaagaagagaaagacagcgacatcaagacccatccagtactcgggtctaacatctctcataagaaagtgagttacgaagatatcatcggttcaacgatcgtcgatacaaaatgcgtcaagaatctagagtttagcgttcgtatcggagacatgtgcaaggaatcatctgaacttgaggtcaaggatggattcaagtatgtcgacggatcggcatctgaaggtgcaaccgatgatacttcactcatcgattcaacaaaactcaaagcgtgtgtctgaatcgataactctattcatctgaaattggatgagtagggttaatcgaacgattcaggcacaccacgaattaaaaaagtgtaccggacactatattccggtttgcaaaacaaaaatgttcttaactacattcacaaaaagttacctctcgcgacttcttctttttctgtctcaatagtgtgatacgattatgacactattcctattcctattcctatttcctttcagagtatcacaaaaatattaaacctctttctgatggtctcataaaaaaagttttacaaaaatatttttattctctttctctctttgatggtctcataaaaaaagttttacaaaaatatttttattctctttctctctttgatggtctcataaaaaaagttttacaaaaatatttttattctctttctctctttgatggtctcataaaaaaagttttacaaaaatatttttattctctttctctctttgatggtctcataaaaaaagttttacaaaaatatttttattctctttctctctttgatggtctcataaaaaaagttttacaaaaatatttttattctctttctctctttgatggtctcataaaaaaagttttacaaaaatatttttattctctttctctctttgatggtctcataaaaaaagttttacaaaaatatttttattctctttctctctttgatggtctcataaaaaaagttttacaaaaatatttttattctctttctctctttgatggtctcataaaaaaagttttacaaaaatatttttattctctttctctctttgatggtctcataaaaaaagttttacaaaaatatttttattctctttctctctttgatggtctcataaaaaaagttttacaaaaatatttttattctctttctctctttgatggtctcataaaaaagttttacaaaaatatttttattctctttctctctttgatggtctcataaaaaagttttacaaaaatatttttattctctttctctctttgatggtctcataaaaaaagttttacaaaaatatttttattctctttctctctttgatggtctcataa

SEQ ID NO: 4 - DNA, 8687 bp, Artificial Sequence
  pLENT16/V5-DEST
aatgtagtcttatgcaatactcttgtagtcttgcaacatggtaacgatgagttagcaacatgccttacaaggagagaaaaagcaccgtgcatgccgattggtggaagtaaggtggtacgatcgtgccttattaggaaggcaacagacgggtctgacatggattggacgaaccactgaattgccgcattgcagagatattgtatttaagtgcctagctcgatacataaacgggtctctctggttagaccagatctgagcctgggagctctctggctaactagggaacccactgcttaagcctcaataaagcttgccttgagtgcttcaagtagtgtgtgcccgtctgttgtgtgactctggtaactagagatccctcagacccttttagtcagtgtggaaaatctctagcagtggcgcccgaacagggacttgaaagcgaaagggaaaccagaggagctctctcgacgcaggactcggcttgctgaagcgcgcacggcaagaggcgaggggcggcgactggtgagtacgccaaaaattttgactagcggaggctagaaggagagagatgggtgcgagagcgtcagtattaagcgggggagaattagatcgcgatgggaaaaaattcggttaaggccagggggaaagaaaaaatataaattaaaacatatagtatgggcaagcagggagctagaacgattcgcagttaatcctggcctgttagaaacatcagaaggctgtagacaaatactgggacagctacaaccatcccttcagacaggatcagaagaacttagatcattatataatacagtagcaaccctctattgtgtgcatcaaaggatagagataaaagacaccaaggaagctttagacaagatagaggaagagcaaaacaaaagtaagaccaccgcacagcaagcggccgctgatcttcagacctggaggaggagatatgagggacaattggagaagtgaattatataaatataaagtagtaaaaattgaaccattaggagtagcacccaccaaggcaaagagaagagtggtgcagagagaaaaaagagcagtgggaataggagctttgttccttgggttcttgggagcagcaggaagcactatgggcgcagcgtcaatgacgctgacggtacaggccagacaattattgtctggtatagtgcagcagcagaacaatttgctgagggctattgaggcgcaacagcatctgttgcaactcacagtctggggcatcaagcagctccaggcaagaatcctggctgtggaaagatacctaaaggatcaacagctcctggggatttggggttgctctggaaaactcatttgcaccactgctgtgccttggaatgctagttggagtaataaatctctggaacagatttggaatcacacgacctggatggagtgggacagagaaattaacaattacacaagcttaatacactccttaattgaagaatcgcaaaaccagcaagaaaagaatgaacaagaattattggaattagataaatgggcaagtttgtggaattggtttaacataacaaattggctgtggtatataaaattattcataatgatagtaggaggcttggtaggtttaagaatagtttttgctgtactttctatagtgaatagagttaggcagggatattcaccattatcgtttcagacccacctcccaaccccgaggggacccgacaggcccgaaggaatagaagaagaaggtggagagagagacagagacagatccattcgattagtgaacggatctcgacggtatcgataagcttgggagttccgcgttacataacttacggtaaatggcccgcctggctgaccgcccaacgacccccgcccattgacgtcaataatgacgtatgttcccatagtaacgccaatagggactttccattgacgtcaatgggtggagtatttacggtaaactgcccacttggcagtacatcaagtgtatcatatgccaagtacgccccctattgacgtcaatgacggtaaatggcccgcctggcattatgcccagtacatgaccttatgggactttcctacttggcagtacatctacgtattagtcatcgctattaccatggtgatgcggttttggcagtacatcaatgggcgtggatagcggtttgactcacggggatttccaagtctccaccccattgacgtcaatgggagtttgttttggcaccaaaatcaacgggactttccaaaatgtcgtaacaactccgccccattgacgcaaatgggcggtaggcgtgtacggtgggaggtctatataagcagagctcgtttagtgaaccgtcagatcgcctggagacgccatccacgctgttttgacctccatagaagacaccgactctagaggatccactagtccagtgtggtggaattctgcagatatcaacaagtttgtacaaaaaagctgaacgagaaacgtaaaatgatataaatatcaatatattaaattagattttgcataaaaaacagactacataatactgtaaaacacaacatatccagtcactatggcggccgcattaggcaccccaggctttacactttatgcttccggctcgtataatgtgtggattttgagttaggatccggcgagattttcaggagctaaggaagctaaaatggagaaaaaaatcactggatataccaccgttgatatatcccaatggcatcgtaaagaacattttgaggcatttcagtcagttgctcaatgtacctataaccagaccgttcagctggatattacggcctttttaaagaccgtaaagaaaaataagcacaagttttatccggcctttattcacattcttgcccgcctgatgaatgctcatccggaattccgtatggcaatgaaagacggtgagctggtgatatgggatagtgttcacccttgttacaccgttttccatgagcaaactgaaacgttttcatcgctctggagtgaataccacgacgatttccggcagtttctacacatatattcgcaagatgtggcgtgttacggtgaaaacctggcctatttccctaaagggtttattgagaatatgtttttcgtctcagccaatccctgggtgagtttcaccagttttgatttaaacgtggccaatatggacaacttcttcgcccccgttttcaccatgggcaaatattatacgcaaggcgacaaggtgctgatgccgctggcgattcaggttcatcatgccgtctgtgatggcttccatgtcggcagaatgcttaatgaattacaacagtactgcgatgagtggcagggcggggcgtaaagatctggatccggcttactaaaagccagataacagtatgcgtatttgcgcgctgatttttgcggtataagaatatatactgatatgtatacccgaagtatgtcaaaaagaggtgtgctatgaagcagcgtattacagtgacagttgacagcgacagctatcagttgctcaaggcatatatgatgtcaatatctccggtctggtaagcacaaccatgcagaatgaagcccgtcgtctgcgtgccgaacgctggaaagcggaaaatcaggaagggatggctgaggtcgcccggtttattgaaatgaacggctcttttgctgacgagaacagggactggtgaaatgcagtttaaggtttacacctataaaagagagagccgttatcgtctgtttgtggatgtacagagtgatattattgacacgcccgggcgacggatggtgatccccctggccagtgcacgtctgctgtcagataaagtctcccgtgaactttacccggtggtgcatatcggggatgaaagctggcgcatgatgaccaccgatatggccagtgtgccggtctccgttatcggggaagaagtggctgatctcagccaccgcgaaaatgacatcaaaaacgccattaacctgatgttctggggaatataaatgtcaggctccgttatacacagccagtctgcaggtcgaccatagtgactggatatgttgtgttttacagtattatgtagtctgttttttatgcaaaatctaatttaatatattgatatttatatcattttacgtttctcgttcagctttcttgtacaaagtggttgatatccagcacagtggcggccgctcgagtctagagggcccgcggttcgaaggtaagcctatccctaaccctctcctcggtctcgattctacgcgtaccggttagtaatgagtttggaattaattctgtggaatgtgtgtcagttagggtgtggaaagtccccaggctccccagcaggcagaagtatgcaaagcatgcatctcaattagtcagcaaccaggtgtggaaagtccccaggctccccagcaggcagaagtatgcaaagcatgcatctcaattagtcagcaaccatagtcccgcccctaactccgcccatcccgcccctaactccgcccagttccgcccattctccgccccatggctgactaattttttttatttatgcagaggccgaggccgcctctgcctctgagctattccagaagtagtgaggaggcttttttggaggcctaggcttttgcaaaaagctcccgggagcttgtatatccattttcggatctgatcagcacgtgttgacaattaatcatcggcatagtatatcggcatagtataatacgacaaggtgaggaactaaaccatggccaagcctttgtctcaagaagaatccaccctcattgaaagagcaacggctacaatcaacagcatccccatctctgaagactacagcgtcgccagcgcagctctctctagcgacggccgcatcttcactggtgtcaatgtatatcattttactgggggaccttgtgcagaactcgtggtgctgggcactgctgctgctgcggcagctggcaacctgacttgtatcgtcgcgatcggaaatgagaacaggggcatcttgagcccctgcggacggtgccgacaggtgcttctcgatctgcatcctgggatcaaagccatagtgaaggacagtgatggacagccgacggcagttgggattcgtgaattgctgccctctggttatgtgtgggagggctaagcacaattcgagctcggtacctttaagaccaatgacttacaaggcagctgtagatcttagccactttttaaaagaaaaggggggactggaagggctaattcactcccaacgaagacaagatctgctttttgcttgtactgggtctctctggttagaccagatctgagcctgggagctctctggctaactagggaacccactgcttaagcctcaataaagcttgccttgagtgcttcaagtagtgtgtgcccgtctgttgtgtgactctggtaactagagatccctcagacccttttagtcagtgtggaaaatctctagcagtagtagttcatgtcatcttattattcagtatttataacttgcaaagaaatgaatatcagagagtgagaggaacttgtttattgcagcttataatggttacaaataaagcaatagcatcacaaatttcacaaataaagcatttttttcactgcattctagttgtggtttgtccaaactcatcaatgtatcttatcatgtctggctctagctatcccgcccctaactccgcccatcccgcccctaactccgcccagttccgcccattctccgccccatggctgactaattttttttatttatgcagaggccgaggccgcctcggcctctgagctattccagaagtagtgaggaggcttttttggaggcctagggacgtacccaattcgccctatagtgagtcgtattacgcgcgctcactggccgtcgttttacaacgtcgtgactgggaaaaccctggcgttacccaacttaatcgccttgcagcacatccccctttcgccagctggcgtaatagcgaagaggcccgcaccgatcgcccttcccaacagttgcgcagcctgaatggcgaatgggacgcgccctgtagcggcgcattaagcgcggcgggtgtggtggttacgcgcagcgtgaccgctacacttgccagcgccctagcgcccgctcctttcgctttcttcccttcctttctcgccacgttcgccggctttccccgtcaagctctaaatcgggggctccctttagggttccgatttagtgctttacggcacctcgaccccaaaaaacttgattagggtgatggttcacgtagtgggccatcgccctgatagacggtttttcgccctttgacgttggagtccacgttctttaatagtggactcttgttccaaactggaacaacactcaaccctatctcggtctattcttttgatttataagggattttgccgatttcggcctattggttaaaaaatgagctgatttaacaaaaatttaacgcgaattttaacaaaatattaacgcttacaatttaggtggcacttttcggggaaatgtgcgcggaacccctatttgtttatttttctaaatacattcaaatatgtatccgctcatgagacaataaccctgataaatgcttcaataatattgaaaaaggaagagtatgagtattcaacatttccgtgtcgcccttattcccttttttgcggcattttgccttcctgtttttgctcacccagaaacgctggtgaaagtaaaagatgctgaagatcagttgggtgcacgagtgggttacatcgaactggatctcaacagcggtaagatccttgagagttttcgccccgaagaacgttttccaatgatgagcacttttaaagttctgctatgtggcgcggtattatcccgtattgacgccgggcaagagcaactcggtcgccgcatacactattctcagaatgacttggttgagtactcaccagtcacagaaaagcatcttacggatggcatgacagtaagagaattatgcagtgctgccataaccatgagtgataacactgcggccaacttacttctgacaacgatcggaggaccgaaggagctaaccgcttttttgcacaacatgggggatcatgtaactcgccttgatcgttgggaaccggagctgaatgaagccataccaaacgacgagcgtgacaccacgatgcctgtagcaatggcaacaacgttgcgcaaactattaactggcgaactacttactctagcttcccggcaacaattaatagactggatggaggcggataaagttgcaggaccacttctgcgctcggcccttccggctggctggtttattgctgataaatctggagccggtgagcgtgggtctcgcggtatcattgcagcactggggccagatggtaagccctcccgtatcgtagttatctacacgacggggagtcaggcaactatggatgaacgaaatagacagatcgctgagataggtgcctcactgattaagcattggtaactgtcagaccaagtttactcatatatactttagattgatttaaaacttcatttttaatttaaaaggatctaggtgaagatcctttttgataatctcatgaccaaaatcccttaacgtgagttttcgttccactgagcgtcagaccccgtagaaaagatcaaaggatcttcttgagatcctttttttctgcgcgtaatctgctgcttgcaaacaaaaaaaccaccgctaccagcggtggtttgtttgccggatcaagagctaccaactctttttccgaaggtaactggcttcagcagagcgcagataccaaatactgttcttctagtgtagccgtagttaggccaccacttcaagaactctgtagcaccgcctacatacctcgctctgctaatcctgttaccagtggctgctgccagtggcgataagtcgtgtcttaccgggttggactcaagacgatagttaccggataaggcgcagcggtcgggctgaacggggggttcgtgcacacagcccagcttggagcgaacgacctacaccgaactgagatacctacagcgtgagctatgagaaagcgccacgcttcccgaagggagaaaggcggacaggtatccggtaagcggcagggtcggaacaggagagcgcacgagggagcttccagggggaaacgcctggtatctttatagtcctgtcgggtttcgccacctctgacttgagcgtcgatttttgtgatgctcgtcaggggggcggagcctatggaaaaacgccagcaacgcggcctttttacggttcctggccttttgctggccttttgctcacatgttctttcctgcgttatcccctgattctgtggataaccgtattaccgcctttgagtgagctgataccgctcgccgcagccgaacgaccgagcgcagcgagtcagtgagcgaggaagcggaagagcgcccaatacgcaaaccgcctctccccgcgcgttggccgattcattaatgcagctggcacgacaggtttcccgactggaaagcgggcagtgagcgcaacgcaattaatgtgagttagctcactcattaggcaccccaggctttacactttatgcttccggctcgtatgttgtgtggaattgtgagcggataacaatttcacacaggaaacagctatgaccatgattacgccaagcgcgcaattaaccctcactaaagggaacaaaagctggagctgcaagctt

SEQ ID NO: 5 - DNA, 2546 bp, Artificial Sequence
  pENTR221
cttgtacaaagttggcattataagaaagcattgcttatcaatttgttgcaacgaacaggtcactatcagtcaaaataaaatcattatttgccatccagctgatatcccctatagtgagtcgtattacatggtcatagctgtttcctggcagctctggcccgtgtctcaaaatctctgatgttacattgcacaagataaaaatatatcatcatgaacaataaaactgtctgcttacataaacagtaatacaaggggtgttatgagccatattcaacgggaaacgtcgaggccgcgattaaattccaacatggatgctgatttatatgggtataaatgggctcgcgataatgtcgggcaatcaggtgcgacaatctatcgcttgtatgggaagcccgatgcgccagagttgtttctgaaacatggcaaaggtagcgttgccaatgatgttacagatgagatggtcagactaaactggctgacggaatttatgcctcttccgaccatcaagcattttatccgtactcctgatgatgcatggttactcaccactgcgatccccggaaaaacagcattccaggtattagaagaatatcctgattcaggtgaaaatattgttgatgcgctggcagtgttcctgcgccggttgcattcgattcctgtttgtaattgtccttttaacagcgatcgcgtatttcgtctcgctcaggcgcaatcacgaatgaataacggtttggttgatgcgagtgattttgatgacgagcgtaatggctggcctgttgaacaagtctggaaagaaatgcataaacttttgccattctcaccggattcagtcgtcactcatggtgatttctcacttgataaccttatttttgacgaggggaaattaataggttgtattgatgttggacgagtcggaatcgcagaccgataccaggatcttgccatcctatggaactgcctcggtgagttttctccttcattacagaaacggctttttcaaaaatatggtattgataatcctgatatgaataaattgcagtttcatttgatgctcgatgagtttttctaatcagaattggttaattggttgtaacactggcagagcattacgctgacttgacgggacggcgcaagctcatgaccaaaatcccttaacgtgagttacgcgtcgttccactgagcgtcagaccccgtagaaaagatcaaaggatcttcttgagatcctttttttctgcgcgtaatctgctgcttgcaaacaaaaaaaccaccgctaccagcggtggtttgtttgccggatcaagagctaccaactctttttccgaaggtaactggcttcagcagagcgcagataccaaatactgtccttctagtgtagccgtagttaggccaccacttcaagaactctgtagcaccgcctacatacctcgctctgctaatcctgttaccagtggctgctgccagtggcgataagtcgtgtcttaccgggttggactcaagacgatagttaccggataaggcgcagcggtcgggctgaacggggggttcgtgcacacagcccagcttggagcgaacgacctacaccgaactgagatacctacagcgtgagcattgagaaagcgccacgcttcccgaagggagaaaggcggacaggtatccggtaagcggcagggtcggaacaggagagcgcacgagggagcttccagggggaaacgcctggtatctttatagtcctgtcgggtttcgccacctctgacttgagcgtcgatttttgtgatgctcgtcaggggggcggagcctatggaaaaacgccagcaacgcggcctttttacggttcctggccttttgctggccttttgctcacatgttctttcctgcgttatcccctgattctgtggataaccgtattaccgcctttgagtgagctgataccgctcgccgcagccgaacgaccgagcgcagcgagtcagtgagcgaggaagcggaagagcgcccaatacgcaaaccgcctctccccgcgcgttggccgattcattaatgcagctggcacgacaggtttcccgactggaaagcgggcagtgagcgcaacgcaattaatacgcgtaccgctagccaggaagagtttgtagaaacgcaaaaaggccatccgtcaggatggccttctgcttagtttgatgcctggcagtttatggcgggcgtcctgcccgccaccctccgggccgttgcttcacaacgttcaaatccgctcccggcggatttgtcctactcaggagagcgttcaccgacaaacaacagataaaacgaaaggcccagtcttccgactgagcctttcgttttatttgatgcctggcagttccctactctcgcgttaacgctagcatggatgttttcccagtcacgacgttgtaaaacgacggccagtcttaagctcgggccccaaataatgattttattttgactgatagtgacctgttcgttgcaacaaattgatgagcaatgcttttttataatgccaactttgtacaaaaaagcaggcaccacccagcttt

SEQ ID NO: 6 - DNA, 1602 bp, Artificial Sequence
  mouse Tyrosinase (mTyr) cDNA
atgttcttggctgttttgtattgccttctgtggagtttccagatctctgatggccattttcctcgagcctgtgcctcctctaagaacttgttggcaaaagaatgctgcccaccatggatgggtgatgggagtccctgcggccagctttcaggcagaggttcctgccaggatatccttctgtccagtgcaccatctggacctcagttccccttcaaaggggtggatgaccgtgagtcctggccctctgtgttttataataggacctgccagtgctcaggcaacttcatgggtttcaactgcggaaactgtaagtttggatttgggggcccaaattgtacagagaagcgagtcttgattagaagaaacatttttgatttgagtgtctccgaaaagaataagttcttttcttacctcactttagcaaaacatactatcagctcagtctatgtcatccccacaggcacctatggccaaatgaacaatgggtcaacacccatgtttaatgatatcaacatctacgacctctttgtatggatgcattactatgtgtcaagggacacactgcttgggggctctgaaatatggagggacattgattttgcccatgaagcaccagggtttctgccttggcacagacttttcttgttattgtgggaacaagaaattcgagaactaactggggatgagaacttcactgttccatactgggattggagagatgcagaaaactgtgacatttgcacagatgagtacttgggaggtcgtcaccctgaaaatcctaacttactcagcccagcatccttcttctcctcctggcagatcatttgtagcagatcagaagagtataatagccatcaggttttatgcgatggaacacctgagggaccactattacgtaatcctggaaaccatgacaaagccaaaacccccaggctcccatcttcagcagatgtggaattttgtctgagtttgacccagtatgaatctggatcaatggatagaactgccaatttcagctttagaaacacactggaaggatttgccagtccactcacagggatagcagatccttctcaaagtagcatgcacaatgccttacatatctttatgaatggaacaatgtcccaagtacagggatcggccaacgatcccatttttcttcttcaccatgcttttgtggacagtatttttgaacaatggctgcgaaggcaccgccctcttttggaagtttacccagaagccaatgcacctatcggccataacagagactcttacatggttcctttcataccgctctatagaaatggtgatttcttcataacatccaaggatctgggatatgactacagctacctccaagagtcagatccaggcttttacagaaattatattgagccttacttggaacaagccagtcgtatctggccatggcttcttggggcagcactggtgggagctgttattgctgcagctctctctgggcttagcagtaggctatgccttcagaagaagaagaagaagaagcaaccccaggaggaaaggcagccactcctcatggacaaagacgactaccacagcttgctgtatcagagccatctgtga

SEQ ID NO: 7 - protein, 533 aa, Mus musculus
  mouse Tyrosinase (mTyr) protein (NP_035791)
  SIGNAL (1)...(18): signal sequence
MFLAVLYCLLWSFQISDGHFPRACASSKNLLAKECCPPWMGDGSPCGQLSGRGSCQDILLSSAPSGPQFPFKGVDDRESWPSVFYNRTCQCSGNFMGFNCGNCKFGFGGPNCTEKRVLIRRNIFDLSVSEKNKFFSYLTLAKHTISSVYVIPTGTYGQMNNGSTPMFNDINIYDLFVWMHYYVSRDTLLGGSEIWRDIDFAHEAPGFLPWHRLFLLLWEQEIRELTGDENFTVPYWDWRDAENCDICTDEYLGGRHPENPNLLSPASFFSSWQIICSRSEEYNSHQVLCDGTPEGPLLRNPGNHDKAKTPRLPSSADVEFCLSLTQYESGSMDRTANFSFRNTLEGFASPLTGIADPSQSSMHNALHIFMNGTMSQVQGSANDPIFLLHHAFVDSIFEQWLRRHRPLLEVYPEANAPIGHNRDSYMVPFIPLYRNGDFFITSKDLGYDYSYLQESDPGFYRNYIEPYLEQASRIWPWLLGAALVGAVIAAALSGLSSRLCLQKKKKKKQPQEERQPLLMDKDDYHSLLYQSHL

SEQ ID NO: 8 - DNA, 4629 bp, Artificial Sequence
  pENTR221-mTyr
cttgtacaaagttggcattataagaaagcattgcttatcaatttgttgcaacgaacaggtcactatcagtcaaaataaaatcattatttgccatccagctgatatcccctatagtgagtcgtattacatggtcatagctgtttcctggcagctctggcccgtgtctcaaaatctctgatgttacattgcacaagataaaataatatcatcatgaacaataaaactgtctgcttacataaacagtaatacaaggggtgttatgagccatattcaacgggaaacgtcgaggccgcgattaaattccaacatggatgctgatttatatgggtataaatgggctcgcgataatgtcgggcaatcaggtgcgacaatctatcgcttgtatgggaagcccgatgcgccagagttgtttctgaaacatggcaaaggtagcgttgccaatgatgttacagatgagatggtcagactaaactggctgacggaatttatgcctcttccgaccatcaagcattttatccgtactcctgatgatgcatggttactcaccactgcgatccccggaaaaacagcattccaggtattagaagaatatcctgattcaggtgaaaatattgttgatgcgctggcagtgttcctgcgccggttgcattcgattcctgtttgtaattgtccttttaacagcgatcgcgtatttcgtctcgctcaggcgcaatcacgaatgaataacggtttggttgatgcgagtgattttgatgacgagcgtaatggctggcctgttgaacaagtctggaaagaaatgcataaacttttgccattctcaccggattcagtcgtcactcatggtgatttctcacttgataaccttatttttgacgaggggaaattaataggttgtattgatgttggacgagtcggaatcgcagaccgataccaggatcttgccatcctatggaactgcctcggtgagttttctccttcattacagaaacggctttttcaaaaatatggtattgataatcctgatatgaataaattgcagtttcatttgatgctcgatgagtttttctaatcagaattggttaattggttgtaacactggcagagcattacgctgacttgacgggacggcgcaagctcatgaccaaaatcccttaacgtgagttacgcgtcgttccactgagcgtcagaccccgtagaaaagatcaaaggatcttcttgagatcctttttttctgcgcgtaatctgctgcttgcaaacaaaaaaaccaccgctaccagcggtggtttgtttgccggatcaagagctaccaactctttttccgaaggtaactggcttcagcagagcgcagataccaaatactgttcttctagtgtagccgtagttaggccaccacttcaagaactctgtagcaccgcctacatacctcgctctgctaatcctgttaccagtggctgctgccagtggcgataagtcgtgtcttaccgggttggactcaagacgatagttaccggataaggcgcagcggtcgggctgaacggggggttcgtgcacacagcccagcttggagcgaacgacctacaccgaactgagatacctacagcgtgagctatgagaaagcgccacgcttcccgaagggagaaaggcggacaggtatccggtaagcggcagggtcggaacaggagagcgcacgagggagcttccagggggaaacgcctggtatctttatagtcctgtcgggtttcgccacctctgacttgagcgtcgatttttgtgatgctcgtcaggggggcggagcctatggaaaaacgccagcaacgcggcctttttacggttcctggccttttgctggccttttgctcacatgttctttcctgcgttatcccctgattctgtggataaccgtattaccgcctttgagtgagctgataccgctcgccgcagccgaacgaccgagcgcagcgagtcagtgagcgaggaagcggaagagcgcccaatacgcaaaccgcctctccccgcgcgttggccgattcattaatgcagctggcacgacaggtttcccgactggaaagcgggcagtgagcgcaacgcaattaatacgcgtaccgctagccaggaagagtttgtagaaacgcaaaaaggccatccgtcaggatggccttctgcttagtttgatgcctggcagtttatggcgggcgtcctgcccgccaccctccgggccgttgcttcacaacgttcaaatccgctcccggcggatttgtcctactcaggagagcgttcaccgacaaacaacagataaaacgaaaggcccagtcttccgactgagcctttcgttttatttgatgcctggcagttccctactctcgcgttaacgctagcatggatgttttcccagtcacgacgttgtaaaacgacggccagtcttaagctcgggccccaaataatgattttattttgactgatagtgacctgttcgttgcaacacattgatgagcaatgcttttttataatgccaactttgtacaaaaaagcaggctagcttagtgtaaaacaggctgagagtatttgatgtaagaaggggagtggttatataggtcttagccaaaacatgtgatagtcactccaggggttgctggaaaagaagtctgtgacactcattaacctattggtgcagattttgtatgatctaaaggagaaaatgttcttggctgttttgtattgccttctgtggagtttccagatctctgatggccattttcctcgagcctgtgcctcctctaagaacttgttggcaaaagaatgctgcccaccatggatgggtgatgggagtccctgcggccagctttcaggcagaggttcctgccaggatatccttctgtccagtgcaccatctggacctcagttccccttcaaaggggtggatgaccgtgagtcctggccctctgtgttttataataggacctgccagtgctcaggcaacttcatgggtttcaactgcggaaactgtaagtttggatttgggggcccaaattgtacagagaagcgagtcttgattagaagaaacatttttgatttgagtgtctccgaaaagaataagttcttttcttacctcactttagcaaaacatactatcagctcagtctatgtcatccccacaggcacctatggccaaatgaacaatgggtcaacacccatgtttaatgatatcaacatctacgacctctttgtatggatgcattactatgtgtcaagggacacactgcttgggggctctgaaatatggagggacattgattttgcccatgaagcaccagggtttctgccttggcacagacttttcttgttattgtgggaacaagaaattcgagaactaactggggatgagaacttcactgttccatactgggattggagagatgcagaaaactgtgacatttgcacagatgagtacttgggaggtcgtcaccctgaaaatcctaacttactcagcccagcatccttcttctcctcctggcagatcatttgtagcagatcagaagagtataatagccatcaggttttatgcgatggaacacctgagggaccactattacgtaatcctggaaaccatgacaaagccaaaacccccaggctcccatcttcagcagatgtggaattttgtctgagtttgacccagtatgaatctggatcaatggatagaactgccaatttcagctttagaaacacactggaaggatttgccagtccactcacagggatagcagatccttctcaaagtagcatgcacaatgccttacatatctttatgaatggaacaatgtcccaagtacagggatcggccaacgatcccatttttcttcttcaccatgcttttgtggacagtatttttgaacaatggctgcgaaggcaccgccctcttttggaagtttacccagaagccaatgcacctatcggccataacagagactcttacatggttcctttcataccgctctatagaaatggtgatttcttcataacatccaaggatctgggatatgactacagctacctccaagagtcagatccaggcttttacagaaattatattgagccttacttggaacaagccagtcgtatctggccatggcttcttggggcagcactggtgggagctgttattgctgcagctctctctgggcttagcagtaggctatgccttcagaagaagaagaagaagaagcaaccccaggaggaaaggcagccactcctcatggacaaagacgactaccacagcttgctgtatcagagccatctgtgaacatcctaggaaacagagtgggactgaaaggttttacctcactcgacctatttgttggtgtttctacaaatttaaactagtataaaacatagaccatagctgtttggctttttttcagacccatgttttttcctaagtcctagtttctaagaaatgactgggatttgctaaaatatatatatatatataaataataacttactaatagctaaataaaatttcctcttacaactaattgagctggtttttatgaatgtgtcttaattatttaaacttgaggcacatttttgttttccttacttcattgtgaatttccggaattacccagcttt

SEQ ID NO: 9 - DNA, 8799 bp, Artificial Sequence
  pLENTI6/V5-mTyr
cttgtacaaagtggttgatatccagcacagtggcggccgctcgagtctagagggcccgcggttcgaaggtaagcctatccctaaccctctcctcggtctcgattctacgcgtaccggttagtaatgagtttggaattaattctgtggaatgtgtgtcagttagggtgtggaaagtccccaggctccccaggcaggcagaagtatgcaaagcatgcatctcaattagtcagcaaccaggtgtggaaagtccccaggctccccagcaggcagaagtatgcaaagcatgcatctcaattagtcagcaaccatagtcccgcccctaactccgcccatcccgcccctaactccgcccagttccgcccattctccgccccatggctgactaattttttttatttatgcagaggccgaggccgcctctgcctctgagctattccagaagtagtgaggaggcttttttggaggcctaggcttttgcaaaaagctcccgggagcttgtatatccattttcggatctgatcagcacgtgttgacaattaatcatcggcatagtatatcggcatagtataatacgacaaggtgaggaactaaaccatggccaagcctttgtctcaagaagaatccaccctcattgaaagagcaacggctacaatcaacagcatccccatctctgaagactacagcgtcgccagcgcagctctctctagcgacggccgcatcttcactggtgtcaatgtatatcattttactgggggaccttgtgcagaactcgtggtgctgggcactgctgctgctgcggcagctggcaacctgacttgtatcgtcgcgatcggaaatgagaacaggggcatcttgagcccctgcggacggtgccgacaggtgcttctcgatctgcatcctgggatcaaagccatagtgaaggacagtgatggacagccgacggcagttgggattcgtgaattgctgccctctggttatgtgtgggagggctaagcacaattcgagctcggtacctttaagaccaatgacttacaaggcagctgtagatcttagccactttttaaaagaaaaggggggactggaagggctaattcactcccaacgaagacaagatctgctttttgcttgtactgggtctctctggttagaccagatctgagcctgggagctctctggctaactagggaacccactgcttaagcctcaataaagcttgccttgagtgcttcaagtagtgtgtgcccgtctgttgtgtgactctggtaactagagatccctcagacccttttagtcagtgtggaaaatctctagcagtagtagttcatgtcatcttattattcagtatttataacttgcaaagaaatgaatatcagagagtgagaggaacttgtttattgcagcttataatggttacaaataaagcaatagcatcacaaatttcacaaataaagcatttttttcactgcattctagttgtggtttgtccaaactcatcaatgtatcttatcatgtctggctctagctatcccgcccctaactccgcccatcccgcccctaactccgcccagttccgcccattctccgccccatggctgactaattttttttatttatgcagaggccgaggccgcctcggcctctgagctattccagaagtagtgaggaggcttttttggaggcctagggacgtacccaattcgccctatagtgagtcgtattacgcgcgctcactggccgtcgttttacaacgtcgtgactgggaaaaccctggcgttacccaacttaatcgccttgcagcacatccccctttcgccagctggcgtaatagcgaagaggcccgcaccgatcgcccttcccaacagttgcgcagcctgaatggcgaatgggacgcgccctgtagcggcgcattaagcgcggcgggtgtggtggttacgcgcagcgtgaccgctacacttgccagcgccctagcgcccgctcctttcgctttcttcccttcctttctcgccacgttcgccggctttccccgtcaagctctaaatcgggggctccctttagggttccgatttagtgctttacggcacctcgaccccaaaaaacttgattagggtgatggttcacgtagtgggccatcgccctgatagacggtttttcgccctttgacgttggagtccacgttctttaatagtggactcttgttccaaactggaacaacactcaaccctatctcggtctattcttttgatttataagggattttgccgatttcggcctattggttaaaaaatgagctgatttaacaaaaatttaacgcgaattttaacaaaatattaacgcttacaatttaggtggcacttttcggggaaatgtgcgcggaacccctatttgtttatttttctaaatacattcaaatatgtatccgctcatgagacaataaccctgataaatgcttcaataatattgaaaaaggaagagtatgagtattcaacatttccgtgtcgcccttattcccttttttgcggcattttgccttcctgtttttgctcacccagaaacgctggtgaaagtaaaagatgctgaagatcagttgggtgcacgagtgggttacatcgaactggatctcaacagcggtaagatccttgagagttttcgccccgaagaacgttttccaatgatgagcacttttaaagttctgctatgtggcgcggtattatcccgtattgacgccgggcaagagcaactcggtcgccgcatacactattctcagaatgacttggttgagtactcaccagtcacagaaaagcatcttacggatggcatgacagtaagagaattatgcagtgctgccataaccatgagtgataacactgcggccaacttacttctgacaacgatcggaggaccgaaggagctaaccgcttttttgcacaacatgggggatcatgtaactcgccttgatcgttgggaaccggagctgaatgaagccataccaaacgacgagcgtgacaccacgatgcctgtagcaatggcaacaacgttgcgcaaactattaactggcgaactacttactctagcttcccggcaacaattaatagactggatggaggcggataaagttgcaggaccacttctgcgctcggcccttccggctggctggtttattgctgataaatctggagccggtgagcgtgggtctcgcggtatcattgcagcactggggccagatggtaagccctcccgtatcgtagttatctacacgacggggagtcaggcaactatggatgaacgaaatagacagatcgctgagataggtgcctcactgattaagcattggtaactgtcagaccaagtttactcatatatactttagattgatttaaaacttcatttttaatttaaaaggatctaggtgaagatcctttttgataatctcatgaccaaaatcccttaacgtgagttttcgttccactgagcgtcagaccccgtagaaaagatcaaaggatcttcttgagatcctttttttctgcgcgtaatctgctgcttgcaaacaaaaaaaccaccgctaccagcggtggtttgtttgccggatcaagagctaccaactctttttccgaaggtaactggcttcagcagagcgcagataccaaatactgttcttctagtgtagccgtagttaggccaccacttcaagaactctgtagcaccgcctacatacctcgctctgctaatcctgttaccagtggctgctgccagtggcgataagtcgtgtcttaccgggttggactcaagacgatagttaccggataaggcgcagcggtcgggctgaacggggggttcgtgcacacagcccagcttggagcgaacgacctacaccgaactgagatacctacagcgtgagctatgagaaagcgccacgcttcccgaagggagaaaggcggacaggtatccggtaagcggcagggtcggaacaggagagcgcacgagggagcttccagggggaaacgcctggtatctttatagtcctgtcgggtttcgccacctctgacttgagcgtcgatttttgtgatgctcgtcaggggggcggagcctatggaaaaacgccagcaacgcggcctttttacggttcctggccttttgctggccttttgctcacatgttctttcctgcgttatcccctgattctgtggataaccgtattaccgcctttgagtgagctgataccgctcgccgcagccgaacgaccgagcgcagcgagtcagtgagcgaggaagcggaagagcgcccaatacgcaaaccgcctctccccgcgcgttggccgattcattaatgcagctggcacgacaggtttcccgactggaaagcgggcagtgagcgcaacgcaattaatgtgagttagctcactcattaggcaccccaggctttacactttatgcttccggctcgtatgttgtgtggaattgtgagcggataacaatttcacacaggaaacagctatgaccatgattacgccaagcgcgcaattaaccctcactaaagggaacaaaagctggagctgcaagcttaatgtagtcttatgcaatactcttgtagtcttgcaacatggtaacgatgagttagcaacatgccttacaaggagagaaaaagcaccgtgcatgccgattggtggaagtaaggtggtacgatcgtgccttattaggaaggcaacagacgggtctgacatggattggacgaaccactgaattgccgcattgcagagatattgtatttaagtgcctagctcgatacataaacgggtctctctggttagaccagatctgagcctgggagctctctggctaactagggaacccactgcttaagcctcaataaagcttgccttgagtgcttcaagtagtgtgtgcccgtctgttgtgtgactctggtaactagagatccctcagacccttttagtcagtgtggaaaatctctagcagtggcgcccgaacagggacttgaaagcgaaagggaaaccagaggagctctctcgacgcaggactcggcttgctgaagcgcgcacggcaagaggcgaggggcggcgactggtgagtacgccaaaaattttgactagcggaggctagaaggagagagatgggtgcgagagcgtcagtattaagcgggggagaattagatcgcgatgggaaaaaattcggttaaggccagggggaaagaaaaaatataaattaaaacatatagtatgggcaagcagggagctagaacgattcgcagttaatcctggcctgttagaaacatcagaaggctgtagacaaatactgggacagctacaaccatcccttcagacaggatcagaagaacttagatcattatataatacagtagcaaccctctattgtgtgcatcaaaggatagagataaaagacaccaaggaagctttagacaagatagaggaagagcaaaacaaaagtaagaccaccgcacagcaagcggccgctgatcttcagacctggaggaggagatatgagggacaattggagaagtgaattatataaatataaagtagtaaaaattgaaccattaggagtagcacccaccaaggcaaagagaagagtggtgcagagagaaaaaagagcagtgggaataggagctttgttccttgggttcttgggagcagcaggaagcactatgggcgcagcgtcaatgacgctgacggtacaggccagacaattattgtctggtatagtgcagcagcagaacaatttgctgagggctattgaggcgcaacagcatctgttgcaactcacagtctggggcatcaagcagctccaggcaagaatcctggctgtggaaagatacctaaaggatcaacagctcctggggatttggggttgctctggaaaactcatttgcaccactgctgtgccttggaatgctagttggagtaataaatctctggaacagatttggaatcacacgacctggatggagtgggacagagaaattaacaattacacaagcttaatacactccttaattgaagaatcgcaaaaccagcaagaaaagaatgaacaagaattattggaattagataaatgggcaagtttgtggaattggtttaacataacaaattggctgtggtatataaaattattcataatgatagtaggaggcttggtaggtttaagaatagtttttgctgtactttctatagtgaatagagttaggcagggatattcaccattatcgtttcagacccacctcccaaccccgaggggacccgacaggcccgaaggaatagaagaagaaggtggagagagagacagagacagatccattcgattagtgaacggatctcgacggtatcgataagcttgggagttccgcgttacataacttacggtaaatggcccgcctggctgaccgcccaacgacccccgcccattgacgtcaataatgacgtatgttcccatagtaacgccaatagggactttccattgacgtcaatgggtggagtatttacggtaaactgcccacttggcagtacatcaagtgtatcatatgccaagtacgccccctattgacgtcaatgacggtaaatggcccgcctggcattatgcccagtacatgaccttatgggactttcctacttggcagtacatctacgtattagtcatcgctattaccatggtgatgcggttttggcagtacatcaatgggcgtggatagcggtttgactcacggggatttccaagtctccaccccattgacgtcaatgggagtttgttttggcaccaaaatcaacgggactttccaaaatgtcgtaacaactccgccccattgacgcaaatgggcggtaggcgtgtacggtgggaggtctatataagcagagctcgtttagtgaaccgtcagatcgcctggagacgccatccacgctgttttgacctccatagaagacaccgactctagaggatccactagtccagtgtggtggaattctgcagatatcaacaagtttgtacaaaaaagcaggctagcttagtgtaaaacaggctgagagtatttgatgtaagaaggggagtggttatataggtcttagccaaaacatgtgatagtcactccaggggttgctggaaaagaagtctgtgacactcattaacctattggtgcagattttgtatgatctaaaggagaaaatgttcttggctgttttgtattgccttctgtggagtttccagatctctgatggccattttcctcgagcctgtgcctcctctaagaacttgttggcaaaagaatgctgcccaccatggatgggtgatgggagtccctgcggccagctttcaggcagaggttcctgccaggatatccttctgtccagtgcaccatctggacctcagttccccttcaaaggggtggatgaccgtgagtcctggccctctgtgttttataataggacctgccagtgctcaggcaacttcatgggtttcaactgcggaaactgtaagtttggatttgggggcccaaattgtacagagaagcgagtcttgattagaagaaacatttttgatttgagtgtctccgaaaagaataagttcttttcttacctcactttagcaaaacatactatcagctcagtctatgtcatccccacaggcacctatggccaaatgaacaatgggtcaacacccatgtttaatgatatcaacatctacgacctctttgtatggatgcattactatgtgtcaagggacacactgcttgggggctctgaaatatggagggacattgattttgcccatgaagcaccagggtttctgccttggcacagacttttcttgttattgtgggaacaagaaattcgagaactaactggggatgagaacttcactgttccatactgggattggagagatgcagaaaactgtgacatttgcacagatgagtacttgggaggtcgtcaccctgaaaatcctaacttactcagcccagcatccttcttctcctcctggcagatcatttgtagcagatcagaagagtataatagccatcaggttttatgcgatggaacacctgagggaccactattacgtaatcctggaaaccatgacaaagccaaaacccccaggctcccatcttcagcagatgtggaattttgtctgagtttgacccagtatgaatctggatcaatggatagaactgccaatttcagctttagaaacacactggaaggatttgccagtccactcacagggatagcagatccttctcaaagtagcatgcacaatgccttacatatctttatgaatggaacaatgtcccaagtacagggatcggccaacgatcccatttttcttcttcaccatgcttttgtggacagtatttttgaacaatggctgcgaaggcaccgccctcttttggaagtttacccagaagccaatgcacctatcggccataacagagactcttacatggttcctttcataccgctctatagaaatggtgatttcttcataacatccaaggatctgggatatgactacagctacctccaagagtcagatccaggcttttacagaaattatattgagccttacttggaacaagccagtcgtatctggccatggcttcttggggcagcactggtgggagctgttattgctgcagctctctctgggcttagcagtaggctatgccttcagaagaagaagaagaagaagcaaccccaggaggaaaggcagccactcctcatggacaaagacgactaccacagcttgctgtatcagagccatctgtaacaaacccagcttt

SEQ ID NO: 10 - DNA, 36 bp, Artificial Sequence
  mTyr-5 primer
gtcgaccaccatgttcttggctgttttgtattgcct

SEQ ID NO: 11 - DNA, 30 bp, Artificial Sequence
  mTyr-3 primer
ttaattaatcacagatggctctgatacagc

SEQ ID NO: 12 - DNA, 7150 bp, Artificial Sequence
  TK-SE-mTyr-1
agcgcccaatacgcaaaccgcctctccccgcgcgttggccgattcattaatgcagctggcacgacaggtttcccgactggaaagcgggcagtgagcgcaacgcaattaatgtgagttagctcactcattaggcaccccaggctttacactttatgcttccggctcgtatgttgtgtggaattgtgagcggataacaatttcacacaggaaacagctatgaccatgattacgccaagctttgttacagatggaagggtcaaacttaataaaggatatttgttcgactttgtgattagtttgatgcgattcaaaaaagaatcctctctagctaccaccgcaatagatcctgttagatacatagatcctcgtcgtgatatcgcattttctaacgtgatggatatattaaagtcgaataaagtgaacaataattaattctttattgtcatcatgaacggcggacatattcagttgataatcggccccatgttttcaggtaaaagtacagaattaattagacgagttagacgttatcaaatagctcaatataaatgcgtgactataaaatattctaacgataatagatacggaacgggactatggacgcatgataagaataattttgaagcattggaagcaactaaactatgtgatgtcttggaatcaattacagatttctccgtgataggtatcgatgaaggacagttctttccagacattgtttaattctgtgagcgtatggcaaacggtaccgagctcaaaaattgaaaaactagcgtctttttttgctcgaagtcgaccaccatgttcttggctgttttgtattgccttctgtggagtttccagatctctgatggccattttcctcgagcctgtgcctcctctaagaacttgttggcaaaagaatgctgcccaccatggatgggtgatgggagtccctgcggccagctttcaggcagaggttcctgccaggatatccttctgtccagtgcaccatctggacctcagttccccttcaaaggggtggatgaccgtgagtcctggccctctgtgttttataataggacctgccagtgctcaggcaacttcatgggtttcaactgcggaaactgtaagtttggatttgggggcccaaattgtacagagaagcgagtcttgattagaagaaacatttttgatttgagtgtctccgaaaagaataagttcttttcttacctcactttagcaaaacatactatcagctcagtctatgtcatccccacaggcacctatggccaaatgaacaatgggtcaacacccatgtttaatgatatcaacatctacgacctctttgtatggatgcattactatgtgtcaagggacacactgcttgggggctctgaaatatggagggacattgattttgcccatgaagcaccagggtttctgccttggcacagacttttcttgttattgtgggaacaagaaattcgagaactaactggggatgagaacttcactgttccatactgggattggagagatgcagaaaactgtgacatttgcacagatgagtacttgggaggtcgtcaccctgaaaatcctaacttactcagcccagcatccttcttctcctcctggcagatcatttgtagcagatcagaagagtataatagccatcaggttttatgcgatggaacacctgagggaccactattacgtaatcctggaaaccatgacaaagccaaaacccccaggctcccatcttcagcagatgtggaattttgtctgagtttgacccagtatgaatctggatcaatggatagaactgccaatttcagctttagaaacacactggaaggatttgccagtccactcacagggatagcagatccttctcaaagtagcatgcacaatgccttacatatctttatgaatggaacaatgtcccaagtacagggatcggccaacgatcccatttttcttcttcaccatgcttttgtggacagtatttttgaacaatggctgcgaaggcaccgccctcttttggaagtttacccagaagccaatgcacctatcggccataacagagactcttacatggttcctttcataccgctctatagaaatggtgatttcttcataacatccaaggatctgggatatgactacagctacctccaagagtcagatccaggcttttacagaaattatattgagccttacttggaacaagccagtcgtatctggccatggcttcttggggcagcactggtgggagctgttattgctgcagctctctctgggcttagcagtaggctatgccttcagaagaagaagaagaagaagcaaccccaggaggaaaggcagccactcctcatggacaaagacgactaccacagcttgctgtatcagagccatctgtgattaattaatttttatcgatctaattcaacaatgtctggagagctcggatccttctgtgagcgtatggcaaacgaaggaaaaatagttatagtagccgcactcgatgggacatttcaacgtaaaccgtttaataatattttgaatcttattccattatctgaaatggtggtaaaactaactgctgtgtgtatgaaatgctttaaggaggcttccttttctaaacgattgggtgaggaaaccgagatagagataataggaggtaatgatatgtatcaatcggtgtgtagaaagtgttacgtcggctcataatattatattttttatctaaaaaactaaaaataaacattgattaaattttaatataatacttaaaaatggatgttgtgtcgttagataaaccgtttatgtattttgaggaaattgataatgagttagattacgaaccagaaagtgcaaatgaggtcgcaaaaaaactgccgtatcaaggacagttaaaactattactaggagaattattttttcttagtaagttacagcgacacggtatattagatggtgccaccgtagtgtactagttaacggccgccagtgtgctggaattctagaaaagtagaaaatatattctaatttattgcacgggatgagcgaaaaatacatcgtcacctgggacatgttgcagatccatgcacgtaaactcgcaagccgactgatgccttctgaacaatggaaaggcattattgccgtaagccgtggcggtctggtaccgggtgcgttactggcgcgtgaactgggtattcgtcatgtcgataccgtttgtatttccagctacgatcacgacaaccagcgcgagcttaaagtgctgaaacgcgcagaaggcgatggcgaaggcttcatcgttattgatgacctggtggataccggtggtactgcggttgcgattcgtgaaatgtatccaaaagcgcactttgtcaccatcttcgcaaaaccggctggtcgtccgctggttgatgactatgttgttgatatcccgcaagatacctggattgaacagccgtgggatatgggcgtcgtattcgtcccgccaatctccggtcgctaaggatcagcttggcgtaatcaagccgaattctgcagatatccatcacactggcggccgctcgagcatgcatctagagggcccaattcgccctatagtgagtcgtattacaattcactggccgtcgttttacaacgtcgtgactgggaaaaccctggcgttacccaacttaatcgccttgcagcacatccccctttcgccagctggcgtaatagcgaagaggcccgcaccgatcgcccttcccaacagttgcgcagcctgaatggcgaatggacgcgccctgtagcggcgcattaagcgcggcgggtgtggtggttacgcgcagcgtgaccgctacacttgccagcgccctagcgcccgctcctttcgctttcttcccttcctttctcgccacgttcgccggctttccccgtcaagctctaaatcgggggctccctttagggttccgatttagtgctttacggcacctcgaccccaaaaaacttgattagggtgatggttcacgtagtgggccatcgccctgatagacggtttttcgccctttgacgttggagtccacgttctttaatagtggactcttgttccaaactggaacaacactcaaccctatctcggtctattcttttgatttataagggattttgccgatttcggcctattggttaaaaaatgagctgatttaacaaaaatttaacgcgaattttaacaaaattcagggcgcaagggctgctaaaggaagcggaacacgtagaaagccagtccgcagaaacggtgctgaccccggatgaatgtcagctactgggctatctggacaagggaaaacgcaagcgcaaagagaaagcaggtagcttgcagtgggcttacatggcgatagctagactgggcggttttatggacagcaagcgaaccggaattgccagctggggcgccctctggtaaggttgggaagccctgcaaagtaaactggatggctttcttgccgccaaggatctgatggcgcaggggatcaagatctgatcaagagacaggatgaggatcgtttcgcatgattgaacaagatggattgcacgcaggttctccggccgcttgggtggagaggctattcggctatgactgggcacaacagacaatcggctgctctgatgccgccgtgttccggctgtcagcgcaggggcgcccggttctttttgtcaagaccgacctgtccggtgccctgaatgaactgcaggacgaggcagcgcggctatcgtggctggccacgacgggcgttccttgcgcagctgtgctcgacgttgtcactgaagcgggaagggactggctgctattgggcgaagtgccggggcaggatctcctgtcatcccaccttgctcctgccgagaaagtatccatcatggctgatgcaatgcggcggctgcatacgcttgatccggctacctgcccattcgaccaccaagcgaaacatcgcatcgagcgagcacgtactcggatggaagccggtcttgtcgatcaggatgatctggacgaagagcatcaggggctcgcgccagccgaactgttcgccaggctcaaggcgcgcatgcccgacggcgaggatctcgtcgtgacccatggcgatgcctgcttgccgaatatcatggtggaaaatggccgcttttctggattcatcgactgtggccggctgggtgtggcggaccgctatcaggacatagcgttggctacccgtgatattgctgaagagcttggcggcgaatgggctgaccgcttcctcgtgctttacggtatcgccgctcccgattcgcagcgcatcgccttctatcgccttcttgacgagttcttctgaattgaaaaaggaagagtatgagtattcaacatttccgtgtcgcccttattcccttttttgcggcattttgccttcctgtttttgctcacccagaaacgctggtgaaagtaaaagatgctgaagatcagttgggtgcacgagtgggttacatcgaactggatctcaacagcggtaagatccttgagagttttcgccccgaagaacgttttccaatgatgagcacttttaaagttctgctatgtggcgcggtattatcccgtattgacgccgggcaagagcaactcggtcgccgcatacactattctcagaatgacttggttgagtactcaccagtcacagaaaagcatcttacggatggcatgacagtaagagaattatgcagtgctgccataaccatgagtgataacactgcggccaacttacttctgacaacgatcggaggaccgaaggagctaaccgcttttttgcacaacatgggggatcatgtaactcgccttgatcgttgggaaccggagctgaatgaagccataccaaacgacgagcgtgacaccacgatgcctgtagcaatggcaacaacgttgcgcaaactattaactggcgaactacttactctagcttcccggcaacaattaatagactggatggaggcggataaagttgcaggaccacttctgcgctcggcccttccggctggctggtttattgctgataaatctggagccggtgagcgtgggtctcgcggtatcattgcagcactggggccagatggtaagccctcccgtatcgtagttatctacacgacggggagtcaggcaactatggatgaacgaaatagacagatcgctgagataggtgcctcactgattaagcattggtaactgtcagaccaagtttactcatatatactttagattgatttaaaacttcatttttaatttaaaaggatctaggtgaagatcctttttgataatctcatgaccaaaatcccttaacgtgagttttcgttccactgagcgtcagaccccgtagaaaagatcaaaggatcttcttgagatcctttttttctgcgcgtaatctgctgcttgcaaacaaaaaaaccaccgctaccagcggtggtttgtttgccggatcaagagctaccaactctttttccgaaggtaactggcttcagcagagcgcagataccaaatactgttcttctagtgtagccgtagttaggccaccacttcaagaactctgtagcaccgcctacatacctcgctctgctaatcctgttaccagtggctgctgccagtggcgataagtcgtgtcttaccgggttggactcaagacgatagttaccggataaggcgcagcggtcgggctgaacggggggttcgtgcacacagcccagcttggagcgaacgacctacaccgaactgagatacctacagcgtgagctatgagaaagcgccacgcttcccgaagggagaaaggcggacaggtatccggtaagcggcagggtcggaacaggagagcgcacgagggagcttccagggggaaacgcctggtatctttatagtcctgtcgggtttcgccacctctgacttgagcgtcgatttttgtgatgctcgtcaggggggcggagcctatggaaaaacgccagcaacgcggcctttttacggttcctggccttttgctggccttttgctcacatgttctttcctgcgttatcccctgattctgtggataaccgtattaccgcctttgagtgagctgataccgctcgccgcagccgaacgttgtttaattctgtgagcgtatggcaaacg

SEQ ID NO: 13 - DNA, 7185 bp, Artificial Sequence
  TK-SEL-mTyr-1
agcgcccaatacgcaaaccgcctctccccgcgcgttggccgattcattaatgcagctggcacgacaggtttcccgactggaaagcgggcagtgagcgcaacgcaattaatgtgagttagctcactcattaggcaccccaggctttacactttatgcttccggctcgtatgttgtgtggaattgtgagcggataacaatttcacacaggaaacagctatgaccatgattacgccaagctttgttacagatggaagggtcaaacttaataaaggatatttgttcgactttgtgattagtttgatgcgattcaaaaaagaatcctctctagctaccaccgcaatagatcctgttagatacatagatcctcgtcgtgatatcgcattttctaacgtgatggatatattaaagtcgaataaagtgaacaataattaattctttattgtcatcatgaacggcggacatattcagttgataatcggccccatgttttcaggtaaaagtacagaattaattagacgagttagacgttatcaaatagctcaatataaatgcgtgactataaaatattctaacgataatagatacggaacgggactatggacgcatgataagaataattttgaagcattggaagcaactaaactatgtgatgtcttggaatcaattacagatttctccgtgataggtatcgatgaaggacagttctttccagacattgtttaattctgtgagcgtatggcaaacggtaccgagctcggtttggaattagtgaaagcttaaaaattgaaattttattttttttttttggaatataaataagctcgaagtcgaccaccatgttcttggctgttttgtattgccttctgtggagtttccagatctctgatggccattttcctcgagcctgtgcctcctctaagaacttgttggcaaaagaatgctgcccaccatggatgggtgatgggagtccctgcggccagctttcaggcagaggttcctgccaggatatccttctgtccagtgcaccatctggacctcagttccccttcaaaggggtggatgaccgtgagtcctggccctctgtgttttataataggacctgccagtgctcaggcaacttcatgggtttcaactgcggaaactgtaagtttggatttgggggcccaaattgtacagagaagcgagtcttgattagaagaaacatttttgatttgagtgtctccgaaaagaataagttcttttcttacctcactttagcaaaacatactatcagctcagtctatgtcatccccacaggcacctatggccaaatgaacaatgggtcaacacccatgtttaatgatatcaacatctacgacctctttgtatggatgcattactatgtgtcaagggacacactgcttgggggctctgaaatatggagggacattgattttgcccatgaagcaccagggtttctgccttggcacagacttttcttgttattgtgggaacaagaaattcgagaactaactggggatgagaacttcactgttccatactgggattggagagatgcagaaaactgtgacatttgcacagatgagtacttgggaggtcgtcaccctgaaaatcctaacttactcagcccagcatccttcttctcctcctggcagatcatttgtagcagatcagaagagtataatagccatcaggttttatgcgatggaacacctgagggaccactattacgtaatcctggaaaccatgacaaagccaaaacccccaggctcccatcttcagcagatgtggaattttgtctgagtttgacccagtatgaatctggatcaatggatagaactgccaatttcagctttagaaacacactggaaggatttgccagtccactcacagggatagcagatccttctcaaagtagcatgcacaatgccttacatatctttatgaatggaacaatgtcccaagtacagggatcggccaacgatcccatttttcttcttcaccatgcttttgtggacagtatttttgaacaatggctgcgaaggcaccgccctcttttggaagtttacccagaagccaatgcacctatcggccataacagagactcttacatggttcctttcataccgctctatagaaatggtgatttcttcataacatccaaggatctgggatatgactacagctacctccaagagtcagatccaggcttttacagaaattatattgagccttacttggaacaagccagtcgtatctggccatggcttcttggggcagcactggtgggagctgttattgctgcagctctctctgggcttagcagtaggctatgccttcagaagaagaagaagaagaagcaaccccaggaggaaaggcagccactcctcatggacaaagacgactaccacagcttgctgtatcagagccatctgtgattaattaatttttatcgatctaattcaacaatgtctggagagctcggatccttctgtgagcgtatggcaaacgaaggaaaaatagttatagtagccgcactcgatgggacatttcaacgtaaaccgtttaataatattttgaatcttattccattatctgaaatggtggtaaaactaactgctgtgtgtatgaaatgctttaaggaggcttccttttctaaacgattgggtgaggaaaccgagatagagataataggaggtaatgatatgtatcaatcggtgtgtagaaagtgttacgtcggctcataatattatattttttatctaaaaaactaaaaataaacattgattaaattttaatataatacttaaaaatggatgttgtgtcgttagataaaccgtttatgtattttgaggaaattgataatgagttagattacgaaccagaaagtgcaaatgaggtcgcaaaaaaactgccgtatcaaggacagttaaaactattactaggagaattattttttcttagtaagttacagcgacacggtatattagatggtgccaccgtagtgtactagttaacggccgccagtgtgctggaattctagaaaagtagaaaatatattctaatttattgcacgggatgagcgaaaaatacatcgtcacctgggacatgttgcagatccatgcacgtaaactcgcaagccgactgatgccttctgaacaatggaaaggcattattgccgtaagccgtggcggtctggtaccgggtgcgttactggcgcgtgaactgggtattcgtcatgtcgataccgtttgtatttccagctacgatcacgacaaccagcgcgagcttaaagtgctgaaacgcgcagaaggcgatggcgaaggcttcatcgttattgatgacctggtggataccggtggtactgcggttgcgattcgtgaaatgtatccaaaagcgcactttgtcaccatcttcgcaaaaccggctggtcgtccgctggttgatgactatgttgttgatatcccgcaagatacctggattgaacagccgtgggatatgggcgtcgtattcgtcccgccaatctccggtcgctaaggatcagcttggcgtaatcaagccgaattctgcagatatccatcacactggcggccgctcgagcatgcatctagagggcccaattcgccctatagtgagtcgtattacaattcactggccgtcgttttacaacgtcgtgactgggaaaaccctggcgttacccaacttaatcgccttgcagcacatccccctttcgccagctggcgtaatagcgaagaggcccgcaccgatcgcccttcccaacagttgcgcagcctgaatggcgaatggacgcgccctgtagcggcgcattaagcgcggcgggtgtggtggttacgcgcagcgtgaccgctacacttgccagcgccctagcgcccgctcctttcgctttcttcccttcctttctcgccacgttcgccggctttccccgtcaagctctaaatcgggggctccctttagggttccgatttagtgctttacggcacctcgaccccaaaaaacttgattagggtgatggttcacgtagtgggccatcgccctgatagacggtttttcgccctttgacgttggagtccacgttctttaatagtggactcttgttccaaactggaacaacactcaaccctatctcggtctattcttttgatttataagggattttgccgatttcggcctattggttaaaaaatgagctgatttaacaaaaatttaacgcgaattttaacaaaattcagggcgcaagggctgctaaaggaagcggaacacgtagaaagccagtccgcagaaacggtgctgaccccggatgaatgtcagctactgggctatctggacaagggaaaacgcaagcgcaaagagaaagcaggtagcttgcagtgggcttacatggcgatagctagactgggcggttttatggacagcaagcgaaccggaattgccagctggggcgccctctggtaaggttgggaagccctgcaaagtaaactggatggctttcttgccgccaaggatctgatggcgcaggggatcaagatctgatcaagagacaggatgaggatcgtttcgcatgattgaacaagatggattgcacgcaggttctccggccgcttgggtggagaggctattcggctatgactgggcacaacagacaatcggctgctctgatgccgccgtgttccggctgtcagcgcaggggcgcccggttctttttgtcaagaccgacctgtccggtgccctgaatgaactgcaggacgaggcagcgcggctatcgtggctggccacgacgggcgttccttgcgcagctgtgctcgacgttgtcactgaagcgggaagggactggctgctattgggcgaagtgccggggcaggatctcctgtcatcccaccttgctcctgccgagaaagtatccatcatggctgatgcaatgcggcggctgcatacgcttgatccggctacctgcccattcgaccaccaagcgaaacatcgcatcgagcgagcacgtactcggatggaagccggtcttgtcgatcaggatgatctggacgaagagcatcaggggctcgcgccagccgaactgttcgccaggctcaaggcgcgcatgcccgacggcgaggatctcgtcgtgacccatggcgatgcctgcttgccgaatatcatggtggaaaatggccgcttttctggattcatcgactgtggccggctgggtgtggcggaccgctatcaggacatagcgttggctacccgtgatattgctgaagagcttggcggcgaatgggctgaccgcttcctcgtgctttacggtatcgccgctcccgattcgcagcgcatcgccttctatcgccttcttgacgagttcttctgaattgaaaaaggaagagtatgagtattcaacatttccgtgtcgcccttattcccttttttgcggcattttgccttcctgtttttgctcacccagaaacgctggtgaaagtaaaagatgctgaagatcagttgggtgcacgagtgggttacatcgaactggatctcaacagcggtaagatccttgagagttttcgccccgaagaacgttttccaatgatgagcacttttaaagttctgctatgtggcgcggtattatcccgtattgacgccgggcaagagcaactcggtcgccgcatacactattctcagaatgacttggttgagtactcaccagtcacagaaaagcatcttacggatggcatgacagtaagagaattatgcagtgctgccataaccatgagtgataacactgcggccaacttacttctgacaacgatcggaggaccgaaggagctaaccgcttttttgcacaacatgggggatcatgtaactcgccttgatcgttgggaaccggagctgaatgaagccataccaaacgacgagcgtgacaccacgatgcctgtagcaatggcaacaacgttgcgcaaactattaactggcgaactacttactctagcttcccggcaacaattaatagactggatggaggcggataaagttgcaggaccacttctgcgctcggcccttccggctggctggtttattgctgataaatctggagccggtgagcgtgggtctcgcggtatcattgcagcactggggccagatggtaagccctcccgtatcgtagttatctacacgacggggagtcaggcaactatggatgaacgaaatagacagatcgctgagataggtgcctcactgattaagcattggtaactgtcagaccaagtttactcatatatactttagattgatttaaaacttcatttttaatttaaaaggatctaggtgaagatcctttttgataatctcatgaccaaaatcccttaacgtgagttttcgttccactgagcgtcagaccccgtagaaaagatcaaaggatcttcttgagatcctttttttctgcgcgtaatctgctgcttgcaaacaaaaaaaccaccgctaccagcggtggtttgtttgccggatcaagagctaccaactctttttccgaaggtaactggcttcagcagagcgcagataccaaatactgttcttctagtgtagccgtagttaggccaccacttcaagaactctgtagcaccgcctacatacctcgctctgctaatcctgttaccagtggctgctgccagtggcgataagtcgtgtcttaccgggttggactcaagacgatagttaccggataaggcgcagcggtcgggctgaacggggggttcgtgcacacagcccagcttggagcgaacgacctacaccgaactgagatacctacagcgtgagctatgagaaagcgccacgcttcccgaagggagaaaggcggacaggtatccggtaagcggcagggtcggaacaggagagcgcacgagggagcttccagggggaaacgcctggtatctttatagtcctgtcgggtttcgccacctctgacttgagcgtcgatttttgtgatgctcgtcaggggggcggagcctatggaaaaacgccagcaacgcggcctttttacggttcctggccttttgctggccttttgctcacatgttctttcctgcgttatcccctgattctgtggataaccgtattaccgcctttgagtgagctgataccgctcgccgcagccgaacgttgtttaattctgtgagcgtatggcaaacg

SEQ ID NO: 14 - DNA, 35 bp, Artificial Sequence
  Ter-PacI-mTyr primer
gatcgataaaaattaattaatcacagatggctctg

SEQ ID NO: 15 - DNA, 8854 bp, Artificial Sequence
  TK-SE-Tyrp1-SE-mTyr
agcgcccaatacgcaaaccgcctctccccgcgcgttggccgattcattaatgcagctggcacgacaggtttcccgactggaaagcgggcagtgagcgcaacgcaattaatgtgagttagctcactcattaggcaccccaggctttacactttatgcttccggctcgtatgttgtgtggaattgtgagcggataacaatttcacacaggaaacagctatgaccatgattacgccaagctttgttacagatggaagggtcaaacttaataaaggatatttgttcgactttgtgattagtttgatgcgattcaaaaaagaatcctctctagctaccaccgcaatagatcctgttagatacatagatcctcgtcgtgatatcgcattttctaacgtgatggatatattaaagtcgaataaagtgaacaataattaattctttattgtcatcatgaacggcggacatattcagttgataatcggccccatgttttcaggtaaaagtacagaattaattagacgagttagacgttatcaaatagctcaatataaatgcgtgactataaaatattctaacgataatagatacggaacgggactatggacgcatgataagaataattttgaagcattggaagcaactaaactatgtgatgtcttggaatcaattacagatttctccgtgataggtatcgatgaaggacagttctttccagacattgtttaattctgtgagcgtatggcaaacggtaccgagctcaaaaattgaaaaactagcgtctttttttgctcgaagtcgaccaccatgagtgctcctaaactcctctctctgggctgtatcttcttccccttgctactttttcagcaggcccgggctcaattcccaagacagtgtgccactgttgaggctttgagaagtggtatgtgttgcccagacctgtcccctgtgtctgggcctgggacagaccgctgtggctcatcatcagggaggggcagatgtgaggcagtgactgcagactcccggccccacagccctcagtatccccatgatggcagagatgatcgggaggtctggcccttgcgcttcttcaataggacatgtcactgcaacggcaatttctcaggacacaactgtgggacgtgccgtcctggctggagaggagctgcctgtgaccagagggttctcatagtcaggagaaatcttctggacttaagtaaagaagaaaagaaccactttgtccgggccctggatatggcaaagcgcacaactcaccctttatttgtcattgccaccaggagatcagaagaaatactggggccagatggcaacacgccacaatttgagaacatttccatttataactactttgtttggacacactattactcagtcaaaaagactttccttggggtaggacaggaaagctttggtgaagtggatttctctcatgagggaccagcttttctcacatggcacaggtaccacctcctgcgtctggagaaagacatgcaggaaatgttgcaagagccttctttctcccttccttactggaattttgcaacggggaaaaatgtctgtgatatctgcacggatgacttgatgggatccagaagcaactttgattccactctaataagcccaaactctgtcttttctcaatggcgagtggtctgtgactccttggaagattatgataccctgggaacactttgtaacagcaccgaggatgggccaattaggagaaatccagctggaaatgtggccagaccaatggtgcaacgtcttcctgaaccacaggatgtcgctcagtgcttggaagttggtttatttgacacgcctcctttttattccaactctacaaacagtttccgaaacacagtggaaggttacagtgaccccacgggaaagtatgaccctgctgttcgaagtcttcacaatttggctcatctattcctgaatggaacagggggacaaacccatttgtctccaaatgatcctatttttgtcctcctgcacaccttcacagatgcagtctttgatgaatggctgaggagatacaatgctgatatatccacatttccattggaaaatgcccctattggacataatagacaatacaacatggtgccattctggcccccagtcaccaacacagaaatgtttgttactgctccagacaacctgggatacacttatgaaattcaatggccaagtcgggagtttagtgtacctgagataattgccatagcagtagttggcgctttgttactggttgcactcatttttgggactgcttcttatctgattcgtgccagacgcagtatggatgaagctaaccagcctctcctcactgatcagtatcaatgctatgctgaagaatatgaaaaactccagaatcctaatcagtctgtggtctaattaattaatttttatcgatctaattcaacaatgtctggagagctcaaaaattgaaaaactagcgtctttttttgctcgaagtcgaccaccatgttcttggctgttttgtattgccttctgtggagtttccagatctctgatggccattttcctcgagcctgtgcctcctctaagaacttgttggcaaaagaatgctgcccaccatggatgggtgatgggagtccctgcggccagctttcaggcagaggttcctgccaggatatccttctgtccagtgcaccatctggacctcagttccccttcaaaggggtggatgaccgtgagtcctggccctctgtgttttataataggacctgccagtgctcaggcaacttcatgggtttcaactgcggaaactgtaagtttggatttgggggcccaaattgtacagagaagcgagtcttgattagaagaaacatttttgatttgagtgtctccgaaaagaataagttcttttcttacctcactttagcaaaacatactatcagctcagtctatgtcatccccacaggcacctatggccaaatgaacaatgggtcaacacccatgtttaatgatatcaacatctacgacctctttgtatggatgcattactatgtgtcaagggacacactgcttgggggctctgaaatatggagggacattgattttgcccatgaagcaccagggtttctgccttggcacagacttttcttgttattgtgggaacaagaaattcgagaactaactggggatgagaacttcactgttccatactgggattggagagatgcagaaaactgtgacatttgcacagatgagtacttgggaggtcgtcaccctgaaaatcctaacttactcagcccagcatccttcttctcctcctggcagatcatttgtagcagatcagaagagtataatagccatcaggttttatgcgatggaacacctgagggaccactattacgtaatcctggaaaccatgacaaagccaaaacccccaggctcccatcttcagcagatgtggaattttgtctgagtttgacccagtatgaatctggatcaatggatagaactgccaatttcagctttagaaacacactggaaggatttgccagtccactcacagggatagcagatccttctcaaagtagcatgcacaatgccttacatatctttatgaatggaacaatgtcccaagtacagggatcggccaacgatcccatttttcttcttcaccatgcttttgtggacagtatttttgaacaatggctgcgaaggcaccgccctcttttggaagtttacccagaagccaatgcacctatcggccataacagagactcttacatggttcctttcataccgctctatagaaatggtgatttcttcataacatccaaggatctgggatatgactacagctacctccaagagtcagatccaggcttttacagaaattatattgagccttacttggaacaagccagtcgtatctggccatggcttcttggggcagcactggtgggagctgttattgctgcagctctctctgggcttagcagtaggctatgccttcagaagaagaagaagaagaagcaaccccaggaggaaaggcagccactcctcatggacaaagacgactaccacagcttgctgtatcagagccatctgtgattaattaatttttatcgatctaattcaacaatgtctggagagctcggatccttctgtgagcgtatggcaaacgaaggaaaaatagttatagtagccgcactcgatgggacatttcaacgtaaaccgtttaataatattttgaatcttattccattatctgaaatggtggtaaaactaactgctgtgtgtatgaaatgctttaaggaggcttccttttctaaacgattgggtgaggaaaccgagatagagataataggaggtaatgatatgtatcaatcggtgtgtagaaagtgttacgtcggctcataatattatattttttatctaaaaaactaaaaataaacattgattaaattttaatataatacttaaaaatggatgttgtgtcgttagataaaccgtttatgtattttgaggaaattgataatgagttagattacgaaccagaaagtgcaaatgaggtcgcaaaaaaactgccgtatcaaggacagttaaaactattactaggagaattattttttcttagtaagttacagcgacacggtatattagatggtgccaccgtagtgtactagttaacggccgccagtgtgctggaattctagaaaagtagaaaatatattctaatttattgcacgggatgagcgaaaaatacatcgtcacctgggacatgttgcagatccatgcacgtaaactcgcaagccgactgatgccttctgaacaatggaaaggcattattgccgtaagccgtggcggtctggtaccgggtgcgttactggcgcgtgaactgggtattcgtcatgtcgataccgtttgtatttccagctacgatcacgacaaccagcgcgagcttaaagtgctgaaacgcgcagaaggcgatggcgaaggcttcatcgttattgatgacctggtggataccggtggtactgcggttgcgattcgtgaaatgtatccaaaagcgcactttgtcaccatcttcgcaaaaccggctggtcgtccgctggttgatgactatgttgttgatatcccgcaagatacctggattgaacagccgtgggatatgggcgtcgtattcgtcccgccaatctccggtcgctaaggatcagcttggcgtaatcaagccgaattctgcagatatccatcacactggcggccgctcgagcatgcatctagagggcccaattcgccctatagtgagtcgtattacaattcactggccgtcgttttacaacgtcgtgactgggaaaaccctggcgttacccaacttaatcgccttgcagcacatccccctttcgccagctggcgtaatagcgaagaggcccgcaccgatcgcccttcccaacagttgcgcagcctgaatggcgaatggacgcgccctgtagcggcgcattaagcgcggcgggtgtggtggttacgcgcagcgtgaccgctacacttgccagcgccctagcgcccgctcctttcgctttcttcccttcctttctcgccacgttcgccggctttccccgtcaagctctaaatcgggggctccctttagggttccgatttagtgctttacggcacctcgaccccaaaaaacttgattagggtgatggttcacgtagtgggccatcgccctgatagacggtttttcgccctttgacgttggagtccacgttctttaatagtggactcttgttccaaactggaacaacactcaaccctatctcggtctattcttttgatttataagggattttgccgatttcggcctattggttaaaaaatgagctgatttaacaaaaatttaacgcgaattttaacaaaattcagggcgcaagggctgctaaaggaagcggaacacgtagaaagccagtccgcagaaacggtgctgaccccggatgaatgtcagctactgggctatctggacaagggaaaacgcaagcgcaaagagaaagcaggtagcttgcagtgggcttacatggcgatagctagactgggcggttttatggacagcaagcgaaccggaattgccagctggggcgccctctggtaaggttgggaagccctgcaaagtaaactggatggctttcttgccgccaaggatctgatggcgcaggggatcaagatctgatcaagagacaggatgaggatcgtttcgcatgattgaacaagatggattgcacgcaggttctccggccgcttgggtggagaggctattcggctatgactgggcacaacagacaatcggctgctctgatgccgccgtgttccggctgtcagcgcaggggcgcccggttctttttgtcaagaccgacctgtccggtgccctgaatgaactgcaggacgaggcagcgcggctatcgtggctggccacgacgggcgttccttgcgcagctgtgctcgacgttgtcactgaagcgggaagggactggctgctattgggcgaagtgccggggcaggatctcctgtcatcccaccttgctcctgccgagaaagtatccatcatggctgatgcaatgcggcggctgcatacgcttgatccggctacctgcccattcgaccaccaagcgaaacatcgcatcgagcgagcacgtactcggatggaagccggtcttgtcgatcaggatgatctggacgaagagcatcaggggctcgcgccagccgaactgttcgccaggctcaaggcgcgcatgcccgacggcgaggatctcgtcgtgacccatggcgatgcctgcttgccgaatatcatggtggaaaatggccgcttttctggattcatcgactgtggccggctgggtgtggcggaccgctatcaggacatagcgttggctacccgtgatattgctgaagagcttggcggcgaatgggctgaccgcttcctcgtgctttacggtatcgccgctcccgattcgcagcgcatcgccttctatcgccttcttgacgagttcttctgaattgaaaaaggaagagtatgagtattcaacatttccgtgtcgcccttattcccttttttgcggcattttgccttcctgtttttgctcacccagaaacgctggtgaaagtaaaagatgctgaagatcagttgggtgcacgagtgggttacatcgaactggatctcaacagcggtaagatccttgagagttttcgccccgaagaacgttttccaatgatgagcacttttaaagttctgctatgtggcgcggtattatcccgtattgacgccgggcaagagcaactcggtcgccgcatacactattctcagaatgacttggttgagtactcaccagtcacagaaaagcatcttacggatggcatgacagtaagagaattatgcagtgctgccataaccatgagtgataacactgcggccaacttacttctgacaacgatcggaggaccgaaggagctaaccgcttttttgcacaacatgggggatcatgtaactcgccttgatcgttgggaaccggagctgaatgaagccataccaaacgacgagcgtgacaccacgatgcctgtagcaatggcaacaacgttgcgcaaactattaactggcgaactacttactctagcttcccggcaacaattaatagactggatggaggcggataaagttgcaggaccacttctgcgctcggcccttccggctggctggtttattgctgataaatctggagccggtgagcgtgggtctcgcggtatcattgcagcactggggccagatggtaagccctcccgtatcgtagttatctacacgacggggagtcaggcaactatggatgaacgaaatagacagatcgctgagataggtgcctcactgattaagcattggtaactgtcagaccaagtttactcatatatactttagattgatttaaaacttcatttttaatttaaaaggatctaggtgaagatcctttttgataatctcatgaccaaaatcccttaacgtgagttttcgttccactgagcgtcagaccccgtagaaaagatcaaaggatcttcttgagatcctttttttctgcgcgtaatctgctgcttgcaaacaaaaaaaccaccgctaccagcggtggtttgtttgccggatcaagagctaccaactctttttccgaaggtaactggcttcagcagagcgcagataccaaatactgttcttctagtgtagccgtagttaggccaccacttcaagaactctgtagcaccgcctacatacctcgctctgctaatcctgttaccagtggctgctgccagtggcgataagtcgtgtcttaccgggttggactcaagacgatagttaccggataaggcgcagcggtcgggctgaacggggggttcgtgcacacagcccagcttggagcgaacgacctacaccgaactgagatacctacagcgtgagctatgagaaagcgccacgcttcccgaagggagaaaggcggacaggtatccggtaagcggcagggtcggaacaggagagcgcacgagggagcttccagggggaaacgcctggtatctttatagtcctgtcgggtttcgccacctctgacttgagcgtcgatttttgtgatgctcgtcaggggggcggagcctatggaaaaacgccagcaacgcggcctttttacggttcctggccttttgctggccttttgctcacatgttctttcctgcgttatcccctgattctgtggataaccgtattaccgcctttgagtgagctgataccgctcgccgcagccgaacgttgtttaattctgtgagcgtatggcaaacg

SEQ ID NO: 16 - DNA, 4059 bp, Artificial Sequence
  pNCVVf14.5lT
gacgtctaagaaaccattattatcatgacattaacctataaaaataggcgtatcacgaggccctttcgtctcgcgcgtttcggtgatgacggtgaaaacctctgacacatgcagctcccggagacggtcacagcttgtctgtaagcggatgccgggagcagacaagcccgtcagggcgcgtcagcgggtgttggcgggtgtcggggctggcttaactatgcggcatcagagcagattgtactgagagtgcaccatatgtagaagaattgataaatatgaaaccttttaagaatatgaataaaataacaattaatcaaaaggataattgtatattagcaaatcgatgctttgttaaaatagatactcctagatacataccatcgacatccattagcagttctaatatcatcagaatacggaatcatgattttacattatctgaattattgtattcaccgtttcattttcaacagcctcagtttcaatatctccttcctgggtttgtattaacgtgtattgataaagtttcgaaacagcaaaaagaatgtaaatattgtatctctaatcgtggagatgatgatagtttaagcattaatctatttattccgactattaacaagtctatatatattattatcggtttacggatgaaaaatttttggaagcctaaattcgaaatagaataatgtttttatattatacatgtgctaaaagaatgatcgatacagtttaagtgaaagctagagaggggtttttaaatggtcatcggtttagtcatattcgtgtctgtaagcttcgcaggatcctgcggccgccatcgtcggtgtgttgtctaacgtattggacatgtttatgtacgtagaagaaaataatgaagaggatgctagaatcaaggaggagcaagaactactgttgctatattaatacataattgaaaatctaccaacttaaatacaccgcctataaatttacaatgaaacacagattgtattctgaaggattgagtattagtaatgatttaaactcgataatcggtcaacaatctacaatggatacggatatagaaatagacgaagatgacatcatggaacttcttaatatattgactgagttaggttgtgatgtcgactttgatgaaaattttagcgatatagccgatgatattctagaatcgttgatagaacaggatgtataagtttttatgttaactaaatgtggccatttgcatcggtacctgcgggagcaaaatgtaggctggtagaaacactaccagaaaatatggattttagatccgatcatttaacaacatttgaatgttttaacgaaattatcactctagctaagaaatatatatacatagcatctttttgttgtaatcctctgaattctagaaaagtagaaaatatattctaatttattgcacgggatgagcgaaaaatacatcgtcacctgggacatgttgcagatccatgcacgtaaactcgcaagccgactgatgccttctgaacaatggaaaggcattattgccgtaagccgtggcggtctggtaccgggtgcgttactggcgcgtgaactgggtattcgtcatgtcgataccgtttgtatttccagctacgatcacgacaaccagcgcgagcttaaagtgctgaaacgcgcagaaggcgatggcgaaggcttcatcgttattgatgacctggtggataccggtggtactgcggttgcgattcgtgaaatgtatccaaaagcgcactttgtcaccatcttcgcaaaaccggctggtcgtccgctggttgatgactatgttgttgatatcccgcaagatacctggattgaacagccgtgggatatgggcgtcgtattcgtcccgccaatctccggtcgctaaggatcagcttggcgtaatcatggtcatagctgtttcctgtgtgaaattgttatccgctcacaattccacacaacatacgagccggaagcataaagtgtaaagcctggggtgcctaatgagtgagctaactcacattaattgcgttgcgctcactgcccgctttccagtcgggaaacctgtcgtgccagctgcattaatgaatcggccaacgcgcggggagaggcggtttgcgtattgggcgctcttccgcttcctcgctcactgactcgctgcgctcggtcgttcggctgcggcgagcggtatcagctcactcaaaggcggtaatacggttatccacagaatcaggggataacgcaggaaagaacatgtgagcaaaaggccagcaaaaggccaggaaccgtaaaaaggccgcgttgctggcgtttttccataggctccgcccccctgacgagcatcacaaaaatcgacgctcaagtcagaggtggcgaaacccgacaggactataaagataccaggcgtttccccctggaagctccctcgtgcgctctcctgttccgaccctgccgcttaccggatacctgtccgcctttctcccttcgggaagcgtggcgctttctcatagctcacgctgtaggtatctcagttcggtgtaggtcgttcgctccaagctgggctgtgtgcacgaaccccccgttcagcccgaccgctgcgccttatccggtaactatcgtcttgagtccaacccggtaagacacgacttatcgccactggcagcagccactggtaacaggattagcagagcgaggtatgtaggcggtgctacagagttcttgaagtggtggcctaactacggctacactagaaggacagtatttggtatctgcgctctgctgaagccagttaccttcggaaaaagagttggtagctcttgatccggcaaacaaaccaccgctggtagcggtggtttttttgtttgcaagcagcagattacgcgcagaaaaaaaggatctcaagaagatcctttgatcttttctacggggtctgacgctcagtggaacgaaaactcacgttaagggattttggtcatgagattatcaaaaaggatcttcacctagatccttttaaattaaaaatgaagttttaaatcaatctaaagtatatatgagtaaacttggtctgacagttaccaatgcttaatcagtgaggcacctatctcagcgatctgtctatttcgttcatccatagttgcctgactccccgtcgtgtagataactacgatacgggagggcttaccatctggccccagtgctgcaatgataccgcgagacccacgctcaccggctccagatttatcagcaataaaccagccagccggaagggccgagcgcagaagtggtcctgcaactttatccgcctccatccagtctattaattgttgccgggaagctagagtaagtagttcgccagttaatagtttgcgcaacgttgttgccattgctacaggcatcgtggtgtcacgctcgtcgtttggtatggcttcattcagctccggttcccaacgatcaaggcgagttacatgatcccccatgttgtgcaaaaaagcggttagctccttcggtcctccgatcgttgtcagaagtaagttggccgcagtgttatcactcatggttatggcagcactgcataattctcttactgtcatgccatccgtaagatgcttttctgtgactggtgagtactcaaccaagtcattctgagaatagtgtatgcggcgaccgagttgctcttgcccggcgtcaatacgggataataccgcgccacatagcagaactttaaaagtgctcatcattggaaaacgttcttcggggcgaaaactctcaaggatcttaccgctgttgagatccagttcgatgtaacccactcgtgcacccaactgatcttcagcatcttttactttcaccagcgtttctgggtgagcaaaaacaggaaggcaaaatgccgcaaaaaagggaataagggcgacacggaaatgttgaatactcatactcttcctttttcaatattattgaagcatttatcagggttattgtctcatgagcggatacatatttgaatgtatttagaaaaataaacaaataggggttccgcgcacatttccccgaaaagtgccacct

SEQ ID NO: 17 - DNA, 8923 bp, Artificial Sequence
  TK-SEL-Tyrp1-SEL-mTyr
agcgcccaatacgcaaaccgcctctccccgcgcgttggccgattcattaatgcagctggcacgacaggtttcccgactggaaagcgggcagtgagcgcaacgcaattaatgtgagttagctcactcattaggcaccccaggctttacactttatgcttccggctcgtatgttgtgtggaattgtgagcggataacaatttcacacaggaaacagctatgaccatgattacgccaagctttgttacagatggaagggtcaaacttaataaaggatatttgttcgactttgtgattagtttgatgcgattcaaaaaagaatcctctctagctaccaccgcaatagatcctgttagatacatagatcctcgtcgtgatatcgcattttctaacgtgatggatatattaaagtcgaataaagtgaacaataattaattctttattgtcatcatgaacggcggacatattcagttgataatcggccccatgttttcaggtaaaagtacagaattaattagacgagttagacgttatcaaatagctcaatataaatgcgtgactataaaatattctaacgataatagatacggaacgggactatggacgcatgataagaataattttgaagcattggaagcaactaaactatgtgatgtcttggaatcaattacagatttctccgtgataggtatcgatgaaggacagttctttccagacattgtttaattctgtgagcgtatggcaaacggtaccgagctcggtttggaattagtgaaagcttaaaaattgaaattttattttttttttttggaatataaataagctcgaagtcgaccaccatgagtgctcctaaactcctctctctgggctgtatcttcttccccttgctactttttcagcaggcccgggctcaattcccaagacagtgtgccactgttgaggctttgagaagtggtatgtgttgcccagacctgtcccctgtgtctgggcctgggacagaccgctgtggctcatcatcagggaggggcagatgtgaggcagtgactgcagactcccggccccacagccctcagtatccccatgatggcagagatgatcgggaggtctggcccttgcgcttcttcaataggacatgtcactgcaacggcaatttctcaggacacaactgtgggacgtgccgtcctggctggagaggagctgcctgtgaccagagggttctcatagtcaggagaaatcttctggacttaagtaaagaagaaaagaaccactttgtccgggccctggatatggcaaagcgcacaactcaccctttatttgtcattgccaccaggagatcagaagaaatactggggccagatggcaacacgccacaatttgagaacatttccatttataactactttgtttggacacactattactcagtcaaaaagactttccttggggtaggacaggaaagctttggtgaagtggatttctctcatgagggaccagcttttctcacatggcacaggtaccacctcctgcgtctggagaaagacatgcaggaaatgttgcaagagccttctttctcccttccttactggaattttgcaacggggaaaaatgtctgtgatatctgcacggatgacttgatgggatccagaagcaactttgattccactctaataagcccaaactctgtcttttctcaatggcgagtggtctgtgactccttggaagattatgataccctgggaacactttgtaacagcaccgaggatgggccaattaggagaaatccagctggaaatgtggccagaccaatggtgcaacgtcttcctgaaccacaggatgtcgctcagtgcttggaagttggtttatttgacacgcctcctttttattccaactctacaaacagtttccgaaacacagtggaaggttacagtgaccccacgggaaagtatgaccctgctgttcgaagtcttcacaatttggctcatctattcctgaatggaacagggggacaaacccatttgtctccaaatgatcctatttttgtcctcctgcacaccttcacagatgcagtctttgatgaatggctgaggagatacaatgctgatatatccacatttccattggaaaatgcccctattggacataatagacaatacaacatggtgccattctggcccccagtcaccaacacagaaatgtttgttactgctccagacaacctgggatacacttatgaaattcaatggccaagtcgggagtttagtgtacctgagataattgccatagcagtagttggcgctttgttactggttgcactcatttttgggactgcttcttatctgattcgtgccagacgcagtatggatgaagctaaccagcctctcctcactgatcagtatcaatgctatgctgaagaatatgaaaaactccagaatcctaatcagtctgtggtctaattaattaatttttatcgatctaattcaacaatgtctggagagctcggtttggaattagtgaaagcttaaaaattgaaattttattttttttttttggaatataaataagctcgaagtcgaccaccatgttcttggctgttttgtattgccttctgtggagtttccagatctctgatggccattttcctcgagcctgtgcctcctctaagaacttgttggcaaaagaatgctgcccaccatggatgggtgatgggagtccctgcggccagctttcaggcagaggttcctgccaggatatccttctgtccagtgcaccatctggacctcagttccccttcaaaggggtggatgaccgtgagtcctggccctctgtgttttataataggacctgccagtgctcaggcaacttcatgggtttcaactgcggaaactgtaagtttggatttgggggcccaaattgtacagagaagcgagtcttgattagaagaaacatttttgatttgagtgtctccgaaaagaataagttcttttcttacctcactttagcaaaacatactatcagctcagtctatgtcatccccacaggcacctatggccaaatgaacaatgggtcaacacccatgtttaatgatatcaacatctacgacctctttgtatggatgcattactatgtgtcaagggacacactgcttgggggctctgaaatatggagggacattgattttgcccatgaagcaccagggtttctgccttggcacagacttttcttgttattgtgggaacaagaaattcgagaactaactggggatgagaacttcactgttccatactgggattggagagatgcagaaaactgtgacatttgcacagatgagtacttgggaggtcgtcaccctgaaaatcctaacttactcagcccagcatccttcttctcctcctggcagatcatttgtagcagatcagaagagtataatagccatcaggttttatgcgatggaacacctgagggaccactattacgtaatcctggaaaccatgacaaagccaaaacccccaggctcccatcttcagcagatgtggaattttgtctgagtttgacccagtatgaatctggatcaatggatagaactgccaatttcagctttagaaacacactggaaggatttgccagtccactcacagggatagcagatccttctcaaagtagcatgcacaatgccttacatatctttatgaatggaacaatgtcccaagtacagggatcggccaacgatcccatttttcttcttcaccatgcttttgtggacagtatttttgaacaatggctgcgaaggcaccgccctcttttggaagtttacccagaagccaatgcacctatcggccataacagagactcttacatggttcctttcataccgctctatagaaatggtgatttcttcataacatccaaggatctgggatatgactacagctacctccaagagtcagatccaggcttttacagaaattatattgagccttacttggaacaagccagtcgtatctggccatggcttcttggggcagcactggtgggagctgttattgctgcagctctctctgggcttagcagtaggctatgccttcagaagaagaagaagaagaagcaaccccaggaggaaaggcagccactcctcatggacaaagacgactaccacagcttgctgtatcagagccatctgtgattaattaatttttatcgatctaattcaacaatgtctggagagctcgatccttctgtgagcgtatggcaaacgaaggaaaaatagttatagtagccgcactcgatgggacatttcaacgtaaaccgtttaataatattttgaatcttattccattatctgaaatggtggtaaaactaactgctgtgtgtatgaaatgctttaaggaggcttccttttctaaacgattgggtgaggaaaccgagatagagataataggaggtaatgatatgtatcaatcggtgtgtagaaagtgttacgtcggctcataatattatattttttatctaaaaaactaaaaataaacattgattaaattttaatataatacttaaaaatggatgttgtgtcgttagataaaccgtttatgtattttgaggaaattgataatgagttagattacgaaccagaaagtgcaaatgaggtcgcaaaaaaactgccgtatcaaggacagttaaaactattactaggagaattattttttcttagtaagttacagcgacacggtatattagatggtgccaccgtagtgtactagttaacggccgccagtgtgctggaattctagaaaagtagaaaatatattctaatttattgcacgggatgagcgaaaaatacatcgtcacctgggacatgttgcagatccatgcacgtaaactcgcaagccgactgatgccttctgaacaatggaaaggcattattgccgtaagccgtggcggtctggtaccgggtgcgttactggcgcgtgaactgggtattcgtcatgtcgataccgtttgtatttccagctacgatcacgacaaccagcgcgagcttaaagtgctgaaacgcgcagaaggcgatggcgaaggcttcatcgttattgatgacctggtggataccggtggtactgcggttgcgattcgtgaaatgtatccaaaagcgcactttgtcaccatcttcgcaaaaccggctggtcgtccgctggttgatgactatgttgttgatatcccgcaagatacctggattgaacagccgtgggatatgggcgtcgtattcgtcccgccaatctccggtcgctaaggatcagcttggcgtaatcaagccgaattctgcagatatccatcacactggcggccgctcgagcatgcatctagagggcccaattcgccctatagtgagtcgtattacaattcactggccgtcgttttacaacgtcgtgactgggaaaaccctggcgttacccaacttaatcgccttgcagcacatccccctttcgccagctggcgtaatagcgaagaggcccgcaccgatcgcccttcccaacagttgcgcagcctgaatggcgaatggacgcgccctgtagcggcgcattaagcgcggcgggtgtggtggttacgcgcagcgtgaccgctacacttgccagcgccctagcgcccgctcctttcgctttcttcccttcctttctcgccacgttcgccggctttccccgtcaagctctaaatcgggggctccctttagggttccgatttagtgctttacggcacctcgaccccaaaaaacttgattagggtgatggttcacgtagtgggccatcgccctgatagacggtttttcgccctttgacgttggagtccacgttctttaatagtggactcttgttccaaactggaacaacactcaaccctatctcggtctattcttttgatttataagggattttgccgatttcggcctattggttaaaaaatgagctgatttaacaaaaatttaacgcgaattttaacaaaattcagggcgcaagggctgctaaaggaagcggaacacgtagaaagccagtccgcagaaacggtgctgaccccggatgaatgtcagctactgggctatctggacaagggaaaacgcaagcgcaaagagaaagcaggtagcttgcagtgggcttacatggcgatagctagactgggcggttttatggacagcaagcgaaccggaattgccagctggggcgccctctggtaaggttgggaagccctgcaaagtaaactggatggctttcttgccgccaaggatctgatggcgcaggggatcaagatctgatcaagagacaggatgaggatcgtttcgcatgattgaacaagatggattgcacgcaggttctccggccgcttgggtggagaggctattcggctatgactgggcacaacagacaatcggctgctctgatgccgccgtgttccggctgtcagcgcaggggcgcccggttctttttgtcaagaccgacctgtccggtgccctgaatgaactgcaggacgaggcagcgcggctatcgtggctggccacgacgggcgttccttgcgcagctgtgctcgacgttgtcactgaagcgggaagggactggctgctattgggcgaagtgccggggcaggatctcctgtcatcccaccttgctcctgccgagaaagtatccatcatggctgatgcaatgcggcggctgcatacgcttgatccggctacctgcccattcgaccaccaagcgaaacatcgcatcgagcgagcacgtactcggatggaagccggtcttgtcgatcaggatgatctggacgaagagcatcaggggctcgcgccagccgaactgttcgccaggctcaaggcgcgcatgcccgacggcgaggatctcgtcgtgacccatggcgatgcctgcttgccgaatatcatggtggaaaatggccgcttttctggattcatcgactgtggccggctgggtgtggcggaccgctatcaggacatagcgttggctacccgtgatattgctgaagagcttggcggcgaatgggctgaccgcttcctcgtgctttacggtatcgccgctcccgattcgcagcgcatcgccttctatcgccttcttgacgagttcttctgaattgaaaaaggaagagtatgagtattcaacatttccgtgtcgcccttattcccttttttgcggcattttgccttcctgtttttgctcacccagaaacgctggtgaaagtaaaagatgctgaagatcagttgggtgcacgagtgggttacatcgaactggatctcaacagcggtaagatccttgagagttttcgccccgaagaacgttttccaatgatgagcacttttaaagttctgctatgtggcgcggtattatcccgtattgacgccgggcaagagcaactcggtcgccgcatacactattctcagaatgacttggttgagtactcaccagtcacagaaaagcatcttacggatggcatgacagtaagagaattatgcagtgctgccataaccatgagtgataacactgcggccaacttacttctgacaacgatcggaggaccgaaggagctaaccgcttttttgcacaacatgggggatcatgtaactcgccttgatcgttgggaaccggagctgaatgaagccataccaaacgacgagcgtgacaccacgatgcctgtagcaatggcaacaacgttgcgcaaactattaactggcgaactacttactctagcttcccggcaacaattaatagactggatggaggcggataaagttgcaggaccacttctgcgctcggcccttccggctggctggtttattgctgataaatctggagccggtgagcgtgggtctcgcggtatcattgcagcactggggccagatggtaagccctcccgtatcgtagttatctacacgacggggagtcaggcaactatggatgaacgaaatagacagatcgctgagataggtgcctcactgattaagcattggtaactgtcagaccaagtttactcatatatactttagattgatttaaaacttcatttttaatttaaaaggatctaggtgaagatcctttttgataatctcatgaccaaaatcccttaacgtgagttttcgttccactgagcgtcagaccccgtagaaaagatcaaaggatcttcttgagatcctttttttctgcgcgtaatctgctgcttgcaaacaaaaaaaccaccgctaccagcggtggtttgtttgccggatcaagagctaccaactctttttccgaaggtaactggcttcagcagagcgcagataccaaatactgttcttctagtgtagccgtagttaggccaccacttcaagaactctgtagcaccgcctacatacctcgctctgctaatcctgttaccagtggctgctgccagtggcgataagtcgtgtcttaccgggttggactcaagacgatagttaccggataaggcgcagcggtcgggctgaacggggggttcgtgcacacagcccagcttggagcgaacgacctacaccgaactgagatacctacagcgtgagctatgagaaagcgccacgcttcccgaagggagaaaggcggacaggtatccggtaagcggcagggtcggaacaggagagcgcacgagggagcttccagggggaaacgcctggtatctttatagtcctgtcgggtttcgccacctctgacttgagcgtcgatttttgtgatgctcgtcaggggggcggagcctatggaaaaacgccagcaacgcggcctttttacggttcctggccttttgctggccttttgctcacatgttctttcctgcgttatcccctgattctgtggataaccgtattaccgcctttgagtgagctgataccgctcgccgcagccgaacgttgtttaattctgtgagcgtatggcaaacg

SEQ ID NO: 18 - DNA, 8893 bp, Artificial Sequence
  TK-SE-Tyrp1-SEL-mTyr
agcgcccaatacgcaaaccgcctctccccgcgcgttggccgattcattaatgcagctggcacgacaggtttcccgactggaaagcgggcagtgagcgcaacgcaattaatgtgagttagctcactcattaggcaccccaggctttacactttatgcttccggctcgtatgttgtgtggaattgtgagcggataacaatttcacacaggaaacagctatgaccatgattacgccaagctttgttacagatggaagggtcaaacttaataaaggatatttgttcgactttgtgattagtttgatgcgattcaaaaaagaatcctctctagctaccaccgcaatagatcctgttagatacatagatcctcgtcgtgatatcgcattttctaacgtgatggatatattaaagtcgaataaagtgaacaataattaattctttattgtcatcatgaacggcggacatattcagttgataatcggccccatgttttcaggtaaaagtacagaattaattagacgagttagacgttatcaaatagctcaatataaatgcgtgactataaaatattctaacgataatagatacggaacgggactatggacgcatgataagaataattttgaagcattggaagcaactaaactatgtgatgtcttggaatcaattacagatttctccgtgataggtatcgatgaaggacagttctttccagacattgtttaattctgtgagcgtatggcaaacggtaccgagctcaaaaattgaaaaactagcgtctttttttgctcgaagtcgaccaccatgagtgctcctaaactcctctctctgggctgtatcttcttccccttgctactttttcagcaggcccgggctcaattcccaagacagtgtgccactgttgaggctttgagaagtggtatgtgttgcccagacctgtcccctgtgtctgggcctgggacagaccgctgtggctcatcatcagggaggggcagatgtgaggcagtgactgcagactcccggccccacagccctcagtatccccatgatggcagagatgatcgggaggtctggcccttgcgcttcttcaataggacatgtcactgcaacggcaatttctcaggacacaactgtgggacgtgccgtcctggctggagaggagctgcctgtgaccagagggttctcatagtcaggagaaatcttctggacttaagtaaagaagaaaagaaccactttgtccgggccctggatatggcaaagcgcacaactcaccctttatttgtcattgccaccaggagatcagaagaaatactggggccagatggcaacacgccacaatttgagaacatttccatttataactactttgtttggacacactattactcagtcaaaaagactttccttggggtaggacaggaaagctttggtgaagtggatttctctcatgagggaccagcttttctcacatggcacaggtaccacctcctgcgtctggagaaagacatgcaggaaatgttgcaagagccttctttctcccttccttactggaattttgcaacggggaaaaatgtctgtgatatctgcacggatgacttgatgggatccagaagcaactttgattccactctaataagcccaaactctgtcttttctcaatggcgagtggtctgtgactccttggaagattatgataccctgggaacactttgtaacagcaccgaggatgggccaattaggagaaatccagctggaaatgtggccagaccaatggtgcaacgtcttcctgaaccacaggatgtcgctcagtgcttggaagttggtttatttgacacgcctcctttttattccaactctacaaacagtttccgaaacacagtggaaggttacagtgaccccacgggaaagtatgaccctgctgttcgaagtcttcacaatttggctcatctattcctgaatggaacagggggacaaacccatttgtctccaaatgatcctatttttgtcctcctgcacaccttcacagatgcagtctttgatgaatggctgaggagatacaatgctgatatatccacatttccattggaaaatgcccctattggacataatagacaatacaacatggtgccattctggcccccagtcaccaacacagaaatgtttgttactgctccagacaacctgggatacacttatgaaattcaatggccaagtcgggagtttagtgtacctgagataattgccatagcagtagttggcgctttgttactggttgcactcatttttgggactgcttcttatctgattcgtgccagacgcagtatggatgaagctaaccagcctctcctcactgatcagtatcaatgctatgctgaagaatatgaaaaactccagaatcctaatcagtctgtggtctaattaattaattaatttttatcgatctaattcaacaatgtctggagagctcggtttggaattagtgaaagcttaaaaattgaaattttattttttttttttggaatataaataagctcgaagtcgaccaccatgttcttggctgttttgtattgccttctgtggagtttccagatctctgatggccattttcctcgagcctgtgcctcctctaagaacttgttggcaaaagaatgctgcccaccatggatgggtgatgggagtccctgcggccagctttcaggcagaggttcctgccaggatatccttctgtccagtgcaccatctggacctcagttccccttcaaaggggtggatgaccgtgagtcctggccctctgtgttttataataggacctgccagtgctcaggcaacttcatgggtttcaactgcggaaactgtaagtttggatttgggggcccaaattgtacagagaagcgagtcttgattagaagaaacatttttgatttgagtgtctccgaaaagaataagttcttttcttacctcactttagcaaaacatactatcagctcagtctatgtcatccccacaggcacctatggccaaatgaacaatgggtcaacacccatgtttaatgatatcaacatctacgacctctttgtatggatgcattactatgtgtcaagggacacactgcttgggggctctgaaatatggagggacattgattttgcccatgaagcaccagggtttctgccttggcacagacttttcttgttattgtgggaacaagaaattcgagaactaactggggatgagaacttcactgttccatactgggattggagagatgcagaaaactgtgacatttgcacagatgagtacttgggaggtcgtcaccctgaaaatcctaacttactcagcccagcatccttcttctcctcctggcagatcatttgtagcagatcagaagagtataatagccatcaggttttatgcgatggaacacctgagggaccactattacgtaatcctggaaaccatgacaaagccaaaacccccaggctcccatcttcagcagatgtggaattttgtctgagtttgacccagtatgaatctggatcaatggatagaactgccaatttcagctttagaaacacactggaaggatttgccagtccactcacagggatagcagatccttctcaaagtagcatgcacaatgccttacatatctttatgaatggaacaatgtcccaagtacagggatcggccaacgatcccatttttcttcttcaccatgcttttgtggacagtatttttgaacaatggctgcgaaggcaccgccctcttttggaagtttacccagaagccaatgcacctatcggccataacagagactcttacatggttcctttcataccgctctatagaaatggtgatttcttcataacatccaaggatctgggatatgactacagctacctccaagagtcagatccaggcttttacagaaattatattgagccttacttggaacaagccagtcgtatctggccatggcttcttggggcagcactggtgggagctgttattgctgcagctctctctgggcttagcagtaggctatgccttcagaagaagaagaagaagaagcaaccccaggaggaaaggcagccactcctcatggacaaagacgactaccacagcttgctgtatcagagccatctgtgattaattaatttttatcgatctaattcaacaatgtctggagagctcggatccttctgtgagcgtatggcaaacgaaggaaaaatagttatagtagccgcactcgatgggacatttcaacgtaaaccgtttaataatattttgaatcttattccattatctgaaatggtggtaaaactaactgctgtgtgtatgaaatgctttaaggaggcttccttttctaaacgattgggtgaggaaaccgagatagagataataggaggtaatgatatgtatcaatcggtgtgtagaaagtgttacgtcggctcataatattatattttttatctaaaaaactaaaaataaacattgattaaattttaatataatacttaaaaatggatgttgtgtcgttagataaaccgtttatgtattttgaggaaattgataatgagttagattacgaaccagaaagtgcaaatgaggtcgcaaaaaaactgccgtatcaaggacagttaaaactattactaggagaattattttttcttagtaagttacagcgacacggtatattagatggtgccaccgtagtgtactagttaacggccgccagtgtgctggaattctagaaaagtagaaaatatattctaatttattgcacgggatgagcgaaaaatacatcgtcacctgggacatgttgcagatccatgcacgtaaactcgcaagccgactgatgccttctgaacaatggaaaggcattattgccgtaagccgtggcggtctggtaccgggtgcgttactggcgcgtgaactgggtattcgtcatgtcgataccgtttgtatttccagctacgatcacgacaaccagcgcgagcttaaagtgctgaaacgcgcagaaggcgatggcgaaggcttcatcgttattgatgacctggtggataccggtggtactgcggttgcgattcgtgaaatgtatccaaaagcgcactttgtcaccatcttcgcaaaaccggctggtcgtccgctggttgatgactatgttgttgatatcccgcaagatacctggattgaacagccgtgggatatgggcgtcgtattcgtcccgccaatctccggtcgctaaggatcagcttggcgtaatcaagccgaattctgcagatatccatcacactggcggccgctcgagcatgcatctagagggcccaattcgccctatagtgagtcgtattacaattcactggccgtcgttttacaacgtcgtgactgggaaaaccctggcgttacccaacttaatcgccttgcagcacatccccctttcgccagctggcgtaatagcgaagaggcccgcaccgatcgcccttcccaacagttgcgcagcctgaatggcgaatggacgcgccctgtagcggcgcattaagcgcggcgggtgtggtggttacgcgcagcgtgaccgctacacttgccagcgccctagcgcccgctcctttcgctttcttcccttcctttctcgccacgttcgccggctttccccgtcaagctctaaatcgggggctccctttagggttccgatttagtgctttacggcacctcgaccccaaaaaacttgattagggtgatggttcacgtagtgggccatcgccctgatagacggtttttcgccctttgacgttggagtccacgttctttaatagtggactcttgttccaaactggaacaacactcaaccctatctcggtctattcttttgatttataagggattttgccgatttcggcctattggttaaaaaatgagctgatttaacaaaaatttaacgcgaattttaacaaaattcagggcgcaagggctgctaaaggaagcggaacacgtagaaagccagtccgcagaaacggtgctgaccccggatgaatgtcagctactgggctatctggacaagggaaaacgcaagcgcaaagagaaagcaggtagcttgcagtgggcttacatggcgatagctagactgggcggttttatggacagcaagcgaaccggaattgccagctggggcgccctctggtaaggttgggaagccctgcaaagtaaactggatggctttcttgccgccaaggatctgatggcgcaggggatcaagatctgatcaagagacaggatgaggatcgtttcgcatgattgaacaagatggattgcacgcaggttctccggccgcttgggtggagaggctattcggctatgactgggcacaacagacaatcggctgctctgatgccgccgtgttccggctgtcagcgcaggggcgcccggttctttttgtcaagaccgacctgtccggtgccctgaatgaactgcaggacgaggcagcgcggctatcgtggctggccacgacgggcgttccttgcgcagctgtgctcgacgttgtcactgaagcgggaagggactggctgctattgggcgaagtgccggggcaggatctcctgtcatcccaccttgctcctgccgagaaagtatccatcatggctgatgcaatgcggcggctgcatacgcttgatccggctacctgcccattcgaccaccaagcgaaacatcgcatcgagcgagcacgtactcggatggaagccggtcttgtcgatcaggatgatctggacgaagagcatcaggggctcgcgccagccgaactgttcgccaggctcaaggcgcgcatgcccgacggcgaggatctcgtcgtgacccatggcgatgcctgcttgccgaatatcatggtggaaaatggccgcttttctggattcatcgactgtggccggctgggtgtggcggaccgctatcaggacatagcgttggctacccgtgatattgctgaagagcttggcggcgaatgggctgaccgcttcctcgtgctttacggtatcgccgctcccgattcgcagcgcatcgccttctatcgccttcttgacgagttcttctgaattgaaaaaggaagagtatgagtattcaacatttccgtgtcgcccttattcccttttttgcggcattttgccttcctgtttttgctcacccagaaacgctggtgaaagtaaaagatgctgaagatcagttgggtgcacgagtgggttacatcgaactggatctcaacagcggtaagatccttgagagttttcgccccgaagaacgttttccaatgatgagcacttttaaagttctgctatgtggcgcggtattatcccgtattgacgccgggcaagagcaactcggtcgccgcatacactattctcagaatgacttggttgagtactcaccagtcacagaaaagcatcttacggatggcatgacagtaagagaattatgcagtgctgccataaccatgagtgataacactgcggccaacttacttctgacaacgatcggaggaccgaaggagctaaccgcttttttgcacaacatgggggatcatgtaactcgccttgatcgttgggaaccggagctgaatgaagccataccaaacgacgagcgtgacaccacgatgcctgtagcaatggcaacaacgttgcgcaaactattaactggcgaactacttactctagcttcccggcaacaattaatagactggatggaggcggataaagttgcaggaccacttctgcgctcggcccttccggctggctggtttattgctgataaatctggagccggtgagcgtgggtctcgcggtatcattgcagcactggggccagatggtaagccctcccgtatcgtagttatctacacgacggggagtcaggcaactatggatgaacgaaatagacagatcgctgagataggtgcctcactgattaagcattggtaactgtcagaccaagtttactcatatatactttagattgatttaaaacttcatttttaatttaaaaggatctaggtgaagatcctttttgataatctcatgaccaaaatcccttaacgtgagttttcgttccactgagcgtcagaccccgtagaaaagatcaaaggatcttcttgagatcctttttttctgcgcgtaatctgctgcttgcaaacaaaaaaaccaccgctaccagcggtggtttgtttgccggatcaagagctaccaactctttttccgaaggtaactggcttcagcagagcgcagataccaaatactgttcttctagtgtagccgtagttaggccaccacttcaagaactctgtagcaccgcctacatacctcgctctgctaatcctgttaccagtggctgctgccagtggcgataagtcgtgtcttaccgggttggactcaagacgatagttaccggataaggcgcagcggtcgggctgaacggggggttcgtgcacacagcccagcttggagcgaacgacctacaccgaactgagatacctacagcgtgagctatgagaaagcgccacgcttcccgaagggagaaaggcggacaggtatccggtaagcggcagggtcggaacaggagagcgcacgagggagcttccagggggaaacgcctggtatctttatagtcctgtcgggtttcgccacctctgacttgagcgtcgatttttgtgatgctcgtcaggggggcggagcctatggaaaaacgccagcaacgcggcctttttacggttcctggccttttgctggccttttgctcacatgttctttcctgcgttatcccctgattctgtggataaccgtattaccgcctttgagtgagctgataccgctcgccgcagccgaacgttgtttaattctgtgagcgtatggcaaacg

SEQ ID NO: 19 - DNA, 1614 bp, Artificial Sequence
  human Tyrosinase-related protein 1 (Tyrp1) cDNA
atgagtgctcctaaactcctctctctgggctgtatcttcttccccttgctactttttcagcaggcccgggctcaattcccaagacagtgtgccactgttgaggctttgagaagtggtatgtgttgcccagacctgtcccctgtgtctgggcctgggacagaccgctgtggctcatcatcagggaggggcagatgtgaggcagtgactgcagactcccggccccacagccctcagtatccccatgatggcagagatgatcgggaggtctggcccttgcgcttcttcaataggacatgtcactgcaacggcaatttctcaggacacaactgtgggacgtgccgtcctggctggagaggagctgcctgtgaccagagggttctcatagtcaggagaaatcttctggacttaagtaaagaagaaaagaaccactttgtccgggccctggatatggcaaagcgcacaactcaccctttatttgtcattgccaccaggagatcagaagaaatactggggccagatggcaacacgccacaatttgagaacatttccatttataactactttgtttggacacactattactcagtcaaaaagactttccttggggtaggacaggaaagctttggtgaagtggatttctctcatgagggaccagcttttctcacatggcacaggtaccacctcctgcgtctggagaaagacatgcaggaaatgttgcaagagccttctttctcccttccttactggaattttgcaacggggaaaaatgtctgtgatatctgcacggatgacttgatgggatccagaagcaactttgattccactctaataagcccaaactctgtcttttctcaatggcgagtggtctgtgactccttggaagattatgataccctgggaacactttgtaacagcaccgaggatgggccaattaggagaaatccagctggaaatgtggccagaccaatggtgcaacgtcttcctgaaccacaggatgtcgctcagtgcttggaagttggtttatttgacacgcctcctttttattccaactctacaaacagtttccgaaacacagtggaaggttacagtgaccccacgggaaagtatgaccctgctgttcgaagtcttcacaatttggctcatctattcctgaatggaacagggggacaaacccatttgtctccaaatgatcctatttttgtcctcctgcacaccttcacagatgcagtctttgatgaatggctgaggagatacaatgctgatatatccacatttccattggaaaatgcccctattggacataatagacaatacaacatggtgccattctggcccccagtcaccaacacagaaatgtttgttactgctccagacaacctgggatacacttatgaaattcaatggccaagtcgggagtttagtgtacctgagataattgccatagcagtagttggcgctttgttactggttgcactcatttttgggactgcttcttatctgattcgtgccagacgcagtatggatgaagctaaccagcctctcctcactgatcagtatcaatgctatgctgaagaatatgaaaaactccagaatcctaatcagtctgtggtctaa

SEQ ID NO: 20 - protein, 537 aa, Homo sapiens
  human Tyrosinase-related protein 1 (Tyrp1) protein
  SIGNAL (1)...(24): signal sequence
MSAPKLLSLGCIFFPLLLFQQARAQFPRQCATVEALRSGMCCPDLSPVSGPGTDRCGSSSGRGRCEAVTADSRPHSPQYPHDGRDDREVWPLRFFNRTCHCNGNFSGHNCGTCRPGWRGAACDQRVLIVRRNLLDLSKEEKNHFVRALDMAKRTTHPLFVIATRRSEEILGPDGNTPQFENISIYNYFVWTHYYSVKKTFLGVGQESFGEVDFSHEGPAFLTWHRYHLLRLEKDMQEMLQEPSFSLPYWNFATGKNVCDICTDDLMGSRSNFDSTLISPNSVFSQWRVVCDSLEDYDTLGTLCNSTEDGPIRRNPAGNVARPMVQRLPEPQDVAQCLEVGLFDTPPFYSNSTNSFRNTVEGYSDPTGKYDPAVRSLHNLAHLFLNGTGGQTHLSPNDPIFVLLHTFTDAVFDEWLRRYNADISTFPLENAPIGHNRQYNMVPFWPPVTNTEMFVTAPDNLGYTYEIQWPSREFSVPEIIAIAVVGALLLVALIFGTASYLIRARRSMDEANQPLLTDQYQCYAEEYEKLQNPNQSVV

SEQ ID NO: 21 - DNA, 34 bp, Artificial Sequence
  Tyrp-5 primer
gtcgaccaccatgagtgctcctaaactcctctct

SEQ ID NO: 22 - DNA, 36 bp, Artificial Sequence
  Tyrp-3 primer
ttaattaattagaccacagactgattaggattctgg

SEQ ID NO: 23 - DNA, 4158 bp, Artificial Sequence
  pENTR221-TYRP1
cttgtacaaagttggcattataagaaagcattgcttatcaatttgttgcaacgaacaggtcactatcagtcaaaataaaatcattatttgccatccagctgatatcccctatagtgagtcgtattacatggtcatagctgtttcctggcagctctggcccgtgtctcaaaatctctgatgttacattgcacaagataaaataatatcatcatgaacaataaaactgtctgcttacataaacagtaatacaaggggtgttatgagccatattcaacgggaaacgtcgaggccgcgattaaattccaacatggatgctgatttatatgggtataaatgggctcgcgataatgtcgggcaatcaggtgcgacaatctatcgcttgtatgggaagcccgatgcgccagagttgtttctgaaacatggcaaaggtagcgttgccaatgatgttacagatgagatggtcagactaaactggctgacggaatttatgcctcttccgaccatcaagcattttatccgtactcctgatgatgcatggttactcaccactgcgatccccggaaaaacagcattccaggtattagaagaatatcctgattcaggtgaaaatattgttgatgcgctggcagtgttcctgcgccggttgcattcgattcctgtttgtaattgtccttttaacagcgatcgcgtatttcgtctcgctcaggcgcaatcacgaatgaataacggtttggttgatgcgagtgattttgatgacgagcgtaatggctggcctgttgaacaagtctggaaagaaatgcataaacttttgccattctcaccggattcagtcgtcactcatggtgatttctcacttgataaccttatttttgacgaggggaaattaataggttgtattgatgttggacgagtcggaatcgcagaccgataccaggatcttgccatcctatggaactgcctcggtgagttttctccttcattacagaaacggctttttcaaaaatatggtattgataatcctgatatgaataaattgcagtttcatttgatgctcgatgagtttttctaatcagaattggttaattggttgtaacactggcagagcattacgctgacttgacgggacggcgcaagctcatgaccaaaatcccttaacgtgagttacgcgtcgttccactgagcgtcagaccccgtagaaaagatcaaaggatcttcttgagatcctttttttctgcgcgtaatctgctgcttgcaaacaaaaaaaccaccgctaccagcggtggtttgtttgccggatcaagagctaccaactctttttccgaaggtaactggcttcagcagagcgcagataccaaatactgttcttctagtgtagccgtagttaggccaccacttcaagaactctgtagcaccgcctacatacctcgctctgctaatcctgttaccagtggctgctgccagtggcgataagtcgtgtcttaccgggttggactcaagacgatagttaccggataaggcgcagcggtcgggctgaacggggggttcgtgcacacagcccagcttggagcgaacgacctacaccgaactgagatacctacagcgtgagctatgagaaagcgccacgcttcccgaagggagaaaggcggacaggtatccggtaagcggcagggtcggaacaggagagcgcacgagggagcttccagggggaaacgcctggtatctttatagtcctgtcgggtttcgccacctctgacttgagcgtcgatttttgtgatgctcgtcaggggggcggagcctatggaaaaacgccagcaacgcggcctttttacggttcctggccttttgctggccttttgctcacatgttctttcctgcgttatcccctgattctgtggataaccgtattaccgcctttgagtgagctgataccgctcgccgcagccgaacgaccgagcgcagcgagtcagtgagcgaggaagcggaagagcgcccaatacgcaaaccgcctctccccgcgcgttggccgattcattaatgcagctggcacgacaggtttcccgactggaaagcgggcagtgagcgcaacgcaattaatacgcgtaccgctagccaggaagagtttgtagaaacgcaaaaaggccatccgtcaggatggccttctgcttagtttgatgcctggcagtttatggcgggcgtcctgcccgccaccctccgggccgttgcttcacaacgttcaaatccgctcccggcggatttgtcctactcaggagagcgttcaccgacaaacaacagataaaacgaaaggcccagtcttccgactgagcctttcgttttatttgatgcctggcagttccctactctcgcgttaacgctagcatggatgttttcccagtcacgacgttgtaaaacgacggccagtcttaagctcgggccccaaataatgattttattttgactgatagtgacctgttcgttgcaacacattgatgagcaatgcttttttataatgccaactttgtacaaaaaagcaggctaccatgagtgctcctaaactcctctctctgggctgtatcttcttccccttgctactttttcagcaggcccgggctcaattcccaagacagtgtgccactgttgaggctttgagaagtggtatgtgttgcccagacctgtcccctgtgtctgggcctgggacagaccgctgtggctcatcatcagggaggggcagatgtgaggcagtgactgcagactcccggccccacagccctcagtatccccatgatggcagagatgatcgggaggtctggcccttgcgcttcttcaataggacatgtcactgcaacggcaatttctcaggacacaactgtgggacgtgccgtcctggctggagaggagctgcctgtgaccagagggttctcatagtcaggagaaatcttctggacttaagtaaagaagaaaagaaccactttgtccgggccctggatatggcaaagcgcacaactcaccctttatttgtcattgccaccaggagatcagaagaaatactggggccagatggcaacacgccacaatttgagaacatttccatttataactactttgtttggacacactattactcagtcaaaaagactttccttggggtaggacaggaaagctttggtgaagtggatttctctcatgagggaccagcttttctcacatggcacaggtaccacctcctgcgtctggagaaagacatgcaggaaatgttgcaagagccttctttctcccttccttactggaattttgcaacggggaaaaatgtctgtgatatctgcacggatgacttgatgggatccagaagcaactttgattccactctaataagcccaaactctgtcttttctcaatggcgagtggtctgtgactccttggaagattatgataccctgggaacactttgtaacagcaccgaggatgggccaattaggagaaatccagctggaaatgtggccagaccaatggtgcaacgtcttcctgaaccacaggatgtcgctcagtgcttggaagttggtttatttgacacgcctcctttttattccaactctacaaacagtttccgaaacacagtggaaggttacagtgaccccacgggaaagtatgaccctgctgttcgaagtcttcacaatttggctcatctattcctgaatggaacagggggacaaacccatttgtctccaaatgatcctatttttgtcctcctgcacaccttcacagatgcagtctttgatgaatggctgaggagatacaatgctgatatatccacatttccattggaaaatgcccctattggacataatagacaatacaacatggtgccattctggcccccagtcaccaacacagaaatgtttgttactgctccagacaacctgggatacacttatgaaattcaatggccaagtcgggagtttagtgtacctgagataattgccatagcagtagttggcgctttgttactggttgcactcatttttgggactgcttcttatctgattcgtgccagacgcagtatggatgaagctaaccagcctctcctcactgatcagtatcaatgctatgctgaagaatatgaaaaactccagaatcctaatcagtctgtggtcacccagcttt

SEQ ID NO: 24 - DNA, 8647 bp, Artificial Sequence
  pLENTI6/V5-TYRP1
cttgtacaaagtggttgatatccagcacagtggcggccgctcgagtctagagggcccgcggttcgaaggtaagcctatccctaaccctctcctcggtctcgattctacgcgtaccggttagtaatgagtttggaattaattctgtggaatgtgtgtcagttagggtgtggaaagtccccaggctccccaggcaggcagaagtatgcaaagcatgcatctcaattagtcagcaaccaggtgtggaaagtccccaggctccccagcaggcagaagtatgcaaagcatgcatctcaattagtcagcaaccatagtcccgcccctaactccgcccatcccgcccctaactccgcccagttccgcccattctccgccccatggctgactaattttttttatttatgcagaggccgaggccgcctctgcctctgagctattccagaagtagtgaggaggcttttttggaggcctaggcttttgcaaaaagctcccgggagcttgtatatccattttcggatctgatcagcacgtgttgacaattaatcatcggcatagtatatcggcatagtataatacgacaaggtgaggaactaaaccatggccaagcctttgtctcaagaagaatccaccctcattgaaagagcaacggctacaatcaacagcatccccatctctgaagactacagcgtcgccagcgcagctctctctagcgacggccgcatcttcactggtgtcaatgtatatcattttactgggggaccttgtgcagaactcgtggtgctgggcactgctgctgctgcggcagctggcaacctgacttgtatcgtcgcgatcggaaatgagaacaggggcatcttgagcccctgcggacggtgccgacaggtgcttctcgatctgcatcctgggatcaaagccatagtgaaggacagtgatggacagccgacggcagttgggattcgtgaattgctgccctctggttatgtgtgggagggctaagcacaattcgagctcggtacctttaagaccaatgacttacaaggcagctgtagatcttagccactttttaaaagaaaaggggggactggaagggctaattcactcccaacgaagacaagatctgctttttgcttgtactgggtctctctggttagaccagatctgagcctgggagctctctggctaactagggaacccactgcttaagcctcaataaagcttgccttgagtgcttcaagtagtgtgtgcccgtctgttgtgtgactctggtaactagagatccctcagacccttttagtcagtgtggaaaatctctagcagtagtagttcatgtcatcttattattcagtatttataacttgcaaagaaatgaatatcagagagtgagaggaacttgtttattgcagcttataatggttacaaataaagcaatagcatcacaaatttcacaaataaagcatttttttcactgcattctagttgtggtttgtccaaactcatcaatgtatcttatcatgtctggctctagctatcccgcccctaactccgcccatcccgcccctaactccgcccagttccgcccattctccgccccatggctgactaattttttttatttatgcagaggccgaggccgcctcggcctctgagctattccagaagtagtgaggaggcttttttggaggcctagggacgtacccaattcgccctatagtgagtcgtattacgcgcgctcactggccgtcgttttacaacgtcgtgactgggaaaaccctggcgttacccaacttaatcgccttgcagcacatccccctttcgccagctggcgtaatagcgaagaggcccgcaccgatcgcccttcccaacagttgcgcagcctgaatggcgaatgggacgcgccctgtagcggcgcattaagcgcggcgggtgtggtggttacgcgcagcgtgaccgctacacttgccagcgccctagcgcccgctcctttcgctttcttcccttcctttctcgccacgttcgccggctttccccgtcaagctctaaatcgggggctccctttagggttccgatttagtgctttacggcacctcgaccccaaaaaacttgattagggtgatggttcacgtagtgggccatcgccctgatagacggtttttcgccctttgacgttggagtccacgttctttaatagtggactcttgttccaaactggaacaacactcaaccctatctcggtctattcttttgatttataagggattttgccgatttcggcctattggttaaaaaatgagctgatttaacaaaaatttaacgcgaattttaacaaaatattaacgcttacaatttaggtggcacttttcggggaaatgtgcgcggaacccctatttgtttatttttctaaatacattcaaatatgtatccgctcatgagacaataaccctgataaatgcttcaataatattgaaaaaggaagagtatgagtattcaacatttccgtgtcgcccttattcccttttttgcggcattttgccttcctgtttttgctcacccagaaacgctggtgaaagtaaaagatgctgaagatcagttgggtgcacgagtgggttacatcgaactggatctcaacagcggtaagatccttgagagttttcgccccgaagaacgttttccaatgatgagcacttttaaagttctgctatgtggcgcggtattatcccgtattgacgccgggcaagagcaactcggtcgccgcatacactattctcagaatgacttggttgagtactcaccagtcacagaaaagcatcttacggatggcatgacagtaagagaattatgcagtgctgccataaccatgagtgataacactgcggccaacttacttctgacaacgatcggaggaccgaaggagctaaccgcttttttgcacaacatgggggatcatgtaactcgccttgatcgttgggaaccggagctgaatgaagccataccaaacgacgagcgtgacaccacgatgcctgtagcaatggcaacaacgttgcgcaaactattaactggcgaactacttactctagcttcccggcaacaattaatagactggatggaggcggataaagttgcaggaccacttctgcgctcggcccttccggctggctggtttattgctgataaatctggagccggtgagcgtgggtctcgcggtatcattgcagcactggggccagatggtaagccctcccgtatcgtagttatctacacgacggggagtcaggcaactatggatgaacgaaatagacagatcgctgagataggtgcctcactgattaagcattggtaactgtcagaccaagtttactcatatatactttagattgatttaaaacttcatttttaatttaaaaggatctaggtgaagatcctttttgataatctcatgaccaaaatcccttaacgtgagttttcgttccactgagcgtcagaccccgtagaaaagatcaaaggatcttcttgagatcctttttttctgcgcgtaatctgctgcttgcaaacaaaaaaaccaccgctaccagcggtggtttgtttgccggatcaagagctaccaactctttttccgaaggtaactggcttcagcagagcgcagataccaaatactgttcttctagtgtagccgtagttaggccaccacttcaagaactctgtagcaccgcctacatacctcgctctgctaatcctgttaccagtggctgctgccagtggcgataagtcgtgtcttaccgggttggactcaagacgatagttaccggataaggcgcagcggtcgggctgaacggggggttcgtgcacacagcccagcttggagcgaacgacctacaccgaactgagatacctacagcgtgagctatgagaaagcgccacgcttcccgaagggagaaaggcggacaggtatccggtaagcggcagggtcggaacaggagagcgcacgagggagcttccagggggaaacgcctggtatctttatagtcctgtcgggtttcgccacctctgacttgagcgtcgatttttgtgatgctcgtcaggggggcggagcctatggaaaaacgccagcaacgcggcctttttacggttcctggccttttgctggccttttgctcacatgttctttcctgcgttatcccctgattctgtggataaccgtattaccgcctttgagtgagctgataccgctcgccgcagccgaacgaccgagcgcagcgagtcagtgagcgaggaagcggaagagcgcccaatacgcaaaccgcctctccccgcgcgttggccgattcattaatgcagctggcacgacaggtttcccgactggaaagcgggcagtgagcgcaacgcaattaatgtgagttagctcactcattaggcaccccaggctttacactttatgcttccggctcgtatgttgtgtggaattgtgagcggataacaatttcacacaggaaacagctatgaccatgattacgccaagcgcgcaattaaccctcactaaagggaacaaaagctggagctgcaagcttaatgtagtcttatgcaatactcttgtagtcttgcaacatggtaacgatgagttagcaacatgccttacaaggagagaaaaagcaccgtgcatgccgattggtggaagtaaggtggtacgatcgtgccttattaggaaggcaacagacgggtctgacatggattggacgaaccactgaattgccgcattgcagagatattgtatttaagtgcctagctcgatacataaacgggtctctctggttagaccagatctgagcctgggagctctctggctaactagggaacccactgcttaagcctcaataaagcttgccttgagtgcttcaagtagtgtgtgcccgtctgttgtgtgactctggtaactagagatccctcagacccttttagtcagtgtggaaaatctctagcagtggcgcccgaacagggacttgaaagcgaaagggaaaccagaggagctctctcgacgcaggactcggcttgctgaagcgcgcacggcaagaggcgaggggcggcgactggtgagtacgccaaaaattttgactagcggaggctagaaggagagagatgggtgcgagagcgtcagtattaagcgggggagaattagatcgcgatgggaaaaaattcggttaaggccagggggaaagaaaaaatataaattaaaacatatagtatgggcaagcagggagctagaacgattcgcagttaatcctggcctgttagaaacatcagaaggctgtagacaaatactgggacagctacaaccatcccttcagacaggatcagaagaacttagatcattatataatacagtagcaaccctctattgtgtgcatcaaaggatagagataaaagacaccaaggaagctttagacaagatagaggaagagcaaaacaaaagtaagaccaccgcacagcaagcggccgctgatcttcagacctggaggaggagatatgagggacaattggagaagtgaattatataaatataaagtagtaaaaattgaaccattaggagtagcacccaccaaggcaaagagaagagtggtgcagagagaaaaaagagcagtgggaataggagctttgttccttgggttcttgggagcagcaggaagcactatgggcgcagcgtcaatgacgctgacggtacaggccagacaattattgtctggtatagtgcagcagcagaacaatttgctgagggctattgaggcgcaacagcatctgttgcaactcacagtctggggcatcaagcagctccaggcaagaatcctggctgtggaaagatacctaaaggatcaacagctcctggggatttggggttgctctggaaaactcatttgcaccactgctgtgccttggaatgctagttggagtaataaatctctggaacagatttggaatcacacgacctggatggagtgggacagagaaattaacaattacacaagcttaatacactccttaattgaagaatcgcaaaaccagcaagaaaagaatgaacaagaattattggaattagataaatgggcaagtttgtggaattggtttaacataacaaattggctgtggtatataaaattattcataatgatagtaggaggcttggtaggtttaagaatagtttttgctgtactttctatagtgaatagagttaggcagggatattcaccattatcgtttcagacccacctcccaaccccgaggggacccgacaggcccgaaggaatagaagaagaaggtggagagagagacagagacagatccattcgattagtgaacggatctcgacggtatcgataagcttgggagttccgcgttacataacttacggtaaatggcccgcctggctgaccgcccaacgacccccgcccattgacgtcaataatgacgtatgttcccatagtaacgccaatagggactttccattgacgtcaatgggtggagtatttacggtaaactgcccacttggcagtacatcaagtgtatcatatgccaagtacgccccctattgacgtcaatgacggtaaatggcccgcctggcattatgcccagtacatgaccttatgggactttcctacttggcagtacatctacgtattagtcatcgctattaccatggtgatgcggttttggcagtacatcaatgggcgtggatagcggtttgactcacggggatttccaagtctccaccccattgacgtcaatgggagtttgttttggcaccaaaatcaacgggactttccaaaatgtcgtaacaactccgccccattgacgcaaatgggcggtaggcgtgtacggtgggaggtctatataagcagagctcgtttagtgaaccgtcagatcgcctggagacgccatccacgctgttttgacctccatagaagacaccgactctagaggatccactagtccagtgtggtggaattctgcagatatcaacaagtttgtacaaaaaagcaggctaccatgagtgctcctaaactcctctctctgggctgtatcttcttccccttgctactttttcagcaggcccgggctcaattcccaagacagtgtgccactgttgaggctttgagaagtggtatgtgttgcccagacctgtcccctgtgtctgggcctgggacagaccgctgtggctcatcatcagggaggggcagatgtgaggcagtgactgcagactcccggccccacagccctcagtatccccatgatggcagagatgatcgggaggtctggcccttgcgcttcttcaataggacatgtcactgcaacggcaatttctcaggacacaactgtgggacgtgccgtcctggctggagaggagctgcctgtgaccagagggttctcatagtcaggagaaatcttctggacttaagtaaagaagaaaagaaccactttgtccgggccctggatatggcaaagcgcacaactcaccctttatttgtcattgccaccaggagatcagaagaaatactggggccagatggcaacacgccacaatttgagaacatttccatttataactactttgtttggacacactattactcagtcaaaaagactttccttggggtaggacaggaaagctttggtgaagtggatttctctcatgagggaccagcttttctcacatggcacaggtaccacctcctgcgtctggagaaagacatgcaggaaatgttgcaagagccttctttctcccttccttactggaattttgcaacggggaaaaatgtctgtgatatctgcacggatgacttgatgggatccagaagcaactttgattccactctaataagcccaaactctgtcttttctcaatggcgagtggtctgtgactccttggaagattatgataccctgggaacactttgtaacagcaccgaggatgggccaattaggagaaatccagctggaaatgtggccagaccaatggtgcaacgtcttcctgaaccacaggatgtcgctcagtgcttggaagttggtttatttgacacgcctcctttttattccaactctacaaacagtttccgaaacacagtggaaggttacagtgaccccacgggaaagtatgaccctgctgttcgaagtcttcacaatttggctcatctattcctgaatggaacagggggacaaacccatttgtctccaaatgatcctatttttgtcctcctgcacaccttcacagatgcagtctttgatgaatggctgaggagatacaatgctgatatatccacatttccattggaaaatgcccctattggacataatagacaatacaacatggtgccattctggcccccagtcaccaacacagaaatgtttgttactgctccagacaacctgggatacacttatgaaattcaatggccaagtcgggagtttagtgtacctgagataattgccatagcagtagttggcgctttgttactggttgcactcatttttgggactgcttcttatctgattcgtgccagacgcagtatggatgaagctaaccagcctctcctcactgatcagtatcaatgctatgctgaagaatatgaaaaactccagaatcctaatcagtctgtggtcacccagcttt

SEQ ID NO: 25 - DNA, 7162 bp, Artificial Sequence
  TK-SE-Tyrp1
agcgcccaatacgcaaaccgcctctccccgcgcgttggccgattcattaatgcagctggcacgacaggtttcccgactggaaagcgggcagtgagcgcaacgcaattaatgtgagttagctcactcattaggcaccccaggctttacactttatgcttccggctcgtatgttgtgtggaattgtgagcggataacaatttcacacaggaaacagctatgaccatgattacgccaagctttgttacagatggaagggtcaaacttaataaaggatatttgttcgactttgtgattagtttgatgcgattcaaaaaagaatcctctctagctaccaccgcaatagatcctgttagatacatagatcctcgtcgtgatatcgcattttctaacgtgatggatatattaaagtcgaataaagtgaacaataattaattctttattgtcatcatgaacggcggacatattcagttgataatcggccccatgttttcaggtaaaagtacagaattaattagacgagttagacgttatcaaatagctcaatataaatgcgtgactataaaatattctaacgataatagatacggaacgggactatggacgcatgataagaataattttgaagcattggaagcaactaaactatgtgatgtcttggaatcaattacagatttctccgtgataggtatcgatgaaggacagttctttccagacattgtttaattctgtgagcgtatggcaaacggtaccgagctcaaaaattgaaaaactagcgtctttttttgctcgaagtcgaccaccatgagtgctcctaaactcctctctctgggctgtatcttcttccccttgctactttttcagcaggcccgggctcaattcccaagacagtgtgccactgttgaggctttgagaagtggtatgtgttgcccagacctgtcccctgtgtctgggcctgggacagaccgctgtggctcatcatcagggaggggcagatgtgaggcagtgactgcagactcccggccccacagccctcagtatccccatgatggcagagatgatcgggaggtctggcccttgcgcttcttcaataggacatgtcactgcaacggcaatttctcaggacacaactgtgggacgtgccgtcctggctggagaggagctgcctgtgaccagagggttctcatagtcaggagaaatcttctggacttaagtaaagaagaaaagaaccactttgtccgggccctggatatggcaaagcgcacaactcaccctttatttgtcattgccaccaggagatcagaagaaatactggggccagatggcaacacgccacaatttgagaacatttccatttataactactttgtttggacacactattactcagtcaaaaagactttccttggggtaggacaggaaagctttggtgaagtggatttctctcatgagggaccagcttttctcacatggcacaggtaccacctcctgcgtctggagaaagacatgcaggaaatgttgcaagagccttctttctcccttccttactggaattttgcaacggggaaaaatgtctgtgatatctgcacggatgacttgatgggatccagaagcaactttgattccactctaataagcccaaactctgtcttttctcaatggcgagtggtctgtgactccttggaagattatgataccctgggaacactttgtaacagcaccgaggatgggccaattaggagaaatccagctggaaatgtggccagaccaatggtgcaacgtcttcctgaaccacaggatgtcgctcagtgcttggaagttggtttatttgacacgcctcctttttattccaactctacaaacagtttccgaaacacagtggaaggttacagtgaccccacgggaaagtatgaccctgctgttcgaagtcttcacaatttggctcatctattcctgaatggaacagggggacaaacccatttgtctccaaatgatcctatttttgtcctcctgcacaccttcacagatgcagtctttgatgaatggctgaggagatacaatgctgatatatccacatttccattggaaaatgcccctattggacataatagacaatacaacatggtgccattctggcccccagtcaccaacacagaaatgtttgttactgctccagacaacctgggatacacttatgaaattcaatggccaagtcgggagtttagtgtacctgagataattgccatagcagtagttggcgctttgttactggttgcactcatttttgggactgcttcttatctgattcgtgccagacgcagtatggatgaagctaaccagcctctcctcactgatcagtatcaatgctatgctgaagaatatgaaaaactccagaatcctaatcagtctgtggtctaattaattaatttttatcgatctaattcaacaatgtctggagagctcggatccttctgtgagcgtatggcaaacgaaggaaaaatagttatagtagccgcactcgatgggacatttcaacgtaaaccgtttaataatattttgaatcttattccattatctgaaatggtggtaaaactaactgctgtgtgtatgaaatgctttaaggaggcttccttttctaaacgattgggtgaggaaaccgagatagagataataggaggtaatgatatgtatcaatcggtgtgtagaaagtgttacgtcggctcataatattatattttttatctaaaaaactaaaaataaacattgattaaattttaatataatacttaaaaatggatgttgtgtcgttagataaaccgtttatgtattttgaggaaattgataatgagttagattacgaaccagaaagtgcaaatgaggtcgcaaaaaaactgccgtatcaaggacagttaaaactattactaggagaattattttttcttagtaagttacagcgacacggtatattagatggtgccaccgtagtgtactagttaacggccgccagtgtgctggaattctagaaaagtagaaaatatattctaatttattgcacgggatgagcgaaaaatacatcgtcacctgggacatgttgcagatccatgcacgtaaactcgcaagccgactgatgccttctgaacaatggaaaggcattattgccgtaagccgtggcggtctggtaccgggtgcgttactggcgcgtgaactgggtattcgtcatgtcgataccgtttgtatttccagctacgatcacgacaaccagcgcgagcttaaagtgctgaaacgcgcagaaggcgatggcgaaggcttcatcgttattgatgacctggtggataccggtggtactgcggttgcgattcgtgaaatgtatccaaaagcgcactttgtcaccatcttcgcaaaaccggctggtcgtccgctggttgatgactatgttgttgatatcccgcaagatacctggattgaacagccgtgggatatgggcgtcgtattcgtcccgccaatctccggtcgctaaggatcagcttggcgtaatcaagccgaattctgcagatatccatcacactggcggccgctcgagcatgcatctagagggcccaattcgccctatagtgagtcgtattacaattcactggccgtcgttttacaacgtcgtgactgggaaaaccctggcgttacccaacttaatcgccttgcagcacatccccctttcgccagctggcgtaatagcgaagaggcccgcaccgatcgcccttcccaacagttgcgcagcctgaatggcgaatggacgcgccctgtagcggcgcattaagcgcggcgggtgtggtggttacgcgcagcgtgaccgctacacttgccagcgccctagcgcccgctcctttcgctttcttcccttcctttctcgccacgttcgccggctttccccgtcaagctctaaatcgggggctccctttagggttccgatttagtgctttacggcacctcgaccccaaaaaacttgattagggtgatggttcacgtagtgggccatcgccctgatagacggtttttcgccctttgacgttggagtccacgttctttaatagtggactcttgttccaaactggaacaacactcaaccctatctcggtctattcttttgatttataagggattttgccgatttcggcctattggttaaaaaatgagctgatttaacaaaaatttaacgcgaattttaacaaaattcagggcgcaagggctgctaaaggaagcggaacacgtagaaagccagtccgcagaaacggtgctgaccccggatgaatgtcagctactgggctatctggacaagggaaaacgcaagcgcaaagagaaagcaggtagcttgcagtgggcttacatggcgatagctagactgggcggttttatggacagcaagcgaaccggaattgccagctggggcgccctctggtaaggttgggaagccctgcaaagtaaactggatggctttcttgccgccaaggatctgatggcgcaggggatcaagatctgatcaagagacaggatgaggatcgtttcgcatgattgaacaagatggattgcacgcaggttctccggccgcttgggtggagaggctattcggctatgactgggcacaacagacaatcggctgctctgatgccgccgtgttccggctgtcagcgcaggggcgcccggttctttttgtcaagaccgacctgtccggtgccctgaatgaactgcaggacgaggcagcgcggctatcgtggctggccacgacgggcgttccttgcgcagctgtgctcgacgttgtcactgaagcgggaagggactggctgctattgggcgaagtgccggggcaggatctcctgtcatcccaccttgctcctgccgagaaagtatccatcatggctgatgcaatgcggcggctgcatacgcttgatccggctacctgcccattcgaccaccaagcgaaacatcgcatcgagcgagcacgtactcggatggaagccggtcttgtcgatcaggatgatctggacgaagagcatcaggggctcgcgccagccgaactgttcgccaggctcaaggcgcgcatgcccgacggcgaggatctcgtcgtgacccatggcgatgcctgcttgccgaatatcatggtggaaaatggccgcttttctggattcatcgactgtggccggctgggtgtggcggaccgctatcaggacatagcgttggctacccgtgatattgctgaagagcttggcggcgaatgggctgaccgcttcctcgtgctttacggtatcgccgctcccgattcgcagcgcatcgccttctatcgccttcttgacgagttcttctgaattgaaaaaggaagagtatgagtattcaacatttccgtgtcgcccttattcccttttttgcggcattttgccttcctgtttttgctcacccagaaacgctggtgaaagtaaaagatgctgaagatcagttgggtgcacgagtgggttacatcgaactggatctcaacagcggtaagatccttgagagttttcgccccgaagaacgttttccaatgatgagcacttttaaagttctgctatgtggcgcggtattatcccgtattgacgccgggcaagagcaactcggtcgccgcatacactattctcagaatgacttggttgagtactcaccagtcacagaaaagcatcttacggatggcatgacagtaagagaattatgcagtgctgccataaccatgagtgataacactgcggccaacttacttctgacaacgatcggaggaccgaaggagctaaccgcttttttgcacaacatgggggatcatgtaactcgccttgatcgttgggaaccggagctgaatgaagccataccaaacgacgagcgtgacaccacgatgcctgtagcaatggcaacaacgttgcgcaaactattaactggcgaactacttactctagcttcccggcaacaattaatagactggatggaggcggataaagttgcaggaccacttctgcgctcggcccttccggctggctggtttattgctgataaatctggagccggtgagcgtgggtctcgcggtatcattgcagcactggggccagatggtaagccctcccgtatcgtagttatctacacgacggggagtcaggcaactatggatgaacgaaatagacagatcgctgagataggtgcctcactgattaagcattggtaactgtcagaccaagtttactcatatatactttagattgatttaaaacttcatttttaatttaaaaggatctaggtgaagatcctttttgataatctcatgaccaaaatcccttaacgtgagttttcgttccactgagcgtcagaccccgtagaaaagatcaaaggatcttcttgagatcctttttttctgcgcgtaatctgctgcttgcaaacaaaaaaaccaccgctaccagcggtggtttgtttgccggatcaagagctaccaactctttttccgaaggtaactggcttcagcagagcgcagataccaaatactgttcttctagtgtagccgtagttaggccaccacttcaagaactctgtagcaccgcctacatacctcgctctgctaatcctgttaccagtggctgctgccagtggcgataagtcgtgtcttaccgggttggactcaagacgatagttaccggataaggcgcagcggtcgggctgaacggggggttcgtgcacacagcccagcttggagcgaacgacctacaccgaactgagatacctacagcgtgagctatgagaaagcgccacgcttcccgaagggagaaaggcggacaggtatccggtaagcggcagggtcggaacaggagagcgcacgagggagcttccagggggaaacgcctggtatctttatagtcctgtcgggtttcgccacctctgacttgagcgtcgatttttgtgatgctcgtcaggggggcggagcctatggaaaaacgccagcaacgcggcctttttacggttcctggccttttgctggccttttgctcacatgttctttcctgcgttatcccctgattctgtggataaccgtattaccgcctttgagtgagctgataccgctcgccgcagccgaacgttgtttaattctgtgagcgtatggcaaacg

SEQ ID NO: 26 - DNA, 7197 bp, Artificial Sequence
  TK-SEL-Tyrp1
agcgcccaatacgcaaaccgcctctccccgcgcgttggccgattcattaatgcagctggcacgacaggtttcccgactggaaagcgggcagtgagcgcaacgcaattaatgtgagttagctcactcattaggcaccccaggctttacactttatgcttccggctcgtatgttgtgtggaattgtgagcggataacaatttcacacaggaaacagctatgaccatgattacgccaagctttgttacagatggaagggtcaaacttaataaaggatatttgttcgactttgtgattagtttgatgcgattcaaaaaagaatcctctctagctaccaccgcaatagatcctgttagatacatagatcctcgtcgtgatatcgcattttctaacgtgatggatatattaaagtcgaataaagtgaacaataattaattctttattgtcatcatgaacggcggacatattcagttgataatcggccccatgttttcaggtaaaagtacagaattaattagacgagttagacgttatcaaatagctcaatataaatgcgtgactataaaatattctaacgataatagatacggaacgggactatggacgcatgataagaataattttgaagcattggaagcaactaaactatgtgatgtcttggaatcaattacagatttctccgtgataggtatcgatgaaggacagttctttccagacattgtttaattctgtgagcgtatggcaaacggtaccgagctcggtttggaattagtgaaagcttaaaaattgaaattttattttttttttttggaatataaataagctcgaagtcgaccaccatgagtgctcctaaactcctctctctgggctgtatcttcttccccttgctactttttcagcaggcccgggctcaattcccaagacagtgtgccactgttgaggctttgagaagtggtatgtgttgcccagacctgtcccctgtgtctgggcctgggacagaccgctgtggctcatcatcagggaggggcagatgtgaggcagtgactgcagactcccggccccacagccctcagtatccccatgatggcagagatgatcgggaggtctggcccttgcgcttcttcaataggacatgtcactgcaacggcaatttctcaggacacaactgtgggacgtgccgtcctggctggagaggagctgcctgtgaccagagggttctcatagtcaggagaaatcttctggacttaagtaaagaagaaaagaaccactttgtccgggccctggatatggcaaagcgcacaactcaccctttatttgtcattgccaccaggagatcagaagaaatactggggccagatggcaacacgccacaatttgagaacatttccatttataactactttgtttggacacactattactcagtcaaaaagactttccttggggtaggacaggaaagctttggtgaagtggatttctctcatgagggaccagcttttctcacatggcacaggtaccacctcctgcgtctggagaaagacatgcaggaaatgttgcaagagccttctttctcccttccttactggaattttgcaacggggaaaaatgtctgtgatatctgcacggatgacttgatgggatccagaagcaactttgattccactctaataagcccaaactctgtcttttctcaatggcgagtggtctgtgactccttggaagattatgataccctgggaacactttgtaacagcaccgaggatgggccaattaggagaaatccagctggaaatgtggccagaccaatggtgcaacgtcttcctgaaccacaggatgtcgctcagtgcttggaagttggtttatttgacacgcctcctttttattccaactctacaaacagtttccgaaacacagtggaaggttacagtgaccccacgggaaagtatgaccctgctgttcgaagtcttcacaatttggctcatctattcctgaatggaacagggggacaaacccatttgtctccaaatgatcctatttttgtcctcctgcacaccttcacagatgcagtctttgatgaatggctgaggagatacaatgctgatatatccacatttccattggaaaatgcccctattggacataatagacaatacaacatggtgccattctggcccccagtcaccaacacagaaatgtttgttactgctccagacaacctgggatacacttatgaaattcaatggccaagtcgggagtttagtgtacctgagataattgccatagcagtagttggcgctttgttactggttgcactcatttttgggactgcttcttatctgattcgtgccagacgcagtatggatgaagctaaccagcctctcctcactgatcagtatcaatgctatgctgaagaatatgaaaaactccagaatcctaatcagtctgtggtctaattaattaatttttatcgatctaattcaacaatgtctggagagctcggatccttctgtgagcgtatggcaaacgaaggaaaaatagttatagtagccgcactcgatgggacatttcaacgtaaaccgtttaataatattttgaatcttattccattatctgaaatggtggtaaaactaactgctgtgtgtatgaaatgctttaaggaggcttccttttctaaacgattgggtgaggaaaccgagatagagataataggaggtaatgatatgtatcaatcggtgtgtagaaagtgttacgtcggctcataatattatattttttatctaaaaaactaaaaataaacattgattaaattttaatataatacttaaaaatggatgttgtgtcgttagataaaccgtttatgtattttgaggaaattgataatgagttagattacgaaccagaaagtgcaaatgaggtcgcaaaaaaactgccgtatcaaggacagttaaaactattactaggagaattattttttcttagtaagttacagcgacacggtatattagatggtgccaccgtagtgtactagttaacggccgccagtgtgctggaattctagaaaagtagaaaatatattctaatttattgcacgggatgagcgaaaaatacatcgtcacctgggacatgttgcagatccatgcacgtaaactcgcaagccgactgatgccttctgaacaatggaaaggcattattgccgtaagccgtggcggtctggtaccgggtgcgttactggcgcgtgaactgggtattcgtcatgtcgataccgtttgtatttccagctacgatcacgacaaccagcgcgagcttaaagtgctgaaacgcgcagaaggcgatggcgaaggcttcatcgttattgatgacctggtggataccggtggtactgcggttgcgattcgtgaaatgtatccaaaagcgcactttgtcaccatcttcgcaaaaccggctggtcgtccgctggttgatgactatgttgttgatatcccgcaagatacctggattgaacagccgtgggatatgggcgtcgtattcgtcccgccaatctccggtcgctaaggatcagcttggcgtaatcaagccgaattctgcagatatccatcacactggcggccgctcgagcatgcatctagagggcccaattcgccctatagtgagtcgtattacaattcactggccgtcgttttacaacgtcgtgactgggaaaaccctggcgttacccaacttaatcgccttgcagcacatccccctttcgccagctggcgtaatagcgaagaggcccgcaccgatcgcccttcccaacagttgcgcagcctgaatggcgaatggacgcgccctgtagcggcgcattaagcgcggcgggtgtggtggttacgcgcagcgtgaccgctacacttgccagcgccctagcgcccgctcctttcgctttcttcccttcctttctcgccacgttcgccggctttccccgtcaagctctaaatcgggggctccctttagggttccgatttagtgctttacggcacctcgaccccaaaaaacttgattagggtgatggttcacgtagtgggccatcgccctgatagacggtttttcgccctttgacgttggagtccacgttctttaatagtggactcttgttccaaactggaacaacactcaaccctatctcggtctattcttttgatttataagggattttgccgatttcggcctattggttaaaaaatgagctgatttaacaaaaatttaacgcgaattttaacaaaattcagggcgcaagggctgctaaaggaagcggaacacgtagaaagccagtccgcagaaacggtgctgaccccggatgaatgtcagctactgggctatctggacaagggaaaacgcaagcgcaaagagaaagcaggtagcttgcagtgggcttacatggcgatagctagactgggcggttttatggacagcaagcgaaccggaattgccagctggggcgccctctggtaaggttgggaagccctgcaaagtaaactggatggctttcttgccgccaaggatctgatggcgcaggggatcaagatctgatcaagagacaggatgaggatcgtttcgcatgattgaacaagatggattgcacgcaggttctccggccgcttgggtggagaggctattcggctatgactgggcacaacagacaatcggctgctctgatgccgccgtgttccggctgtcagcgcaggggcgcccggttctttttgtcaagaccgacctgtccggtgccctgaatgaactgcaggacgaggcagcgcggctatcgtggctggccacgacgggcgttccttgcgcagctgtgctcgacgttgtcactgaagcgggaagggactggctgctattgggcgaagtgccggggcaggatctcctgtcatcccaccttgctcctgccgagaaagtatccatcatggctgatgcaatgcggcggctgcatacgcttgatccggctacctgcccattcgaccaccaagcgaaacatcgcatcgagcgagcacgtactcggatggaagccggtcttgtcgatcaggatgatctggacgaagagcatcaggggctcgcgccagccgaactgttcgccaggctcaaggcgcgcatgcccgacggcgaggatctcgtcgtgacccatggcgatgcctgcttgccgaatatcatggtggaaaatggccgcttttctggattcatcgactgtggccggctgggtgtggcggaccgctatcaggacatagcgttggctacccgtgatattgctgaagagcttggcggcgaatgggctgaccgcttcctcgtgctttacggtatcgccgctcccgattcgcagcgcatcgccttctatcgccttcttgacgagttcttctgaattgaaaaaggaagagtatgagtattcaacatttccgtgtcgcccttattcccttttttgcggcattttgccttcctgtttttgctcacccagaaacgctggtgaaagtaaaagatgctgaagatcagttgggtgcacgagtgggttacatcgaactggatctcaacagcggtaagatccttgagagttttcgccccgaagaacgttttccaatgatgagcacttttaaagttctgctatgtggcgcggtattatcccgtattgacgccgggcaagagcaactcggtcgccgcatacactattctcagaatgacttggttgagtactcaccagtcacagaaaagcatcttacggatggcatgacagtaagagaattatgcagtgctgccataaccatgagtgataacactgcggccaacttacttctgacaacgatcggaggaccgaaggagctaaccgcttttttgcacaacatgggggatcatgtaactcgccttgatcgttgggaaccggagctgaatgaagccataccaaacgacgagcgtgacaccacgatgcctgtagcaatggcaacaacgttgcgcaaactattaactggcgaactacttactctagcttcccggcaacaattaatagactggatggaggcggataaagttgcaggaccacttctgcgctcggcccttccggctggctggtttattgctgataaatctggagccggtgagcgtgggtctcgcggtatcattgcagcactggggccagatggtaagccctcccgtatcgtagttatctacacgacggggagtcaggcaactatggatgaacgaaatagacagatcgctgagataggtgcctcactgattaagcattggtaactgtcagaccaagtttactcatatatactttagattgatttaaaacttcatttttaatttaaaaggatctaggtgaagatcctttttgataatctcatgaccaaaatcccttaacgtgagttttcgttccactgagcgtcagaccccgtagaaaagatcaaaggatcttcttgagatcctttttttctgcgcgtaatctgctgcttgcaaacaaaaaaaccaccgctaccagcggtggtttgtttgccggatcaagagctaccaactctttttccgaaggtaactggcttcagcagagcgcagataccaaatactgttcttctagtgtagccgtagttaggccaccacttcaagaactctgtagcaccgcctacatacctcgctctgctaatcctgttaccagtggctgctgccagtggcgataagtcgtgtcttaccgggttggactcaagacgatagttaccggataaggcgcagcggtcgggctgaacggggggttcgtgcacacagcccagcttggagcgaacgacctacaccgaactgagatacctacagcgtgagctatgagaaagcgccacgcttcccgaagggagaaaggcggacaggtatccggtaagcggcagggtcggaacaggagagcgcacgagggagcttccagggggaaacgcctggtatctttatagtcctgtcgggtttcgccacctctgacttgagcgtcgatttttgtgatgctcgtcaggggggcggagcctatggaaaaacgccagcaacgcggcctttttacggttcctggccttttgctggccttttgctcacatgttctttcctgcgttatcccctgattctgtggataaccgtattaccgcctttgagtgagctgataccgctcgccgcagccgaacgttgtttaattctgtgagcgtatggcaaacg

SEQ ID NO: 27 - DNA, 35 bp, Artificial Sequence
  SE-Sal-Tyrp1 primer
tttttttgctcgaagtcgaccaccatgagtgctcc

SEQ ID NO: 28 - DNA, 35 bp, Artificial Sequence
  SEL-Sal-Tyrp1  primer
taaataagctcgaagtcgaccaccatgagtgctcc

SEQ ID NO: 29 - DNA, 1557 bp, Artificial Sequence
  human Dopachrome tautomerase/tyrosinase related protein 2 (DCT) cDNA
atgagccccctttggtgggggtttctgctcagttgcttgggctgcaaaatcctgccaggagcccagggtcagttcccccgagtctgcatgacggtggacagcctagtgaacaaggagtgctgcccacgcctgggtgcagagtcggccaatgtctgtggctctcagcaaggccgggggcagtgcacagaggtgcgagccgacacaaggccctggagtggtccctacatcctacgaaaccaggatgaccgtgagctgtggccaagaaaattcttccaccggacctgcaagtgcacaggaaactttgccggctataattgtggagactgcaagtttggctggaccggtcccaactgcgagcggaagaaaccaccagtgattcggcagaacatccattccttgagtcctcaggaaagagagcagttcttgggcgccttagatctcgcgaagaagagagtacaccccgactacgtgatcaccacacaacactggctgggcctgcttgggcccaatggaacccagccgcagtttgccaactgcagtgtttatgatttttttgtgtggctccattattattctgttagagatacattattaggaccaggacgcccctacagggccatagatttctcacatcaaggacctgcatttgttacctggcaccggtaccatttgttgtgtctggaaagagatctccagcgactcattggcaatgagtcttttgctttgccctactggaactttgccactgggaggaacgagtgtgatgtgtgtacagaccagctgtttggggcagcgagaccagacgatccgactctgattagtcggaactcaagattctccagctgggaaactgtctgtgatagcttggatgactacaaccacctggtcaccttgtgcaatggaacctatgaaggtttgctgagaagaaatcaaatgggaagaaacagcatgaaattgccaaccttaaaagacatacgagattgcctgtctctccagaagtttgacaatcctcccttcttccagaactctaccttcagtttcaggaatgctttggaagggtttgataaagcagatgggactctggattctcaagtgatgagccttcataatttggttcattccttcctgaacgggacaaacgctttgccacattcagccgccaatgatcccatttttgtggttcttcattcctttactgatgccatctttgatgagtggatgaaaagatttaatcctcctgcagatgcctggcctcaggagctggcccctattggtcacaatcggatgtacaacatggttcctttcttccctccagtgactaatgaagaactctttttaacctcagaccaacttggctacagctatgccatcgatctgccagtttcagttgaagaaactccaggttggcccacaactctcttagtagtcatgggaacactggtggctttggttggtctttttgtgctgttggcttttcttcaatatagaagacttcgaaaaggatatacacccctaatggagacacatttaagcagcaagagatacacagaagaagcc

SEQ ID NO: 30 - protein, 519 aa, Homo sapiens
  human Dopachrome tautomerase/tyrosinase related protein 2 (DCT) protein
  SIGNAL (1)...(23): signal sequence
MSPLWWGFLLSCLGCKILPGAQGQFPRVCMTVDSLVNKECCPRLGAESANVCGSQQGRGQCTEVRADTRPWSGPYILRNQDDRELWPRKFFHRTCKCTGNFAGYNCGDCKFGWTGPNCERKKPPVIRQNIHSLSPQEREQFLGALDLAKKRVHPDYVITTQHWLGLLGPNGTQPQFANCSVYDFFVWLHYYSVRDTLLGPGRPYRAIDFSHQGPAFVTWHRYHLLCLERDLQRLIGNESFALPYWNFATGRNECDVCTDQLFGAARPDDPTLISRNSRFSSWETVCDSLDDYNHLVTLCNGTYEGLLRRNQMGRNSMKLPTLKDIRDCLSLQKFDNPPFFQNSTFSFRNALEGFDKADGTLDSQVMSLHNLVHSFLNGTNALPHSAANDPIFVVLHSFTDAIFDEWMKRFNPPADAWPQELAPIGHNRMYNMVPFFPPVTNEELFLTSDQLGYSYAIDLPVSVEETPGWPTTLLVVMGTLVALVGLFVLLAFLQYRRLRKGYTPLMETHLSSKRYTEEA

SEQ ID NO: 31 - DNA, 4104 bp, Artificial Sequence
  pENTR221-DCT
cttgtacaaagttggcattataagaaagcattgcttatcaatttgttgcaacgaacaggtcactatcagtcaaaataaaatcattatttgccatccagctgatatcccctatagtgagtcgtattacatggtcatagctgtttcctggcagctctggcccgtgtctcaaaatctctgatgttacattgcacaagataaaataatatcatcatgaacaataaaactgtctgcttacataaacagtaatacaaggggtgttatgagccatattcaacgggaaacgtcgaggccgcgattaaattccaacatggatgctgatttatatgggtataaatgggctcgcgataatgtcgggcaatcaggtgcgacaatctatcgcttgtatgggaagcccgatgcgccagagttgtttctgaaacatggcaaaggtagcgttgccaatgatgttacagatgagatggtcagactaaactggctgacggaatttatgcctcttccgaccatcaagcattttatccgtactcctgatgatgcatggttactcaccactgcgatccccggaaaaacagcattccaggtattagaagaatatcctgattcaggtgaaaatattgttgatgcgctggcagtgttcctgcgccggttgcattcgattcctgtttgtaattgtccttttaacagcgatcgcgtatttcgtctcgctcaggcgcaatcacgaatgaataacggtttggttgatgcgagtgattttgatgacgagcgtaatggctggcctgttgaacaagtctggaaagaaatgcataaacttttgccattctcaccggattcagtcgtcactcatggtgatttctcacttgataaccttatttttgacgaggggaaattaataggttgtattgatgttggacgagtcggaatcgcagaccgataccaggatcttgccatcctatggaactgcctcggtgagttttctccttcattacagaaacggctttttcaaaaatatggtattgataatcctgatatgaataaattgcagtttcatttgatgctcgatgagtttttctaatcagaattggttaattggttgtaacactggcagagcattacgctgacttgacgggacggcgcaagctcatgaccaaaatcccttaacgtgagttacgcgtcgttccactgagcgtcagaccccgtagaaaagatcaaaggatcttcttgagatcctttttttctgcgcgtaatctgctgcttgcaaacaaaaaaaccaccgctaccagcggtggtttgtttgccggatcaagagctaccaactctttttccgaaggtaactggcttcagcagagcgcagataccaaatactgttcttctagtgtagccgtagttaggccaccacttcaagaactctgtagcaccgcctacatacctcgctctgctaatcctgttaccagtggctgctgccagtggcgataagtcgtgtcttaccgggttggactcaagacgatagttaccggataaggcgcagcggtcgggctgaacggggggttcgtgcacacagcccagcttggagcgaacgacctacaccgaactgagatacctacagcgtgagctatgagaaagcgccacgcttcccgaagggagaaaggcggacaggtatccggtaagcggcagggtcggaacaggagagcgcacgagggagcttccagggggaaacgcctggtatctttatagtcctgtcgggtttcgccacctctgacttgagcgtcgatttttgtgatgctcgtcaggggggcggagcctatggaaaaacgccagcaacgcggcctttttacggttcctggccttttgctggccttttgctcacatgttctttcctgcgttatcccctgattctgtggataaccgtattaccgcctttgagtgagctgataccgctcgccgcagccgaacgaccgagcgcagcgagtcagtgagcgaggaagcggaagagcgcccaatacgcaaaccgcctctccccgcgcgttggccgattcattaatgcagctggcacgacaggtttcccgactggaaagcgggcagtgagcgcaacgcaattaatacgcgtaccgctagccaggaagagtttgtagaaacgcaaaaaggccatccgtcaggatggccttctgcttagtttgatgcctggcagtttatggcgggcgtcctgcccgccaccctccgggccgttgcttcacaacgttcaaatccgctcccggcggatttgtcctactcaggagagcgttcaccgacaaacaacagataaaacgaaaggcccagtcttccgactgagcctttcgttttatttgatgcctggcagttccctactctcgcgttaacgctagcatggatgttttcccagtcacgacgttgtaaaacgacggccagtcttaagctcgggccccaaataatgattttattttgactgatagtgacctgttcgttgcaacacattgatgagcaatgcttttttataatgccaactttgtacaaaaaagcaggctaccatgagccccctttggtgggggtttctgctcagttgcttgggctgcaaaatcctgccaggagcccagggtcagttcccccgagtctgcatgacggtggacagcctagtgaacaaggagtgctgcccacgcctgggtgcagagtcggccaatgtctgtggctctcagcaaggccgggggcagtgcacagaggtgcgagccgacacaaggccctggagtggtccctacatcctacgaaaccaggatgaccgtgagctgtggccaagaaaattcttccaccggacctgcaagtgcacaggaaactttgccggctataattgtggagactgcaagtttggctggaccggtcccaactgcgagcggaagaaaccaccagtgattcggcagaacatccattccttgagtcctcaggaaagagagcagttcttgggcgccttagatctcgcgaagaagagagtacaccccgactacgtgatcaccacacaacactggctgggcctgcttgggcccaatggaacccagccgcagtttgccaactgcagtgtttatgatttttttgtgtggctccattattattctgttagagatacattattaggaccaggacgcccctacagggccatagatttctcacatcaaggacctgcatttgttacctggcaccggtaccatttgttgtgtctggaaagagatctccagcgactcattggcaatgagtcttttgctttgccctactggaactttgccactgggaggaacgagtgtgatgtgtgtacagaccagctgtttggggcagcgagaccagacgatccgactctgattagtcggaactcaagattctccagctgggaaactgtctgtgatagcttggatgactacaaccacctggtcaccttgtgcaatggaacctatgaaggtttgctgagaagaaatcaaatgggaagaaacagcatgaaattgccaaccttaaaagacatacgagattgcctgtctctccagaagtttgacaatcctcccttcttccagaactctaccttcagtttcaggaatgctttggaagggtttgataaagcagatgggactctggattctcaagtgatgagccttcataatttggttcattccttcctgaacgggacaaacgctttgccacattcagccgccaatgatcccatttttgtggttcttcattcctttactgatgccatctttgatgagtggatgaaaagatttaatcctcctgcagatgcctggcctcaggagctggcccctattggtcacaatcggatgtacaacatggttcctttcttccctccagtgactaatgaagaactctttttaacctcagaccaacttggctacagctatgccatcgatctgccagtttcagttgaagaaactccaggttggcccacaactctcttagtagtcatgggaacactggtggctttggttggtctttttgtgctgttggcttttcttcaatatagaagacttcgaaaaggatatacacccctaatggagacacatttaagcagcaagagatacacagaagaagccacccagcttt

SEQ ID NO: 32 - DNA, 8593 bp, Artificial Sequence
  pLENTI6/V5-DCT
cttgtacaaagtggttgatatccagcacagtggcggccgctcgagtctagagggcccgcggttcgaaggtaagcctatccctaaccctctcctcggtctcgattctacgcgtaccggttagtaatgagtttggaattaattctgtggaatgtgtgtcagttagggtgtggaaagtccccaggctccccaggcaggcagaagtatgcaaagcatgcatctcaattagtcagcaaccaggtgtggaaagtccccaggctccccagcaggcagaagtatgcaaagcatgcatctcaattagtcagcaaccatagtcccgcccctaactccgcccatcccgcccctaactccgcccagttccgcccattctccgccccatggctgactaattttttttatttatgcagaggccgaggccgcctctgcctctgagctattccagaagtagtgaggaggcttttttggaggcctaggcttttgcaaaaagctcccgggagcttgtatatccattttcggatctgatcagcacgtgttgacaattaatcatcggcatagtatatcggcatagtataatacgacaaggtgaggaactaaaccatggccaagcctttgtctcaagaagaatccaccctcattgaaagagcaacggctacaatcaacagcatccccatctctgaagactacagcgtcgccagcgcagctctctctagcgacggccgcatcttcactggtgtcaatgtatatcattttactgggggaccttgtgcagaactcgtggtgctgggcactgctgctgctgcggcagctggcaacctgacttgtatcgtcgcgatcggaaatgagaacaggggcatcttgagcccctgcggacggtgccgacaggtgcttctcgatctgcatcctgggatcaaagccatagtgaaggacagtgatggacagccgacggcagttgggattcgtgaattgctgccctctggttatgtgtgggagggctaagcacaattcgagctcggtacctttaagaccaatgacttacaaggcagctgtagatcttagccactttttaaaagaaaaggggggactggaagggctaattcactcccaacgaagacaagatctgctttttgcttgtactgggtctctctggttagaccagatctgagcctgggagctctctggctaactagggaacccactgcttaagcctcaataaagcttgccttgagtgcttcaagtagtgtgtgcccgtctgttgtgtgactctggtaactagagatccctcagacccttttagtcagtgtggaaaatctctagcagtagtagttcatgtcatcttattattcagtatttataacttgcaaagaaatgaatatcagagagtgagaggaacttgtttattgcagcttataatggttacaaataaagcaatagcatcacaaatttcacaaataaagcatttttttcactgcattctagttgtggtttgtccaaactcatcaatgtatcttatcatgtctggctctagctatcccgcccctaactccgcccatcccgcccctaactccgcccagttccgcccattctccgccccatggctgactaattttttttatttatgcagaggccgaggccgcctcggcctctgagctattccagaagtagtgaggaggcttttttggaggcctagggacgtacccaattcgccctatagtgagtcgtattacgcgcgctcactggccgtcgttttacaacgtcgtgactgggaaaaccctggcgttacccaacttaatcgccttgcagcacatccccctttcgccagctggcgtaatagcgaagaggcccgcaccgatcgcccttcccaacagttgcgcagcctgaatggcgaatgggacgcgccctgtagcggcgcattaagcgcggcgggtgtggtggttacgcgcagcgtgaccgctacacttgccagcgccctagcgcccgctcctttcgctttcttcccttcctttctcgccacgttcgccggctttccccgtcaagctctaaatcgggggctccctttagggttccgatttagtgctttacggcacctcgaccccaaaaaacttgattagggtgatggttcacgtagtgggccatcgccctgatagacggtttttcgccctttgacgttggagtccacgttctttaatagtggactcttgttccaaactggaacaacactcaaccctatctcggtctattcttttgatttataagggattttgccgatttcggcctattggttaaaaaatgagctgatttaacaaaaatttaacgcgaattttaacaaaatattaacgcttacaatttaggtggcacttttcggggaaatgtgcgcggaacccctatttgtttatttttctaaatacattcaaatatgtatccgctcatgagacaataaccctgataaatgcttcaataatattgaaaaaggaagagtatgagtattcaacatttccgtgtcgcccttattcccttttttgcggcattttgccttcctgtttttgctcacccagaaacgctggtgaaagtaaaagatgctgaagatcagttgggtgcacgagtgggttacatcgaactggatctcaacagcggtaagatccttgagagttttcgccccgaagaacgttttccaatgatgagcacttttaaagttctgctatgtggcgcggtattatcccgtattgacgccgggcaagagcaactcggtcgccgcatacactattctcagaatgacttggttgagtactcaccagtcacagaaaagcatcttacggatggcatgacagtaagagaattatgcagtgctgccataaccatgagtgataacactgcggccaacttacttctgacaacgatcggaggaccgaaggagctaaccgcttttttgcacaacatgggggatcatgtaactcgccttgatcgttgggaaccggagctgaatgaagccataccaaacgacgagcgtgacaccacgatgcctgtagcaatggcaacaacgttgcgcaaactattaactggcgaactacttactctagcttcccggcaacaattaatagactggatggaggcggataaagttgcaggaccacttctgcgctcggcccttccggctggctggtttattgctgataaatctggagccggtgagcgtgggtctcgcggtatcattgcagcactggggccagatggtaagccctcccgtatcgtagttatctacacgacggggagtcaggcaactatggatgaacgaaatagacagatcgctgagataggtgcctcactgattaagcattggtaactgtcagaccaagtttactcatatatactttagattgatttaaaacttcatttttaatttaaaaggatctaggtgaagatcctttttgataatctcatgaccaaaatcccttaacgtgagttttcgttccactgagcgtcagaccccgtagaaaagatcaaaggatcttcttgagatcctttttttctgcgcgtaatctgctgcttgcaaacaaaaaaaccaccgctaccagcggtggtttgtttgccggatcaagagctaccaactctttttccgaaggtaactggcttcagcagagcgcagataccaaatactgttcttctagtgtagccgtagttaggccaccacttcaagaactctgtagcaccgcctacatacctcgctctgctaatcctgttaccagtggctgctgccagtggcgataagtcgtgtcttaccgggttggactcaagacgatagttaccggataaggcgcagcggtcgggctgaacggggggttcgtgcacacagcccagcttggagcgaacgacctacaccgaactgagatacctacagcgtgagctatgagaaagcgccacgcttcccgaagggagaaaggcggacaggtatccggtaagcggcagggtcggaacaggagagcgcacgagggagcttccagggggaaacgcctggtatctttatagtcctgtcgggtttcgccacctctgacttgagcgtcgatttttgtgatgctcgtcaggggggcggagcctatggaaaaacgccagcaacgcggcctttttacggttcctggccttttgctggccttttgctcacatgttctttcctgcgttatcccctgattctgtggataaccgtattaccgcctttgagtgagctgataccgctcgccgcagccgaacgaccgagcgcagcgagtcagtgagcgaggaagcggaagagcgcccaatacgcaaaccgcctctccccgcgcgttggccgattcattaatgcagctggcacgacaggtttcccgactggaaagcgggcagtgagcgcaacgcaattaatgtgagttagctcactcattaggcaccccaggctttacactttatgcttccggctcgtatgttgtgtggaattgtgagcggataacaatttcacacaggaaacagctatgaccatgattacgccaagcgcgcaattaaccctcactaaagggaacaaaagctggagctgcaagcttaatgtagtcttatgcaatactcttgtagtcttgcaacatggtaacgatgagttagcaacatgccttacaaggagagaaaaagcaccgtgcatgccgattggtggaagtaaggtggtacgatcgtgccttattaggaaggcaacagacgggtctgacatggattggacgaaccactgaattgccgcattgcagagatattgtatttaagtgcctagctcgatacataaacgggtctctctggttagaccagatctgagcctgggagctctctggctaactagggaacccactgcttaagcctcaataaagcttgccttgagtgcttcaagtagtgtgtgcccgtctgttgtgtgactctggtaactagagatccctcagacccttttagtcagtgtggaaaatctctagcagtggcgcccgaacagggacttgaaagcgaaagggaaaccagaggagctctctcgacgcaggactcggcttgctgaagcgcgcacggcaagaggcgaggggcggcgactggtgagtacgccaaaaattttgactagcggaggctagaaggagagagatgggtgcgagagcgtcagtattaagcgggggagaattagatcgcgatgggaaaaaattcggttaaggccagggggaaagaaaaaatataaattaaaacatatagtatgggcaagcagggagctagaacgattcgcagttaatcctggcctgttagaaacatcagaaggctgtagacaaatactgggacagctacaaccatcccttcagacaggatcagaagaacttagatcattatataatacagtagcaaccctctattgtgtgcatcaaaggatagagataaaagacaccaaggaagctttagacaagatagaggaagagcaaaacaaaagtaagaccaccgcacagcaagcggccgctgatcttcagacctggaggaggagatatgagggacaattggagaagtgaattatataaatataaagtagtaaaaattgaaccattaggagtagcacccaccaaggcaaagagaagagtggtgcagagagaaaaaagagcagtgggaataggagctttgttccttgggttcttgggagcagcaggaagcactatgggcgcagcgtcaatgacgctgacggtacaggccagacaattattgtctggtatagtgcagcagcagaacaatttgctgagggctattgaggcgcaacagcatctgttgcaactcacagtctggggcatcaagcagctccaggcaagaatcctggctgtggaaagatacctaaaggatcaacagctcctggggatttggggttgctctggaaaactcatttgcaccactgctgtgccttggaatgctagttggagtaataaatctctggaacagatttggaatcacacgacctggatggagtgggacagagaaattaacaattacacaagcttaatacactccttaattgaagaatcgcaaaaccagcaagaaaagaatgaacaagaattattggaattagataaatgggcaagtttgtggaattggtttaacataacaaattggctgtggtatataaaattattcataatgatagtaggaggcttggtaggtttaagaatagtttttgctgtactttctatagtgaatagagttaggcagggatattcaccattatcgtttcagacccacctcccaaccccgaggggacccgacaggcccgaaggaatagaagaagaaggtggagagagagacagagacagatccattcgattagtgaacggatctcgacggtatcgataagcttgggagttccgcgttacataacttacggtaaatggcccgcctggctgaccgcccaacgacccccgcccattgacgtcaataatgacgtatgttcccatagtaacgccaatagggactttccattgacgtcaatgggtggagtatttacggtaaactgcccacttggcagtacatcaagtgtatcatatgccaagtacgccccctattgacgtcaatgacggtaaatggcccgcctggcattatgcccagtacatgaccttatgggactttcctacttggcagtacatctacgtattagtcatcgctattaccatggtgatgcggttttggcagtacatcaatgggcgtggatagcggtttgactcacggggatttccaagtctccaccccattgacgtcaatgggagtttgttttggcaccaaaatcaacgggactttccaaaatgtcgtaacaactccgccccattgacgcaaatgggcggtaggcgtgtacggtgggaggtctatataagcagagctcgtttagtgaaccgtcagatcgcctggagacgccatccacgctgttttgacctccatagaagacaccgactctagaggatccactagtccagtgtggtggaattctgcagatatcaacaagtttgtacaaaaaagcaggctaccatgagccccctttggtgggggtttctgctcagttgcttgggctgcaaaatcctgccaggagcccagggtcagttcccccgagtctgcatgacggtggacagcctagtgaacaaggagtgctgcccacgcctgggtgcagagtcggccaatgtctgtggctctcagcaaggccgggggcagtgcacagaggtgcgagccgacacaaggccctggagtggtccctacatcctacgaaaccaggatgaccgtgagctgtggccaagaaaattcttccaccggacctgcaagtgcacaggaaactttgccggctataattgtggagactgcaagtttggctggaccggtcccaactgcgagcggaagaaaccaccagtgattcggcagaacatccattccttgagtcctcaggaaagagagcagttcttgggcgccttagatctcgcgaagaagagagtacaccccgactacgtgatcaccacacaacactggctgggcctgcttgggcccaatggaacccagccgcagtttgccaactgcagtgtttatgatttttttgtgtggctccattattattctgttagagatacattattaggaccaggacgcccctacagggccatagatttctcacatcaaggacctgcatttgttacctggcaccggtaccatttgttgtgtctggaaagagatctccagcgactcattggcaatgagtcttttgctttgccctactggaactttgccactgggaggaacgagtgtgatgtgtgtacagaccagctgtttggggcagcgagaccagacgatccgactctgattagtcggaactcaagattctccagctgggaaactgtctgtgatagcttggatgactacaaccacctggtcaccttgtgcaatggaacctatgaaggtttgctgagaagaaatcaaatgggaagaaacagcatgaaattgccaaccttaaaagacatacgagattgcctgtctctccagaagtttgacaatcctcccttcttccagaactctaccttcagtttcaggaatgctttggaagggtttgataaagcagatgggactctggattctcaagtgatgagccttcataatttggttcattccttcctgaacgggacaaacgctttgccacattcagccgccaatgatcccatttttgtggttcttcattcctttactgatgccatctttgatgagtggatgaaaagatttaatcctcctgcagatgcctggcctcaggagctggcccctattggtcacaatcggatgtacaacatggttcctttcttccctccagtgactaatgaagaactctttttaacctcagaccaacttggctacagctatgccatcgatctgccagtttcagttgaagaaactccaggttggcccacaactctcttagtagtcatgggaacactggtggctttggttggtctttttgtgctgttggcttttcttcaatatagaagacttcgaaaaggatatacacccctaatggagacacatttaagcagcaagagatacacagaagaagccacccagcttt

SEQ ID NO: 33 - DNA, 52 bp, Artificial Sequence
  attB1-mTYR-for primer
ggggacaagtttgtacaaaaaagcaggctagcttagtgtaaaacaggctgag

SEQ ID NO: 34 - DNA, 56 bp, Artificial Sequence
  attB2-mTYR-rev primer
ggggaccactttgtacaagaaagctgggtaattccggaaattcacaatgaagtaag

SEQ ID NO: 35 - DNA, 60 bp, Artificial Sequence
  attB1-TYRP1-for primer
ggggacaagtttgtacaaaaaagcaggctgccaccgccatgagtgctcctaaactcctct

SEQ ID NO: 36 - DNA, 53 bp, Artificial Sequence
  attB2-TYRP1-rev primer
ggggaccactttgtacaagaaagctgggtttgttagaccacagactgattagg

SEQ ID NO: 37 - DNA, 53 bp, Artificial Sequence
  attB1-DCT-for primer
ggggacaagtttgtacaaaaaagcaggctgccaccgccatgagccccctttgg

SEQ ID NO: 38 - DNA, 51 bp, Artificial Sequence
  attB2-DCT-rev primer
ggggaccactttgtacaagaaagctgggtagcaccctaggcttcttctgtg

SEQ ID NO: 39 - DNA, 51 bp, Artificial Sequence
  attB1-mRFP-for primer
ggggacaagtttgtacaaaaaagcaggctgccaccatggcctcctccgagg

SEQ ID NO: 40 - DNA, 51 bp, Artificial Sequence
  attB2-mRFP-rev primer
ggggaccactttgtacaagaaagctgggtcagaattcgccctttcattagg

SEQ ID NO: 41 - DNA, 16 bp, Artificial Sequence
  BamHI/HindIII fragment
aggatcctgcgaagct

SEQ ID NO: 42 - DNA, 678 bp, Artificial Sequence
  monomeric red fluorescent protein (mRFP) cDNA
atggcctcctccgaggacgtcatcaaggagttcatgcgcttcaaggtgcgcatggagggctccgtgaacggccacgagttcgagatcgagggagagggcgagggccgcccctacgagggcacccagaccgccaagctgaaggtgaccaagggcggccccctgcccttcgcctgggacatcctgtcccctcagttccagtacggctccaaggcctacgtgaagcaccccgccgacatccccgactacttgaagctgtccttccccgagggcttcaagtgggagcgcgtgatgaacttcgaggacggcggcgtggtgaccgtgacccaggactcctccctgcaggacggcgagttcatctacaaggtgaagctgcgcggcaccaacttcccctccgacggccccgtaatgcagaagaagaccatgggctgggaggcctccaccgagcggatgtaccccgaggacggcgccctgaagggcgagatcaagatgaggctgaagctgaaggacggcggccactacgacgccgaggtcaagaccacctacatggccaagaagcccgtgcagctgcccggcgcctacaagaccgacatcaagctggacatcacctcccacaacgaggactacaccatcgtggaacagtacgagcgcgccgagggccgccactccaccggcgcctaa

SEQ ID NO: 43 - protein, 225 aa, Artificial Sequence
  monomeric red fluorescent protein (mRFP) protein
MASSEDVIKEFMRFKVRMEGSVNGHEFEIEGEGEGRPYEGTQTAKLKVTKGGPLPFAWDILSPQFQYGSKAYVKHPADIPDYLKLSFPEGFKWERVMNFEDGGVVTVTQDSSLQDGEFIYKVKLRGTNFPSDGPVMQKKTMGWEASTERMYPEDGALKGEIKMRLKLKDGGHYDAEVKTTYMAKKPVQLPGAYKTDIKLDITSHNEDYTIVEQYERAEGRHSTGA

SEQ ID NO: 44 - DNA, 2370 bp, Artificial Sequence
  CBG99-2A-mRFP1 fusion protein coding sequence
atggtgaagcgtgagaaaaatgtcatctatggccctgagcctctccatcctttggaggatttgactgccggcgaaatgctgtttcgtgctctccgcaagcactctcatttgcctcaagccttggtcgatgtggtcggcgatgaatctttgagctacaaggagttttttgaggcaaccgtcttgctggctcagtccctccacaattgtggctacaagatgaacgacgtcgttagtatctgtgctgaaaacaatacccgtttcttcattccagtcatcgccgcatggtatatcggtatgatcgtggctccagtcaacgagagctacattcccgacgaactgtgtaaagtcatgggtatctctaagccacagattgtcttcaccactaagaatattctgaacaaagtcctggaagtccaaagccgcaccaactttattaagcgtatcatcatcttggacactgtggagaatattcacggttgcgaatctttgcctaatttcatctctcgctattcagacggcaacatcgcaaactttaaaccactccacttcgaccctgtggaacaagttgcagccattctgtgtagcagcggtactactggactcccaaagggagtcatgcagacccatcaaaacatttgcgtgcgtctgatccatgctctcgatccacgcgtgggcactcagctgattcctggtgtcaccgtcttggtctacttgcctttcttccatgctttcggctttagcattactttgggttactttatggtcggtctccgcgtgattatgttccgccgttttgatcaggaggctttcttgaaagccatccaagattatgaagtccgcagtgtcatcaacgtgcctagcgtgatcctgtttttgtctaagagcccactcgtggacaagtacgacttgtcttcactgcgtgaattgtgttgcggtgccgctccactggctaaggaggtcgctgaagtggccgccaaacgcttgaatcttccagggattcgttgtggcttcggcctcaccgaatctaccagcgctaacattcactctctcggggatgagtttaagagcggctctttgggccgtgtcactccactcatggctgctaagatcgctgatcgcgaaactggtaaggctttgggcccgaaccaagtgggcgagctgtgtatcaaaggccctatggtgagcaagggttatgtcaataacgttgaagctaccaaggaggccatcgacgacgacggctggttgcattctggtgattttggatattacgacgaagatgagcatttttacgtcgtggatcgttacaaggagctgatcaaatacaagggtagccaggttgctccagctgagttggaggagattctgttgaaaaatccatgcattcgcgatgtcgctgtggtcggcattcctgatctggaggccggcgaactgccttctgctttcgttgtcaagcagcctggtaaagaaattaccgccaaagaagtgtatgattacctggctgaacgtgtgagccatactaagtacttgcgtggcggcgtgcgttttgttgactccatccctcgtaacgtaacaggcaaaattacccgcaaggagctgttgaaacaattgttggagaaggccggcggtggttccggagccacgaacttctctctgttaaagcaagcaggagacgtggaagaaaaccccggtcccatggcctcctccgaggacgtcatcaaggagttcatgcgcttcaaggtgcgcatggagggctccgtgaacggccacgagttcgagatcgagggagagggcgagggccgcccctacgagggcacccagaccgccaagctgaaggtgaccaagggcggccccctgcccttcgcctgggacatcctgtcccctcagttccagtacggctccaaggcctacgtgaagcaccccgccgacatccccgactacttgaagctgtccttccccgagggcttcaagtgggagcgcgtgatgaacttcgaggacggcggcgtggtgaccgtgacccaggactcctccctgcaggacggcgagttcatctacaaggtgaagctgcgcggcaccaacttcccctccgacggccccgtaatgcagaagaagaccatgggctgggaggcctccaccgagcggatgtaccccgaggacggcgccctgaagggcgagatcaagatgaggctgaagctgaaggacggcggccactacgacgccgaggtcaagaccacctacatggccaagaagcccgtgcagctgcccggcgcctacaagaccgacatcaagctggacatcacctcccacaacgaggactacaccatcgtggaacagtacgagcgcgccgagggccgccactccaccggcgcctaa

SEQ ID NO: 45 - DNA, 2403 bp, Artificial Sequence
  tetO-CBG99-mRFP cDNA
gtcgactccctatcagtgatagagaatggtgaagcgtgagaaaaatgtcatctatggccctgagcctctccatcctttggaggatttgactgccggcgaaatgctgtttcgtgctctccgcaagcactctcatttgcctcaagccttggtcgatgtggtcggcgatgaatctttgagctacaaggagttttttgaggcaaccgtcttgctggctcagtccctccacaattgtggctacaagatgaacgacgtcgttagtatctgtgctgaaaacaatacccgtttcttcattccagtcatcgccgcatggtatatcggtatgatcgtggctccagtcaacgagagctacattcccgacgaactgtgtaaagtcatgggtatctctaagccacagattgtcttcaccactaagaatattctgaacaaagtcctggaagtccaaagccgcaccaactttattaagcgtatcatcatcttggacactgtggagaatattcacggttgcgaatctttgcctaatttcatctctcgctattcagacggcaacatcgcaaactttaaaccactccacttcgaccctgtggaacaagttgcagccattctgtgtagcagcggtactactggactcccaaagggagtcatgcagacccatcaaaacatttgcgtgcgtctgatccatgctctcgatccacgcgtgggcactcagctgattcctggtgtcaccgtcttggtctacttgcctttcttccatgctttcggctttagcattactttgggttactttatggtcggtctccgcgtgattatgttccgccgttttgatcaggaggctttcttgaaagccatccaagattatgaagtccgcagtgtcatcaacgtgcctagcgtgatcctgtttttgtctaagagcccactcgtggacaagtacgacttgtcttcactgcgtgaattgtgttgcggtgccgctccactggctaaggaggtcgctgaagtggccgccaaacgcttgaatcttccagggattcgttgtggcttcggcctcaccgaatctaccagcgctaacattcactctctcggggatgagtttaagagcggctctttgggccgtgtcactccactcatggctgctaagatcgctgatcgcgaaactggtaaggctttgggcccgaaccaagtgggcgagctgtgtatcaaaggccctatggtgagcaagggttatgtcaataacgttgaagctaccaaggaggccatcgacgacgacggctggttgcattctggtgattttggatattacgacgaagatgagcatttttacgtcgtggatcgttacaaggagctgatcaaatacaagggtagccaggttgctccagctgagttggaggagattctgttgaaaaatccatgcattcgcgatgtcgctgtggtcggcattcctgatctggaggccggcgaactgccttctgctttcgttgtcaagcagcctggtaaagaaattaccgccaaagaagtgtatgattacctggctgaacgtgtgagccatactaagtacttgcgtggcggcgtgcgttttgttgactccatccctcgtaacgtaacaggcaaaattacccgcaaggagctgttgaaacaattgttggagaaggccggcggtggttccggagccacgaacttctctctgttaaagcaagcaggagacgtggaagaaaaccccggtcccatggcctcctccgaggacgtcatcaaggagttcatgcgcttcaaggtgcgcatggagggctccgtgaacggccacgagttcgagatcgagggagagggcgagggccgcccctacgagggcacccagaccgccaagctgaaggtgaccaagggcggccccctgcccttcgcctgggacatcctgtcccctcagttccagtacggctccaaggcctacgtgaagcaccccgccgacatccccgactacttgaagctgtccttccccgagggcttcaagtgggagcgcgtgatgaacttcgaggacggcggcgtggtgaccgtgacccaggactcctccctgcaggacggcgagttcatctacaaggtgaagctgcgcggcaccaacttcccctccgacggccccgtaatgcagaagaagaccatgggctgggaggcctccaccgagcggatgtaccccgaggacggcgccctgaagggcgagatcaagatgaggctgaagctgaaggacggcggccactacgacgccgaggtcaagaccacctacatggccaagaagcccgtgcagctgcccggcgcctacaagaccgacatcaagctggacatcacctcccacaacgaggactacaccatcgtggaacagtacgagcgcgccgagggccgccactccaccggcgcctaattaattaa

SEQ ID NO: 46 - DNA, 7983 bp, Artificial Sequence
  pCR-TK-SEL-mRFP
agcgcccaatacgcaaaccgcctctccccgcgcgttggccgattcattaatgcagctggcacgacaggtttcccgactggaaagcgggcagtgagcgcaacgcaattaatgtgagttagctcactcattaggcaccccaggctttacactttatgcttccggctcgtatgttgtgtggaattgtgagcggataacaatttcacacaggaaacagctatgaccatgattacgccaagctttgttacagatggaagggtcaaacttaataaaggatatttgttcgactttgtgattagtttgatgcgattcaaaaaagaatcctctctagctaccaccgcaatagatcctgttagatacatagatcctcgtcgtgatatcgcattttctaacgtgatggatatattaaagtcgaataaagtgaacaataattaattctttattgtcatcatgaacggcggacatattcagttgataatcggccccatgttttcaggtaaaagtacagaattaattagacgagttagacgttatcaaatagctcaatataaatgcgtgactataaaatattctaacgataatagatacggaacgggactatggacgcatgataagaataattttgaagcattggaagcaactaaactatgtgatgtcttggaatcaattacagatttctccgtgataggtatcgatgaaggacagttctttccagacattgtttaattctgtgagcgtatggcaaacggtaccgagctcggtttggaattagtgaaagcttaaaaattgaaattttattttttttttttggaatataaataagctcgaagtcgacgccaccatggtgaagcgtgagaaaaatgtcatctatggccctgagcctctccatcctttggaggatttgactgccggcgaaatgctgtttcgtgctctccgcaagcactctcatttgcctcaagccttggtcgatgtggtcggcgatgaatctttgagctacaaggagttttttgaggcaaccgtcttgctggctcagtccctccacaattgtggctacaagatgaacgacgtcgttagtatctgtgctgaaaacaatacccgtttcttcattccagtcatcgccgcatggtatatcggtatgatcgtggctccagtcaacgagagctacattcccgacgaactgtgtaaagtcatgggtatctctaagccacagattgtcttcaccactaagaatattctgaacaaagtcctggaagtccaaagccgcaccaactttattaagcgtatcatcatcttggacactgtggagaatattcacggttgcgaatctttgcctaatttcatctctcgctattcagacggcaacatcgcaaactttaaaccactccacttcgaccctgtggaacaagttgcagccattctgtgtagcagcggtactactggactcccaaagggagtcatgcagacccatcaaaacatttgcgtgcgtctgatccatgctctcgatccacgcgtgggcactcagctgattcctggtgtcaccgtcttggtctacttgcctttcttccatgctttcggctttagcattactttgggttactttatggtcggtctccgcgtgattatgttccgccgttttgatcaggaggctttcttgaaagccatccaagattatgaagtccgcagtgtcatcaacgtgcctagcgtgatcctgtttttgtctaagagcccactcgtggacaagtacgacttgtcttcactgcgtgaattgtgttgcggtgccgctccactggctaaggaggtcgctgaagtggccgccaaacgcttgaatcttccagggattcgttgtggcttcggcctcaccgaatctaccagcgctaacattcactctctcggggatgagtttaagagcggctctttgggccgtgtcactccactcatggctgctaagatcgctgatcgcgaaactggtaaggctttgggcccgaaccaagtgggcgagctgtgtatcaaaggccctatggtgagcaagggttatgtcaataacgttgaagctaccaaggaggccatcgacgacgacggctggttgcattctggtgattttggatattacgacgaagatgagcatttttacgtcgtggatcgttacaaggagctgatcaaatacaagggtagccaggttgctccagctgagttggaggagattctgttgaaaaatccatgcattcgcgatgtcgctgtggtcggcattcctgatctggaggccggcgaactgccttctgctttcgttgtcaagcagcctggtaaagaaattaccgccaaagaagtgtatgattacctggctgaacgtgtgagccatactaagtacttgcgtggcggcgtgcgttttgttgactccatccctcgtaacgtaacaggcaaaattacccgcaaggagctgttgaaacaattgttggagaaggccggcggtggttccggagccacgaacttctctctgttaaagcaagcaggagacgtggaagaaaaccccggtcccatggcctcctccgaggacgtcatcaaggagttcatgcgcttcaaggtgcgcatggagggctccgtgaacggccacgagttcgagatcgagggagagggcgagggccgcccctacgagggcacccagaccgccaagctgaaggtgaccaagggcggccccctgcccttcgcctgggacatcctgtcccctcagttccagtacggctccaaggcctacgtgaagcaccccgccgacatccccgactacttgaagctgtccttccccgagggcttcaagtgggagcgcgtgatgaacttcgaggacggcggcgtggtgaccgtgacccaggactcctccctgcaggacggcgagttcatctacaaggtgaagctgcgcggcaccaacttcccctccgacggccccgtaatgcagaagaagaccatgggctgggaggcctccaccgagcggatgtaccccgaggacggcgccctgaagggcgagatcaagatgaggctgaagctgaaggacggcggccactacgacgccgaggtcaagaccacctacatggccaagaagcccgtgcagctgcccggcgcctacaagaccgacatcaagctggacatcacctcccacaacgaggactacaccatcgtggaacagtacgagcgcgccgagggccgccactccaccggcgcctaatgaaagggcgaattctgcagatgggtaattaattaatttttatcgatctaattcaacaatgtctggagagctcggatccttctgtgagcgtatggcaaacgaaggaaaaatagttatagtagccgcactcgatgggacatttcaacgtaaaccgtttaataatattttgaatcttattccattatctgaaatggtggtaaaactaactgctgtgtgtatgaaatgctttaaggaggcttccttttctaaacgattgggtgaggaaaccgagatagagataataggaggtaatgatatgtatcaatcggtgtgtagaaagtgttacgtcggctcataatattatattttttatctaaaaaactaaaaataaacattgattaaattttaatataatacttaaaaatggatgttgtgtcgttagataaaccgtttatgtattttgaggaaattgataatgagttagattacgaaccagaaagtgcaaatgaggtcgcaaaaaaactgccgtatcaaggacagttaaaactattactaggagaattattttttcttagtaagttacagcgacacggtatattagatggtgccaccgtagtgtactagttaacggccgccagtgtgctggaattctagaaaagtagaaaatatattctaatttattgcacgggatgagcgaaaaatacatcgtcacctgggacatgttgcagatccatgcacgtaaactcgcaagccgactgatgccttctgaacaatggaaaggcattattgccgtaagccgtggcggtctggtaccgggtgcgttactggcgcgtgaactgggtattcgtcatgtcgataccgtttgtatttccagctacgatcacgacaaccagcgcgagcttaaagtgctgaaacgcgcagaaggcgatggcgaaggcttcatcgttattgatgacctggtggataccggtggtactgcggttgcgattcgtgaaatgtatccaaaagcgcactttgtcaccatcttcgcaaaaccggctggtcgtccgctggttgatgactatgttgttgatatcccgcaagatacctggattgaacagccgtgggatatgggcgtcgtattcgtcccgccaatctccggtcgctaaggatcagcttggcgtaatcaagccgaattctgcagatatccatcacactggcggccgctcgagcatgcatctagagggcccaattcgccctatagtgagtcgtattacaattcactggccgtcgttttacaacgtcgtgactgggaaaaccctggcgttacccaacttaatcgccttgcagcacatccccctttcgccagctggcgtaatagcgaagaggcccgcaccgatcgcccttcccaacagttgcgcagcctgaatggcgaatggacgcgccctgtagcggcgcattaagcgcggcgggtgtggtggttacgcgcagcgtgaccgctacacttgccagcgccctagcgcccgctcctttcgctttcttcccttcctttctcgccacgttcgccggctttccccgtcaagctctaaatcgggggctccctttagggttccgatttagtgctttacggcacctcgaccccaaaaaacttgattagggtgatggttcacgtagtgggccatcgccctgatagacggtttttcgccctttgacgttggagtccacgttctttaatagtggactcttgttccaaactggaacaacactcaaccctatctcggtctattcttttgatttataagggattttgccgatttcggcctattggttaaaaaatgagctgatttaacaaaaatttaacgcgaattttaacaaaattcagggcgcaagggctgctaaaggaagcggaacacgtagaaagccagtccgcagaaacggtgctgaccccggatgaatgtcagctactgggctatctggacaagggaaaacgcaagcgcaaagagaaagcaggtagcttgcagtgggcttacatggcgatagctagactgggcggttttatggacagcaagcgaaccggaattgccagctggggcgccctctggtaaggttgggaagccctgcaaagtaaactggatggctttcttgccgccaaggatctgatggcgcaggggatcaagatctgatcaagagacaggatgaggatcgtttcgcatgattgaacaagatggattgcacgcaggttctccggccgcttgggtggagaggctattcggctatgactgggcacaacagacaatcggctgctctgatgccgccgtgttccggctgtcagcgcaggggcgcccggttctttttgtcaagaccgacctgtccggtgccctgaatgaactgcaggacgaggcagcgcggctatcgtggctggccacgacgggcgttccttgcgcagctgtgctcgacgttgtcactgaagcgggaagggactggctgctattgggcgaagtgccggggcaggatctcctgtcatcccaccttgctcctgccgagaaagtatccatcatggctgatgcaatgcggcggctgcatacgcttgatccggctacctgcccattcgaccaccaagcgaaacatcgcatcgagcgagcacgtactcggatggaagccggtcttgtcgatcaggatgatctggacgaagagcatcaggggctcgcgccagccgaactgttcgccaggctcaaggcgcgcatgcccgacggcgaggatctcgtcgtgacccatggcgatgcctgcttgccgaatatcatggtggaaaatggccgcttttctggattcatcgactgtggccggctgggtgtggcggaccgctatcaggacatagcgttggctacccgtgatattgctgaagagcttggcggcgaatgggctgaccgcttcctcgtgctttacggtatcgccgctcccgattcgcagcgcatcgccttctatcgccttcttgacgagttcttctgaattgaaaaaggaagagtatgagtattcaacatttccgtgtcgcccttattcccttttttgcggcattttgccttcctgtttttgctcacccagaaacgctggtgaaagtaaaagatgctgaagatcagttgggtgcacgagtgggttacatcgaactggatctcaacagcggtaagatccttgagagttttcgccccgaagaacgttttccaatgatgagcacttttaaagttctgctatgtggcgcggtattatcccgtattgacgccgggcaagagcaactcggtcgccgcatacactattctcagaatgacttggttgagtactcaccagtcacagaaaagcatcttacggatggcatgacagtaagagaattatgcagtgctgccataaccatgagtgataacactgcggccaacttacttctgacaacgatcggaggaccgaaggagctaaccgcttttttgcacaacatgggggatcatgtaactcgccttgatcgttgggaaccggagctgaatgaagccataccaaacgacgagcgtgacaccacgatgcctgtagcaatggcaacaacgttgcgcaaactattaactggcgaactacttactctagcttcccggcaacaattaatagactggatggaggcggataaagttgcaggaccacttctgcgctcggcccttccggctggctggtttattgctgataaatctggagccggtgagcgtgggtctcgcggtatcattgcagcactggggccagatggtaagccctcccgtatcgtagttatctacacgacggggagtcaggcaactatggatgaacgaaatagacagatcgctgagataggtgcctcactgattaagcattggtaactgtcagaccaagtttactcatatatactttagattgatttaaaacttcatttttaatttaaaaggatctaggtgaagatcctttttgataatctcatgaccaaaatcccttaacgtgagttttcgttccactgagcgtcagaccccgtagaaaagatcaaaggatcttcttgagatcctttttttctgcgcgtaatctgctgcttgcaaacaaaaaaaccaccgctaccagcggtggtttgtttgccggatcaagagctaccaactctttttccgaaggtaactggcttcagcagagcgcagataccaaatactgttcttctagtgtagccgtagttaggccaccacttcaagaactctgtagcaccgcctacatacctcgctctgctaatcctgttaccagtggctgctgccagtggcgataagtcgtgtcttaccgggttggactcaagacgatagttaccggataaggcgcagcggtcgggctgaacggggggttcgtgcacacagcccagcttggagcgaacgacctacaccgaactgagatacctacagcgtgagctatgagaaagcgccacgcttcccgaagggagaaaggcggacaggtatccggtaagcggcagggtcggaacaggagagcgcacgagggagcttccagggggaaacgcctggtatctttatagtcctgtcgggtttcgccacctctgacttgagcgtcgatttttgtgatgctcgtcaggggggcggagcctatggaaaaacgccagcaacgcggcctttttacggttcctggccttttgctggccttttgctcacatgttctttcctgcgttatcccctgattctgtggataaccgtattaccgcctttgagtgagctgataccgctcgccgcagccgaacgttgtttaattctgtgagcgtatggcaaacg

SEQ ID NO: 47 - DNA, 52 bp, Artificial Sequence
  tetO-mRFP-5 primer
gtcgactccctatcagtgatagagaatggtgaagcgtgagaaaaatgtcatc

SEQ ID NO: 48 - DNA, 25 bp, Artificial Sequence
  mRFP-3 primer
ttaattaattaggcgccggtggagt

SEQ ID NO: 49 - DNA, 708 bp, Artificial Sequence
  TurboFP635 cDNA
atggtgggtgaggatagcgtgctgatcaccgagaacatgcacatgaaactgtacatggagggcaccgtgaacgaccaccacttcaagtgcacatccgagggcgaaggcaagccctacgagggcacccagaccatgaagatcaaggtggtcgagggcggccctctccccttcgccttcgacatcctggctaccagcttcatgtacggcagcaaaacctttatcaaccacacccagggcatccccgacttctttaagcagtccttccctgagggcttcacatgggagaggatcaccacatacgaagacgggggcgtgctgaccgctacccaggacaccagcctccagaacggctgcctcatctacaacgtcaagatcaacggggtgaacttcccatccaacggccctgtgatgcagaagaaaacactcggctgggaggccagcaccgagatgctgtaccccgctgacagcggcctgagaggccatagccagatggccctgaagctcgtgggcgggggctacctgcactgctccctcaagaccacatacagatccaagaaacccgctaagaacctcaagatgcccggcttctacttcgtggacaggagactggaaagaatcaaggaggccgacaaagagacctacgtcgagcagcacgagatggctgtggccaggtactgcgacctgcctagcaaactggggcacagctga

SEQ ID NO: 50 - protein, 235 aa, Artificial Sequence
  TurboFP635 protein
MVGEDSVLITENMHMKLYMEGTVNDHHFKCTSEGEGKPYEGTQTMKIKVVEGGPLPFAFDILATSFMYGSKTFINHTQGIPDFFKQSFPEGFTWERITTYEDGGVLTATQDTSLQNGCLIYNVKINGVNFPSNGPVMQKKTLGWEASTEMLYPADSGLRGHSQMALKLVGGGYLHCSLKTTYRSKKPAKNLKMPGFYFVDRRLERIKEADKETYVEQHEMAVARYCDLPSKLGHS

SEQ ID NO: 51 - DNA, 19 bp, Artificial Sequence
  tet operator (tetO) sequence
tccctatcagtgatagaga

SEQ ID NO: 52 - DNA, 3519 bp, Artificial Sequence
  pCR-Blunt II-TOPO vector
agcgcccaatacgcaaaccgcctctccccgcgcgttggccgattcattaatgcagctggcacgacaggtttcccgactggaaagcgggcagtgagcgcaacgcaattaatgtgagttagctcactcattaggcaccccaggctttacactttatgcttccggctcgtatgttgtgtggaattgtgagcggataacaatttcacacaggaaacagctatgaccatgattacgccaagctatttaggtgacactatagaatactcaagctatgcatcaagcttggtaccgagctcggatccactagtaacggccgccagtgtgctggaattcgcccttaagggcgaattctgcagatatccatcacactggcggccgctcgagcatgcatctagagggcccaattcgccctatagtgagtcgtattacaattcactggccgtcgttttacaacgtcgtgactgggaaaaccctggcgttacccaacttaatcgccttgcagcacatccccctttcgccagctggcgtaatagcgaagaggcccgcaccgatcgcccttcccaacagttgcgcagcctatacgtacggcagtttaaggtttacacctataaaagagagagccgttatcgtctgtttgtggatgtacagagtgatattattgacacgccggggcgacggatggtgatccccctggccagtgcacgtctgctgtcagataaagtctcccgtgaactttacccggtggtgcatatcggggatgaaagctggcgcatgatgaccaccgatatggccagtgtgccggtctccgttatcggggaagaagtggctgatctcagccaccgcgaaaatgacatcaaaaacgccattaacctgatgttctggggaatataaatgtcaggcatgagattatcaaaaaggatcttcacctagatccttttcacgtagaaagccagtccgcagaaacggtgctgaccccggatgaatgtcagctactgggctatctggacaagggaaaacgcaagcgcaaagagaaagcaggtagcttgcagtgggcttacatggcgatagctagactgggcggttttatggacagcaagcgaaccggaattgccagctggggcgccctctggtaaggttgggaagccctgcaaagtaaactggatggctttctcgccgccaaggatctgatggcgcaggggatcaagctctgatcaagagacaggatgaggatcgtttcgcatgattgaacaagatggattgcacgcaggttctccggccgcttgggtggagaggctattcggctatgactgggcacaacagacaatcggctgctctgatgccgccgtgttccggctgtcagcgcaggggcgcccggttctttttgtcaagaccgacctgtccggtgccctgaatgaactgcaagacgaggcagcgcggctatcgtggctggccacgacgggcgttccttgcgcagctgtgctcgacgttgtcactgaagcgggaagggactggctgctattgggcgaagtgccggggcaggatctcctgtcatctcaccttgctcctgccgagaaagtatccatcatggctgatgcaatgcggcggctgcatacgcttgatccggctacctgcccattcgaccaccaagcgaaacatcgcatcgagcgagcacgtactcggatggaagccggtcttgtcgatcaggatgatctggacgaagagcatcaggggctcgcgccagccgaactgttcgccaggctcaaggcgagcatgcccgacggcgaggatctcgtcgtgacccatggcgatgcctgcttgccgaatatcatggtggaaaatggccgcttttctggattcatcgactgtggccggctgggtgtggcggaccgctatcaggacatagcgttggctacccgtgatattgctgaagagcttggcggcgaatgggctgaccgcttcctcgtgctttacggtatcgccgctcccgattcgcagcgcatcgccttctatcgccttcttgacgagttcttctgaattattaacgcttacaatttcctgatgcggtattttctccttacgcatctgtgcggtatttcacaccgcatacaggtggcacttttcggggaaatgtgcgcggaacccctatttgtttatttttctaaatacattcaaatatgtatccgctcatgagacaataaccctgataaatgcttcaataatagcacgtgaggagggccaccatggccaagttgaccagtgccgttccggtgctcaccgcgcgcgacgtcgccggagcggtcgagttctggaccgaccggctcgggttctcccgggacttcgtggaggacgacttcgccggtgtggtccgggacgacgtgaccctgttcatcagcgcggtccaggaccaggtggtgccggacaacaccctggcctgggtgtgggtgcgcggcctggacgagctgtacgccgagtggtcggaggtcgtgtccacgaacttccgggacgcctccgggccggccatgaccgagatcggcgagcagccgtgggggcgggagttcgccctgcgcgacccggccggcaactgcgtgcacttcgtggccgaggagcaggactgacacgtgctaaaacttcatttttaatttaaaaggatctaggtgaagatcctttttgataatctcatgaccaaaatcccttaacgtgagttttcgttccactgagcgtcagaccccgtagaaaagatcaaaggatcttcttgagatcctttttttctgcgcgtaatctgctgcttgcaaacaaaaaaaccaccgctaccagcggtggtttgtttgccggatcaagagctaccaactctttttccgaaggtaactggcttcagcagagcgcagataccaaatactgtccttctagtgtagccgtagttaggccaccacttcaagaactctgtagcaccgcctacatacctcgctctgctaatcctgttaccagtggctgctgccagtggcgataagtcgtgtcttaccgggttggactcaagacgatagttaccggataaggcgcagcggtcgggctgaacggggggttcgtgcacacagcccagcttggagcgaacgacctacaccgaactgagatacctacagcgtgagctatgagaaagcgccacgcttcccgaagggagaaaggcggacaggtatccggtaagcggcagggtcggaacaggagagcgcacgagggagcttccagggggaaacgcctggtatctttatagtcctgtcgggtttcgccacctctgacttgagcgtcgatttttgtgatgctcgtcaggggggcggagcctatggaaaaacgccagcaacgcggcctttttacggttcctgggcttttgctggccttttgctcacatgttctttcctgcgttatcccctgattctgtggataaccgtattaccgcctttgagtgagctgataccgctcgccgcagccgaacgaccgagcgcagcgagtcagtgagcgaggaagcggaag

SEQ ID NO: 53 - DNA, 29 bp, Artificial Sequence
  tetR-5 primer
ctcgagatgtccagactggacaagagcaa

SEQ ID NO: 54 - DNA, 34 bp, Artificial Sequence
  tetR-3 primer
ggatcctcaagagccagactcacatttcagctgc

SEQ ID NO: 55 - DNA, 183369 bp, Vaccinia virus
  LIVP 1.1.1 strain
tttttttatgagaccatcaaagagagaaagagaataaaaatatttttgtaaaactttttttatgagaccatcaaagagagaaagagaataaaaatatttttgtaaaactttttttatgagaccatcaaagagagaaagagaataaaaatatttttgtaaaactttttttatgagaccatcaaagagagaaagagaataaaaatatttttgtaaaactttttttatgagaccatcaaagagagaaagagaataaaaatatttttgtaaaactttttttatgagaccatcaaagagagaaagagaataaaaatatttttgtaaaactttttttatgagaccatcaaagagagaaagagaataaaaatatttttgtaaaactttttttatgagaccatcaaagagagaaagagaataaaaatatttttgtaaaactttttttatgagaccatcaaagagagaaagagaataaaaatatttttgtaaaactttttttatgagaccatcaaagagagaaagagaataaaaatatttttgtaaaactttttttatgagaccatcagaaagaggtttaatatttttgtgatactctgaaaggaaataggaataggaataggaatagtgtcataatcgtatcacactattgagacagaaaaagaagaagtcgcgagaggtaactttttgtgaatgtagttaagaacatttttgttttgcaaaccggaatatagtgtccggtacacttttttaattcgtggtgtgcctgaatcgttcgattaaccctactcatccaatttcagatgaatagagttatcgattcagacacacgctttgagttttgttgaatcgatgagtgaagtatcatcggttgcaccttcagatgccgatccgtcgacatacttgaatccatccttgacctcaagttcagatgattccttgcacatgtctccgatacgaacgctaaactctagattcttgacacattttgtatcgacgatcgttgaaccgatgatatcttcgtaactcactttcttatgagagatgttagacccgagtactggatgtcgctgtctttctcttcttcgctacatctgatgtcgatagacacctcacagtctttgatcatagcaagagcttcttcatgagtccttaccttgtcctggggacacgctggacaatctagcattcactgtgtttccatcagcggattctgagatggatttaatctgaggacatttggtgaatccaaagttcattctcagacctccaccgatgatggagtaataagtggtaggaggatctacatcctcgactgatgtggaatcatcttctgattccacctcgggatctggatctgactcggactctgtaatttccgttacggattggcaaatcttatcattggtcggtgtttggtcttgctttgtgactttgataataacatcgattcccatatgatgtttgttttcttcttccgtacacgaggaggaggatgaggatgattgctgaagactggcaggcatagcagctgccgccaggcacatgcatgccaggacgatatattgtttcataattgctattgattgagtactgttctttatgattctacttccttaccgtgcaataaattagaatatattttctacttttacgagaaattaattattgtatttattatttatgggtgaaaaacttactataaaaagtgggtgggtttggaattagtgatcagtttatgtatatcgcaactaccgggcatatggctatcgacatcgagaacattacccacatgataagagattgtatcagtttcgtagtcttgagtattggtattactatatagtatatagatgtcgcccactagagttactgtctccgaatgcggcatgatagtatcattctttgctttcgttaactgtttggaggaagaatctttgttattgcatttaatctcgaaattcagagtgcacacctttctcctgtaaagaaacctgaagtcgctaccttattaagaacggagaagtatccatcacgaaagacgggattacagtctttatgattcatagtaatagttagttccgacgttgagatggattcgctgagaccggtagtggtcgtccgagtacacgacgtgtcgttgacgggatacaggttaatttccacatcgatatagttaaaggtatttctgggtacgggttcgcatttatctgcggaagagacggtgtgagaatatgttccgagaccacacggagaacagatgacgtctccggatactccgtatcctattccacattttgtttgggaaacacatgccttgcatccggatgatcctttgagaagacaataatatccgggagagcattcacagattctattgtgagtcgtgttacacgatcgcgtcttccgttacaacttagacaagcgggtaaatgattattgcgagatgtgaaggtacccgaaccacacggcgtacattgtgtgttagtcttgctatcgcataatctggaagcgtatgttcccggacacaaattatggcgtttgtattcgttgtctttacactttccatcggatggtgcatgcggtgctatatctcttccgtttattattatacatgagagaaacaatatatacgagtataatacggacttcatgatttaataatgtagtaatcgtcgtcttgttcctgtttcctacttctccaatcatatagatattttctttctatcatggataatatttgtaatggttctttccgtacaacatactgtttagatgatattgcgcataatttccggaggcaaatacgatagtctagattgaccgatggtagactctaatttattgagtgctttgtcgacgagtttacttttacgctccatcgatagatggcactgttctatgagatcgtcgtacatgggaaatgaaatgtgtctgtctgaatgtatggctttaagatagctgtgataccgtatacaggtcggtgtcggagattcgaatctctttaaggcgacttatgtcacgatgatggaatctatcttatcgaatgatatatttttcataaatacacttttatagtcctcgtttaaacagaatttactatgtagttccgcgaatgactcgtcccttaataggcagtaggctagtatcttttttacgtagtaatcgtcgtagggagagacatcttgtagaacaacgatttaatcataggtagagatactttcagtctgtggtggatgatgtcattcacaacatccgccttgtatatgatgtttctgttttcaaacaccaagtcgaataccgtctttagtcggaaggttgatgtcgtatccgatgtatgaggcaacattgttgttacaattttgaaaggcggtattatagtattcgtctttctgaatgtcgaacctatctaatagataccgtagtatattgagagtgtatccttgattatgttttatgaatagataaagtagatgttgtccttcttccttttgttcgtgccaattgagtaacattatgagaatatgacctgttgcacaatcgttccatgatgggtgtacaatcaagattattacgtatcctcgtatcggctcctcgagataaaagagcatacaccacacgaggactatgtttggtatactgttgaaggtaagtgtgtaaccgcgttaatgtttgctccataatctattatcgcgtagatgaatcgcttctcggctcgcatcttagtgtgacttaacttgtaataattgctttcgtagaacgtggatatgtgtttacagtagtaatgaagagaagtgagttcatcctcgtcggcgcaattagggtcggatcctttgtacagaacgtaatagtttaagctcccattgaatttatatctaagataacacagcaatagatcggatgatttactaaagtcatcaatggtgtccgttagtatatcaaagatcttgttatcgattgatagtggtcatccttgctatcaaagttacgcatgccgtggtgtaacaatatctttaatacagatggattaaatcgtgtattcatcgtatagcaatgtaatggagagttacctcgtttattcagatcgcagtgtttaataactagcttaaacagatgagacgatgtatccacatcaaagaacgtaaaatacatatgacagacattgttgacagaaacgtgaccttcattcttaccgtcgtccataaatacgttaggtatgtaccacatactgtcgcgaacgatgcgtacaatctcgtccatctcataatgatttactttttcataattaaagatgtgaaagaaaaccgaacaatatatttttttagtaatgtttatgcgagacatataaaataaactccgtgtttatgatgccggtaaatgtttttatcatcttggacggaatcgattttgtaatatgtcatggaaacaaatgaaacaggacattatcgctccatgataaattatttaatggagtaataaagtatctccatgggtaatttcgaaatcaagttatcgtctgtattaatgttgtccactatggagtcgatcctctcattgttctttacagtttctgtaatgatggacgttagttcttttttgtaccatttgatgtcggattctttgcgtatctcaatttgtggcgtttgcttcgtttaaataatatatcaaacatggagacgcctgatatgtagacattcttcattctattaatgtctactctatagcgctttagttccttatgacgaccggcgatatcatactttactttagaaggaaaatcatcatctaggattaaggcgtatctgatacaggcgaataatggttcaggatatagatagcgtatatctctattaaatgcgtcaatcatagtctctagagtgggatggtaactcagtaataaatcaactagcttcgttttgttttctctttggtaactgcttttctggatggccgtattgattatcgagcgtgacactcgctccatattccaataaccgctttgcaaattgtatattattgacatcgaccgcgtaatatagtagagttatcgatcatatctatatcatccatgtacttgcttagtatatcaaatacatctatcagtatggtttcataacagtgatacccgcaattattaaatctcgataatatcagaccgtacatacatagacggccattgttcgatacgtgatttacagccgcgtgtccatattttccacgataaaccttacgacgtttacatcgacgagattattattaacaaagtagtcgtgcagaggatagttgttgtccgttatctaacatgcatcgaacgaccatatcgccgtaatgtaagtagtttatcaacatggcttgtacatcctgttgtctaaatctctttagaatgttatcgatgatgtagtggttatattctctggaatcgtacgaagtaatactacgcattacgtcgacaagagtatgacgtctctcaataagaagattaacgatttccatgtctacattatatggggttactctaaatcgcttgtttagataatatagggctgacgtcgtatactctacacgtgtccacatcctttattaataataatttaacaatctctatatctatggttgagaaagaccagtagtattggatgggtaaagatcctccttcgtctctgccatggatggaaacattgttatcgatcaaacatttaattacatccttggatagagattgagattctctatgagacgatatatagtaatgaagagagttcttacacatatcactgtcgtacatacaggtacgaaatacgtaaccggtgctgtaacattctgatttaagaagccatagcaatacttctggtctcggattaggcgtcgttacgtatatatccaccaatccgagaccattgattgcataattcgtattcttggacggacgtatccgtttatccacaattaggtattttagcagacgtaagtcgatattatccgaatacagatcgaaatcatttatattcgacttgagttcgttagaggaatttgaatagctggatatcagtagatgcacaatctgagattttacgtatctatgcttactgtatactcctagcggagttaatccttcgttgtttctacaaagtctctcgactccgcgagagaacaatcttaatgtctgtatcgcatttattggagacgtaacaatgtagcgcattgtttcctcgtctatctatatgttttgataagttgtgacacgtttcaatttctagttttatttttttgtacgtcacatcttcatccagtagacgacatagaatagtgcactctctaccacaataatccatagctattctggtgctaattattcctatttcacgaaggcaatcattcctcataagatgataaaaagtgtagtggagatttagtatttagcagtgcggatatgatccaagagggtgagatagtcgttctcgttcagaatctttcgcagcataagtagtatgtcgatatacttatcgttgaagactctttataaaagtctatttgtttatatttattgcggatagcagtatttccctataaaaagtatacgtcctgtggtgtctttaatcatgtacatgaatggatggtttatgtagaccttcgtacgatataccatcgaaaagttaatcgtaaatactcctgtaacggccgatgcttctgtatactcctcattaacatctataaacgtcgtatgtagaaatttttctacagtgatagtttcattacacatcttgctaaaatctgcataatatccgaatatattagtaagtcctaaattttctaaaatcggtaccagattatacggttctgtcatttccactttaaactttggcatatacaagtctatacttttagtagataacataccacaccattttttaaatttttcatctgttatatttttttctatgttatatataccttctatgtcgtccggtagtataattaccatactagagtttccctcgtatggaatatcgataatagagaatcctccgaataattcattaatatgtacatattgcaagttattctcggtacccaccatcatatcaacgctggtaactatattcttagaaatataaaacttgtctgtatatgtaagatgtttagaaaatggatatttccacattgctttaaaatggacggcgctaacaactgtcatacgagtattaatggatagcggactagtcaataaggaattaattttaccatttgtcattgtcttaacccattcgttgattagttcctttgtttggttagcattattaaagtttacagtttgaaaatcgtcttttattttttgtaggaaggaggcgtggaactcgatactatcgctaccgtatattttatttgcggtagctagtgtcgcacaatacggaatatctacctccatgtcatcattattgtcatcgggtgtattctcattcatattctctatatattttgatagttgttcagctgtagaaccagctgctccatgatttagaatagataaagtagataaaatagaaactggagaaatcaaaacattttcatccgtgtgttttaagattagttctttaaagatatccatggtatagaccaaacaataacgataacgatatatatcataaataaataatgttaaatttcagtttatgtttgtaccccgtattcatacttaacaaattggtattgcgtacacaatcaatcatattacataccattaataatgcaagcataaaaaattgttagtagatgtttctaaatataggttccgtaagcaaagaatataagaatgaagcggtaatgataaaatcaatcgttatctaaaatgatcatactcatttattttattctattatattaacacatacatttttaacagcaacacattcaatattgtattgttatttttatattatttacacaattaacaatatattattagtttatattactgaattaataatataaaattcccaatcttgtcataaacacacactgagaaacagcataaacacagaatccatcaaaaatgttgataaattatctgatgttgttgttcgctgctatgataatcagatcattcgccgatagtggtaacgctatcgaaacgacattgccagaaattacaaacgctacaacagatattccagctatcagattatgcggtccagagggagatggatattgtttacacggtgactgtatccacgctagagatattgacggtatgtattgtagatgctctcatggttatacaggcattagatgtcagcatgtagtattagtagactatcaacgttcagaaaacccaaacactacaacgtcatatatcccatctcccggtattatgcttgtattagtaggcattattatgtgttgtctattatctgtttataggttcactcgacgaactaaactacctatacaagatatggttgtgccataatttttataaatttttttatgagtatttttacaaaaatgtataaagtgtatgtcttatgtatatttataaaaatgctaagtatgcgatgtatctatgttatttgtatttatctaaacaatacctctacctctagatattatacaaaaattttttatttcggcatattaaagtaaaatctagttaccttgaaaatgaatacagtgggtggttccgtatcaccagtaagaacataatagtcaaatacagtatccgattgagattttgcatacaatactagtctagaaagaaatttgtaatcatcttctgtgacgggagtccatatatctgtatcatcgtctagtttatcagtgtcccatgctatattcctgttatcatcattagttaatgaaaataactctcgtgcttcagaaaagtcaaatattgtatccatacatacatctccaaaactatcgcttatacgtttatctttaacgatacctatacctagatggttatttactaacagacattttccagatctattgactataactcctatagtttccacatcaaccaagtaatgatcatctattgttatataacaataacataactcttttccatttttatcagtatgtatatctatatcaacgtcgtcgttgtagtgaatagtagtcattgatctattatatgaaacggatatgtctagaacggcaattgttttacgtccagttaacactttcgttgatttaaagtctagagtctttgcaaacataatatccttatccgactttatatttcctgtagggtggtataattttattttgcctccacatatcggtgtttccaaatatattactagacaatattccatatagttattagttaagggtacccaattagaacacgtacgcttattatcatcatttggatcgtatttcataaaagttattgtgttatcgatgtcaacacattctacattttttaatcgtctatatagtatttttctgatattttctataatatcagaattgtcttccatcggaagttgtatactatcggaatcagttacatgtttaaataattctctgatgtcattccttatacaatcaaattcattattaaacagtttaatagtctgtagacctttatcgtcgtaaatatccattgtcttattagttacgcttatttttatgtgtttttacgttgctttattatattttataagaatgattgtttgacgaatcacgagaactattaagacacattattaggtatatattataaaaaagtttttgattacgatgttataagaggaaagaggacacattaacatcatacatcaattaactacattcttataacatcgtaatcaaaagaattgcaattttgatgtataacaactgtcaatgggttatggaattgtatattacatattatacggtatgttggtaacgacaaataccggtcggtaattgtctgccggtgtaatagaattatatatatctatctattacaccggccttgtatacataataataagttgtggtagtatgatctccatatttataatttaggactttgtattcagtatttttggaatcataaaaaataaaaaaaagttttactaatttaaaatttaaaaagtatttacatttttttcactgtttagtcgcggatatggaattcgatcctgccaaaatcaatacatcatctatagatcatgtaacaatattacaatacatagatgaaccaaatgatataagactaacagtatgcattatccgaaatattatatcaatatcacaaaaataaatacacatttggctaatcaatttcgggcttggaaaaaacgtatcgccggaagggactatatgactaacttatctagagatacaggaatacaacaatcaaaacttactgaaactatacgtaactgtcaaaaaaatagaaacatatatggtctatatatacactacaatttagttattaattggataaccgatgtgattatcaatcaatattaagagggttggtaaattggtacatagctaataatacctatactccaaatacacccaataatacaacaaccatttctgagttggatatcatcaaaatactggataaatacgaggacgtgtatagagtaagtaaagaaaaagaatgtggaatttgctatgaagttgtttactcaaaacgatagatactttggtttattggattcgtgtactcatatattttgcataacatgcatcaatatatggcatagaacacgaagagaaaccggtgcgtcggataattgtcctatatgccgtacccgttttagaaacataacaatgagcaagttctataagctagttaactaataaataaaaagtttaatttgttgacgacgtatgtcgttattttttctcgtataaaagattaatttgattctaatataatctttagtattggataaatatcaattcaaattaattccattagattatatcataaataaaaatagtagcacgcactacttcagccaaatattcttttttgaaacgccatctatcgtagtgaggacacaagtgaacctataattatcaaatttattagtatcggttacatgaaggactttacgtagagtgacgattccactatctgtggtacgaacggtttcatcttctttgatgccatcacccagatgttctataaacttggtatcctcgtccgatctcatatcctttgccaaccaatacatgtagctaaaattaggcataaatttcacacatcctgaacaatgaaattctccagaagatgttacaatgtctagatttggacatttggtttcaaccgcgttaacatatgagtgaacacacccatacatgaaagcgatgagaaataggattctcatcttgccaaaatatcactagaaaaaatttatttatcagttttaaaggtataaaaaatacttattgttgctcgaatattttgtatttgatggtatacggaagattagaaatgtaggtattatcatcaactgattctatggttttatgtattctatcatgtttcactattgcgttggaaataatatcatatgcttccacatatattttattttgttttaactcataatactcacgtaattctggattattggcatatctatgaataattttagctccatgatcagtaaatattaatgagaacatagtattaccacctaccattatttttttcatctcattcaattcttaattgcaaagatctatataatcattatagcgttgacttatggactctggaatcttagacgatgtacagtcatctataatcatggcatatttaatacattgttttatagcatagtcgttatctacgatgttagatatttctctcaatgaatcaatcacacaatctaatgtaggtttatgacataatagcattttcagcagttcaatgtttttagattcgttgatggcaatggctatacatgtatatccgttatttgatctaatgttgacatctgaaccggattctagcagtaaagatactagagattgtttattatatctaacagccttgtgaagaagtgtttctcctcgtttgtcaatcatgttaatgtctttaagataaggtaggcaaatgtttatagtactaagaattgggcaagcataagacatgtcacaaagacccttttttgtatgtataagtgtaaaaattataacatccatagttggatttacataggtgtccaatcgggatctctccatcatcgagataattgatggcatctcccttccttttttagtagatatttcatcgtgtaagaatcaatattaatatttctaaagtatccgtgtatagcctctttatttaccacagctccatattccactagagggatatcgccgaatgtcatatactcaattagtatatgttggaggacatccgagttcattgttttcaatatcaaagagatggtttccttatcatttctccatagtggtacaatactacacattattccgtgcggctttccattttccaaaaacaatttgaccaaatctaaatctacatctttattgtatctataatcactatttagataatcagccataattcctcgagtgcaacatgttagatcgtctatatatgaataagcagtgttatctattcctttcattaacaatttaacgatgtctatatctatatgagatgacttaatataatattgaagagctgtacaatagtttttatctataaaagacggcttgattccgtgattaattagacatttaacaacttccggacgcacatatgctctcgtatccgactttgaatacagatgagagatgatatacagatgcaatacggtaccgcaatttcgtagttgataatcatcatacgcgtatcagtactcgtcctcataaagaacactgcagccattttctatgaacaaatcaataattttagaaacaggatcattgtcattacataattttctataactgaacgatggttttcacatttaacactcaagtcaaatccatgttctaccaacacctttatcaagtcaacgtctacatttttggatttcatatagctgaatatattaaagttatttatgttgctaaatccagtggcttctagtagagccatcgctatatccttattaactttaacatgtctactatttgtgtattcttctaatggggtaagctgtctccaatttttgcgtaatggattagtgccactgtctagtagtagtttgacgacctcgacattattacaatgctcattaaaaaggtatgcgtgtaaagcattattcttgaattggttcctggtatcattaggatctctgtctttcaacatctgtttaagttcatcaagagccacctcctcattttccaaatagtcaaacattttgactgaatgagctactgtgaactctatacacccacacaactaatgtcattaaatatcatgtcaaaaacttgtacaattattaataaaaataatttagtgtttaaattttaccagttccagattttacacctccgttaatacctccattaaccccactggacgatcctcctccccacattccaccgccaccagatgtataagttttagatcctttattactaccatcatgtccatggataaagacactccacatgccgccactaccccctttagaagacatattaataagacttaaggacaagtttaacaataaaattaatcacgagtaccctactaccaacctacactattatatgattatagtttctatttttacagtaccttgactaaagtttctagtcacaagagcaatactaccaacctacactattatatgattatagtttctatttttataggaacgcgtacgagaaaatcaaatgtctaatttctaacggtagtgttgataaacgattgttatccgcggatacctcctctatcatgtcgtctattttcttactttgttctattaacttattagcattatatattatttgattataaaacttatattgcttattagcccaatctgtaaatatcggattattaacatatcgtttctttgtaggtttatttaacatgtacatcactgtaagcatgtccttaccatttattttaatttgacgcatatccgcaatttctttttcgcagtcggttataaattctatatatgatggatacatgctacatgtgtacttataatcgactaatatgaagtacttgatacatattttcagtaacgatttattattaccacctatgaataagtacctgtgatcgtctaggtaatcaactgttttcttaatacattcgatggttggtaatttactcagaataatttccaatatcttaatatataattctgctatttctgggatatatttatctgccagtataacacaaatagtaatacatgtaaacccatattttgttattatattaatgtctgcgccattatctattaaccattctactaggctgacactatgcgactcaatacaatgataaagtatactacatccatgtttatctattttgtttatatcatcaatatacggcttacaaagttttagtatcgataacacatccaactcacgcatagagaaggtagggaataatggcataatatttattaggttatcatcattgtcattatctacaactaagtttccattttttaaaatatactcgacaactttaggatctctattgccaaatttttgaaaatatttatttatatgcttaaatctatataatgtagctccttcatcaatcatacatttaataacattgatgtatactgtatgataagatacatattctaacaatagatcttgtatagaatctgtatatcttttaagaattgtggatattaggatattattacataaactattacacaattctaaaatataaaacgtatcacggtcgaataatagttgatcaactatataattatcgattttgtgatttttcttcctaaactgtttacgtaaatagttagatagaatattcattagttcatgaccactatagttactatcgaataacgcgtcaaatatttcccgtttaatatcgcatttgtcaagataataatagagtgtggtatgttcacgataagtataataacgcatctctttttcgtgtgaaattaaatagtttattacgtccaaagatgtagcataaccatcttgtgacctagtaataatataataatagagaactgttttacccattctatcatcataatcagtggtgtagtcgtaatcgtaatcgtctaattcatcatcccaattataatattcaccagcacgtctaatctgttctattttgatcttgtatccatactgtatgttgctacatgtaggtattcctttatccaataatagtttaaacacatctacattgggatttgatgttgtagcgtatttttctacaatattaataccatttttgatactatttatttctatacctttcgaaattagtaatttcaataagtctatattgatgttatcagaacatagatattcgaatatatcaaaatcattgatatttttatagtcgactgacgacaataacaaaatcacaacatcgtttttgatattattatttttcttggtaacgtatgcctttaatggagtttcaccatcatactcatataatggatttgcaccactttctatcaatgattgtgcactgctggcatcgatgttaaatgttttacaactatcatagagtatcttatcgttaaccatgattggttgttgatgctatcgcattttttggtttctttcatttcagttatgtatggatttagcacgtttgggaagcatgagctcatatgatttcagtactgtagtgtcagtactattagtttcaataagatcaatctctagatctatagaatcaaaacacgataggtcagaagataatgaatatctgtacgcttcttgttgtactgtaacttctggttttgttagatggttgcatcgtgctttaacgtcaatggtacaaattttatcctcgctttgtgtatcatattcgtccctactataaaattctatattcagattatcatgcgatgtgtatacgctaacggtatcaataaacggagcacaccatttagtcataaccgtaatccaaaaatttttaaagtatatcttaacgaaagaagttgtatcattgtctacggtgtatggtactagatcctcataagtgtatatatctagagtaatgtttaatttattaaatggttgataatatggatcgtcgtggcaatttcctaagatggaaatgagatatagacacgcaataaatctaatcgaagacatggttactccttaaaaaaatacgaataatcaccttggctatttagtaagtgtcatttaacactatactcatattaatccatggactcataatctctatacgggattaacggatgttctatatacggggatgagtagttctcttctttaactttatactttttactaatcatatttagactgatgtatgggtaatagtgtttgaagagctcgttctcatcatcagaataaatcaatatctctgtttttttgttatacagatgtattacagcctcatatattacgtaatagaacgtgtcatctaccttattaactttcaccgcatagttgtttgcaaatacggttaatcctttgacctcgttgatttccgaccaatctgggcgtataatgaatctaaactttaatttcttgtaatcattcgaaataatttttagtttgcatccgtagttatcccctttatgtaactgtaaatttctcaacgcgatatctccattaataatgatgtcgaattcgtgctgtatacccatactgaatggatgaacgaataccgacggcgttaatagtaatttactttttcatctttacatattgggtactagttttactatcataagtttataaattccacaagctactatggaataagccaaccatcttagtataccacacatgtcttaaagtttattaattaattacatgttgttttatatatatcgctacgaatttaaacagagaaatcagtttaggaaaaaaaaaattatctatctacatcatcacgtctctgtattctacgatagagtgctactttaagatgagacatatccgtgtcatcaaaaatatactccattaaaatgattattccggcagcgaacttgatattggatatatcacaacctttgttaatatctacgacaatagacagcagtcccatggttccataaacagtgagtttatctttctttgaagagatattttgtagagatcttataaaactgtcgaatgacatcgcatttatatctttagctaaatcgtatatgttaccatcgtaatatctaaccgcgtctatcttaaacgtttccatcgctttaaagacgtttccgatagatggtctcatttcatcagtcatactgagccaacaaatataatcgtgtataacatctttgatagaatcagactctaaagaaaacgaatcggctttattatacgcattcatgataaacttaatgaaaaatgtttttcgttgtttaagttggatgaatagtatgtcttaataattgttattatttcattaattaatatttagtaacgagtacactctataaaaacgagaatgacataactaatcataactagttatcaaagtgtctaggacgcgtaattttcatatggtatagatcctgtaagcattgtctgtattctggagctattttctctatcgcattagtgagttcagaatatgttataaatttaaatcgaataacgaacataactttagtaaagtcgtctatattaactcttttattttctagccatcgtaataccatgtttaagatagtatattctctagttactacgatctcatcgttgtctagaatatcacatactgaatctacatccaattttagaaattggtctgtgttacatatctcttctatattattgttgatgtattgtcgtagaaaactattacgtagaccattttctttataaaacgaatatatagtactccaattatctttaccgatatatttgcacacataatccattctctcaatcactacatctttaagattttcgttgttaagatatttggctaaactatataattctattagatcatcaacagaatcagtatatatttttctagatccaaagacgaactctttggcgtcctctataatattcccagaaaagatattttcgtgttttagtttatcgagatctgatctgttcatatacgccatgattgtacggtacgttatgataaccgcataaaataaaaatccattttcatttttaaccaatactattcataattgagattgatgtaatactttgttactttgaacgtaaagacagtacacggatccgtatctccaacaagcacgtagtaatcaaatttggtgttgttaaacttcgcaatattcatcaatttagatagaaacttatactcatcatctgttttaggaatccatgtattattaccactttccaacttatcattatcccaggctatgtttcgtccatcatcgttgcgcagagtgaataattcttttgtattcggtagttcaaatatatgatccatgcatagatcggcaaagctattgtagatgtgatttttcctaaatctaatataaaactcgtttactagcaaacactttcctgatttatcgaccaagacacatatggtttctaaatctatcaagtggtggggatccatagttatgacgcagtaacatatattattacattcttgactgtcgctaatatctaaatatttattgttatcgtattggattctgcatatagatggcttgtatgtcaaagatatagaacacataaccaatttatagtcgcgctttacattctcgaatctaaagttaagagatttagaaaacattatatcctcggatgatgttatcactgtttctggagtaggatatattaaagtctttacagatttcgtccgattcaaataaatcactaaataatatcccacattatcatctgttagagtagtatcattaaatctattatattttatgaaagatatatcactgctcacctctatatttcgtacatttttaaactgtttgtataatatctctctgatacaatcagatatatctattgtgtcggtagacgataccgttacatttgaattaatggtgttccattttacaacttttaacaagttgaccaattcatttctaatagtatcaaactctccatgattaaatattttaatagtatccattttatatcactacggacacaaagtagctgacataaaccattgtataatttttatgttttatgtttattagcgtacacattttggaagttccggcttccatgtatttcctggagagcaagtagatgatgaggaaccagatagtttatatccgtacttgcacttaaagtctacattgtcgttgtatgagtatgatcttttaaacccgctagacaagtatccgtttgatattgtaggatgtggacatttaacaatctgacacgtgggtggatcggaccattctcctcctgaacacaggacactagagttaccaatcaacgaatatccactattgcaactataagttacaacgctcccatcggtataaaaatcctcgtatccgttatgtcttccgttggatatagatggaggggattggcatttaacagattcacaaataggtgcctcgggattccataccatagatccagtagatcctaattcacaatacgatttagattcaccgatcaactgatatccgctattacaagagtacgttatactagagccaaagtctactccaccaatatcaagttggccattatcgatatctcgaggcgatgggcatctccgtttaatacattgattaaagagtgtccatccagtacctgtacatttagcatatataggtcccattttttgctttctgtatccaggtagacatagatattctatagtgtctcctatgttgtaattagcattagcatcagtctccacactattcttaaatttcatattaatgggtcgtgacggaatagtacagcatgatagaacgcatcctattcccaacaatgtcaggaacgtcacgctctccaccttcatatttatttatccgtaaaaatgttatcctggacatcgtacaaataataaaaagcccatatatgttcgctattgtagaaattgtttttcacagttgctcaaaaacgatggcagtgacttatgagttacgttacactttggagtctcatctttagtaaacatatcataatattcgatattacgagttgacatatcgaacaaattccaagtatttgattttggataatattcgtattttgcatctgctataattaagatataatcaccgcaagaacacacgaacatctttcctacatggttaaagtacatgtacaattctatccatttgtcttccttaactatatatttgtatagataattacgagtctcgtgagtaattccagtaattacatagatgtcgccgtcgtactctacagcataaactatactatgatgtctaggcatgggagacttttttatccaacgatttttagtgaaacattccacatcgtttaatactacatatttctcatacgtggtataaactccacccattacatatatatcatcgtttacgaataccgacgcgcctgaatatctaggagtaattaagtttggaagtcttatccatttcgaagtgccgtgtttcaaatattctgccacacccgttgaaatagaaaattctaatcctcctattacatataactttccatcgttaacacaagtactaacttctgattttaacgacgacatattagtaaccgttttccattttttcgttttaagatctacccgcgatacggaataaacatgtctattgttaatcatgccgccaataatgtatagacaattatgtaaaacatttgcattatagaattgtctatctgtattaccgactatcgtccaatattctgttctaggagagtaatgggttattgtggatatataatcagagtttttaatgactactatattatgttttataccatttcgtgtcactggctttgtagatttggatatagttaatcccaacaatgatatagcattgcgcatagtattagtcataaacttgggatgtaaaatgttgatgatatctacatcgtttggatttttatgtatccactttaataatatcatagctgtaacatcctcatgatttacgttaacgtcttcgtgggataagatagttgtcagttcatcctttgataattttccaaattctggatcggatgtcaccgcagtaatattgttgattatttctgacatcgacgcattatatagttttttaattccatatcttttagaaaagttaaacatccttatacaatttgtgaaattaatattatgaatcatagtttttacacatagatctactacaggcggaacatcaattattatggcagcaactagtatcatttctacattgtttatggtgatgtttatcttcttccagcgcatatagtctaatagcgattcaaacgcgtgatagtttataccattcaatataatcgcttcatcctttagatggtgatcctgaatgcgtttaaaaaaattatacggagacgccgtaataatttccttattcacttgtataatttccccattgatagaaaatattacgctttccattcttaaagtactataagtaattatagtataatgtaaacgtttatatattcaatatttttataaaaatcattttgacattaattcctttttaaatttccgtctatcatctatagaaacgtattctatgaatttataaaatgcttttacgtgtcctatcgtaggcgatagaaccgctaaaaagcctatcgaatttctacaaaagaatctgttatatggtatagggagagtataaaacattaaatgtccgtacttattaaagtattcagtagccaatcctaactctttcgaatacttattaatggctcttgttctgtacgaatctatttttttgaacaacggacctagtggtatatcttgttctatgtatctaaaataatgtctgactagatccgttagtttaatatccgcagtcatcttgtctagaatggcaaatctaactgcgggtttaggctttagtttagtttctatatctacatctatgtctttatctaacaccaaaaatataatagctaatattttattacaatcatccggatattcttctacgatctcactaactaatgtttctttggttatactagtatagtcactatcggacaaataaagaaaatcagatgatcgatgaataatacatttaaattcatcatctgtaagatttttgagatgtctcattagaatattattagggttagtactcattatcattcggcagctattacttattttattatttttcaccatatagatcaatcattagatcatcaaaatatgtttcaatcatcctaaagagtatggtgaatgactcttcccatctaatttctgaacgttcaccaatgtctctagccactttggcactaatagcgatcattcgcttagcgtcttctatattattaactggttgatttaatctatctagcaatggaccgtcggacagcgtcattctcatgttcttaatcaatgtacatacatcgccgtcatctaccaattcatccaacaacataagctttttaaaatcatcattataataggtttgatcgttgtcatttctccaaagaatatatctaataagtagagtcctcatgcttagttaacaactattttttatgttaaatcaattagtacaccgctatgtttaatacttattcatattttagtttttaggattgagaatcaatacaaaaaattaatgcatcattaattttagaaatacttagtttccacgtagtcaatgaaacatttgaactcatcgtacaggacgttctcgtacaggacgtaactataaaccggtttatatttgttcaagatagatacaaatccgataactttttttacgaattctacgggatccactttaaaagtgtcataccgggttctttttatttttttaaacagatcaatggtgtgatgttgattaggtcttttacgaatttgatatagaatagcgtttacatatcctccataatggtcaatcgccatttgttcgtatgtcataaattctttaattatatgacactgtgtattatttagttcatccttgttcattgttaggaatctatccaaaatggcaattatactagaactataggtgcgttgtatacacatattgatgtgtctgtttatacaatcaatgctactaccttcgggtaaaattgtagcatcatataccatttctagtactttaggttcattattatccattgcagaggacgtcatgatcgaatcataaaaaaatatattatttttatgttattttgttaaaaataatcatcgaatacttcgtaagatactccttcatgaacataatcagttacaaaacgtttatatgaagtaaagtatctacgatttttacaaaagtccggatgcataagtacaaagtacgcgataaacggaataataatagatttatctagtctatctttttctatagctttcatagttagatacatggtctcagaagtaggattatgtaacatcagcttcgataaaatgactgggttatttagtcttacacattcgctcatacatgtatgaccgttaactacagagtctacactaaaatgattgaacaatagatagtctaccattgtttcgtattcagatagtacagcgtagtacatggcatcttcacaaattatatcattgtctaatagatatttgacgcatcttatggatcccacttcaacagccatcttaaaatcggtagaatcatattgctttcctttatcattaataatttctagaacatcatctctatcataaaagatacaaatattaactgtttgatccgtaataacattgctagtcgatagcaatttgttaataagatgcgctgggctcaatgtcttaataagaagtgtaagaggactatctccgaatttgttttgtttattaacatccgttgatggaagtaaaagatctataatgtctacattcttgactgttttagagcatacaatatggagaggtgtatttccatcatgatctggttttgagggactaattcctagtttcatcatccatgagattgtagaagcttttggattgtctgacataagatgtctatgaatatgatttttgccaaatttatccactatcctggcttcgaatccgatggacattatttttttaaacactctttctgaaggatctgtacacgccaacaacggaccacatccttcttcatcaaccgagttgttaatcttggctccatactgtaccaataaatttattctctctatgacttcatcatctgttcccgagagataatatagaggcgttttatgctgtttatcacacgcgtttggatctgcgccgtgcgtcagcagcatcgcgactattctattattattaattttagaagctatatgcaatggataatttccatcatcatccgtctcatttggagagtatcctctatgaagaagttcttcgacaaatcgttcatctagtcctttaattccacaatacgcatgtagaatgtgataattatttccagaaggttcgatagcttgtagcatattcctaaatacatctaaatttttactattatatttggcataaagagatagataatactcggccgacataatgttgtccattgtagtataaaaattaatatttctatttctgtatatttgcaacaatttactctctataacaaatatcataacttagttcttttatgtcaagaaggcactggtttagttcatctataaatgtcacgccataactaccacgcatgccatactcagaattatgataaagatatttatccttggggtgtaggtaatggggattaatctttgttggatcagtctctaagttaacacatgtcacacatgatccatttatagttatatcacacgatgatgatttatgaattgattccggaagatcgctatcgtattttgtggttccacaattcatttccatacatgttattgtcacactaatattatgatgaactttatctagccgctgagtggtaaacaacagaacagatagtttattatctttaccaacaccctcagccgctgccacaaatctctgatccgtatccatgatggtcatgtttatttctagtccgtatccagtcaacactatgttagcatttctgtcgatatagctttcactcatatgacactcaccaataatagtagaattaatgtcgtaatttacaccaatagtgagttcggcggcaaagtaccaataccggtaatcttgtcgaggaggacatatagtattcttgtattctaccgaatacccgagagatgcgatacaaaagagcaagactaatttgtaaaccatcttactcaaaatatgtaacaatagtacgatgcaatgagtaagacaataggaaatctatcttatatacacataattattctatcaattttaccaattagttagtgtaatgttaacaaaaatgtgggagaatctaattagtttttctttacacaattgacgtacatgagtctgagttccttgtttttgctaattatttcatccaatttattattcttgacgatatcgagatcttttgtataggagtcaaacttgtattcaacatgcttttctataatcattttagctatttcggcatcatccaatagtacattttccagattagcagaatagatattaatgtcgtatttgaacagagcctgtaacatctcaatgtctttattatctatagccaatttaatgtccggaatgaagagaagggaattattggtgtttgtcgacgtcatatagtcgagcaagagaatcatcatatccacgtgtccattttttatagtgatgtgaatacaactaaggagaatagccagatcaaaagtagatggtatctctgaaagaaagtaggaaacaatacttacatcattaagcatgacggcatgataaaatgaagttttccatccagttttcccatagaacatcagtctccaatttttcttaacaaacagttttaccgtttgcatgttaccactatcaaccgcataatacaatgcggtgtttcccttgtcatcaaattgtgaatcatccagtccactgaatagcaaaatctttactattttggtatcttccaatgtggctgcctgatgtaatggaaattcattctctagaagatttttcaatgctccagcgttcaacaacgtacatactagacgcacgttattatcagctattgcataatacaaggcactatgtccatggacatccgccttaaatgtatctttactagagagaaagcttttcagctgcttagacttccaagtattaattcgtgacagatccatgtctgaaacgagacgctaattagtgtatattttttcattttttataattttgtcatattgcaccagaattaataatatctttaatagatctgattagtagatacatggctatcgcaaaacaacatatacacatttaataaaaataatatttattaagaaaattcagatttcacgtacccatcaatataaataaaataatgattccttacaccgtacccatattaaggagattccaccttacccataaacaatataaatccagtaatatcatgtctgatgatgaacacaaatggtgtattaaattccagtttttcaggagatgatctcgccgtagctaccataatagtagatgcctctgctacagttccttgttcgtcgacatctatctttgcattctgaaacattttataaatatataatgggtccctagtcatatgtttaaacgacgcattatctggattaaacatactaggagccatcatttcggctatcgacttaatatccctcttattttcgatagaaaatttagggagtttaagattgtacactttattccctaattgagacgaccaatagtctaattttgcagccgtgatagaatctgtgaaatgggtcatattatcacctattgccaggtacatactaatattagcatccttatacggaaggcgtaccatgtcatattctttgtcatcgattgtgattgtatttccttgcaatttagtaactacgttcatcatgggaaccgttttcgtaccgtacttattagtaaaactagcattgcgtgttttagtgatatcaaacggatattgccatatacctttaaaatatatagtattaatgattgcccatagagtattattgtcgagcatattagaatctactacattagacataccggatctacgttctactatagaattaattttattaaccgcatctcgtctaaagtttaatctatataggccgaatctatgatattgttgataatacgacggtttaatgcacacagtattatctacgaaactttgataagttagatcagtgtacgtatatttagatgttttcagcttagctaatcctgatattaattctgtaaatgctggacccagatctctttttctcaaatccatagtcttcaataattctattctagtattacctgatgcaggcaatagcgacataaacatagaaaacgaataaccaaacggtgagaagacaatattatcatcttgaatatttttatacgctactataccggcattggtaaatccttgtagacgataggcggacgctgaacacgctaacgatagtatcaataacgcaatcatgattttatggtattaataattaaccttatttttatgttcggtataaaaaaattattgatgtctacacatccttttgtaattgacatctatatatccttttgtataatcaactctaatcactttaacttttacagttttccctaccagtttatccctatattcaacatatctatccatatgcatcttaacactctctgccaagatagcttcagagtgaggatagtcaaaaagataaatatatagagcataatcattctcgtatactctgccctttattacatcacccgcattgggcaacgaataacaaaatgcaagcatcttgttaacgggctcgtaaattgggataaaaattatgtttttattgtcttatatctattttattcaagagaatattcaggaatttctttttccggttgtatctcgtcgcagtatatatcatttgtacattgtttcatattttttaatagtttacaccttttagtaggactagtatcgtacaattcatagctgtattttgaattccaatcacgcataaaaatatcttccaattgttgacgaagacctaatccatcatccggtgtaatattaatagatgctccacatgtatccgtaaagtaatttcctgtccaatttgaggtacctatataggccgttttatcggttaccatatatttggcatggtttaccctagaatacggaatgggaggatcagcatctggtacaataaatagctttacttctatatttatgtttttagattttagcatagcgatagatcttaaaaagtttctcatgataaacgaagatcgttgccagcaactaatcaatagcttaacggatacttgtctgtctatagcggatcttcttaattcatcttctatataaggccaaaacaaaattttacccgccttcgaataaataatagggataaagttcataacagatacataaacgaatttactcgcatttctaatacatgacaataaagcggttaaatcattggttctttccatagtacatagttgttgcggtgcagaagcaataaatacagagtgtggaacgccgcttacgttaatactaagaggatgatctgtattataatacgacggataaaagtttttccaattatatggtagattgttaactccaagataccagtatacctcaaaaatttgagtgagatccgctgccaagttcctattattgaagatcgcaatacccaattccttgacctgagttagtgatctccaatccatgttagcgcttcctaaataaatatgtgtattatcagatatccaaaattttgtatgaagaactcctcctaggatatttgtaatatctatgtatcgtacttcaactccggccatttgtagtctttcaacatcctttaatggtttgttagatttattaacggctactctaactcgtactcctcttttgggtaattgtacaatctcgtttaatattatcgtgccgaaattcgtacccacttcatccgataaactccaataaaaagatgatatatctagtgtttttgtggtattggatagaatttccctccacatgttaaatgtagacaaatatactttatcaaattgcatacctataggaatagtttctgtaatcactgcgattgtattatccggattcattttatttgttaaaagaataatcctatatcacttcactctattaaaaatccaagtttctatttctttcatgactgattttttaacttcatccgtttccttatgaagatgatgtttggcaccttcataaatttttatttctctattacaatttgcatgttgcatgaaataatatgcacctaaaacatcgctaatcttattgtttgttccctggagtatgagagtcgggggggtgttaatcttggaaattatttttctaaccttgttggtagccttcaagacctgactagcaaatccagccttaattttttcatgattgactaatgggtcgtattggtatttataaactttatccatatctctagatactgattctggacatagctttccgactggcgcatttggtgtgatggttcccataagtttggcagctagcagattcagtcttgaaacagcatctgcattaactagaggagacattagaatcattgctgtaaacaagtttggattatcgtaagaggctagctcccatggaatgacccaataagtagatttaatagttaccacgtgctgtaccaaagtcatcaatcatcattttttcaccattacttcttccatgtccaatatgatcatgtgagaatactaaaattcctaacgatgatatgttttcagctagttcgtcataacgtccagaatgtttaccagctccatgacttatgaatactaatgccttaggatatgtaataggtttccaatatttacaatatatgtaatcattgtccagattgaacatacagtttgcactcatgattcacgttatataactatcaatattaacagttcgtttgatgatcatattatttttatgttttattgataattgtaaaaacatacaattaaatcaatatagaggaaggagacggctactgtcttttgtaagatagtcatggcgactaaattagattatgaggatgctgttttttactttgtggatgatgataaaatatgtagtcgcgactccatcatcgatctaatagatgaatatattacgtggagaaatcatgttatagtgtttaacaaagatattaccagttgtggaagactgtacaaggaattgatgaagttcgatgatgtcgctatacggtactatggtattgataaaattaatgagattgtcgaagctatgagcgaaggagaccactacatcaattttacaaaagtccatgatcaggaaagtttattcgctaccataggaatatgtgctaaaatcactgaacattggggatacaaaaagatttcagaatctagattccaatcattgggaaacattacagatttgatgaccgacgataatataaacatcttgatactttttctagaaaaaaaattgaattgatgatataggggtcttcataacgcataattattacgttagcattctatatccgtgttaaaaaaaattatcctatcatgtatttgagagttttatatgtagcaaacatgatagctgtgatgccaataagctttagatattcacgcgtgctagtgttagggatggtattatctggtggtgaaatgtccgttatataatctacaaaacaatcatcgcatatagtatgcgatagtagagtaaacatttttatagtttttactggattcatacatcgtctacccaattcggttataaatgaaattgtcgccaatcttacacccaaccccttgttatccattagcatagtattaacttcgttatttatgtcataaactgtaaatgattttgtagatgccatatcatacatgatattcatgtccctattataatcattactaactttatcacaatatatgttgataatatctatatatgatctagtctttgtgggcaactgtctatacaagtcgtctaaacgttgtttactcatatagtatcgaacagccatcattacatggtcccgttccgttgatagataatcgagtatgttagtggacttgtcaaatctatataccatattttctggaagtggatatacatagtcgtgatcaacattattgctagcctcatcttctatatcctgtactataccattatctatatcatctacataatctatgatattattacacataaacatcgacaacatactattgtttattatctaagtcctgttgatccaaacccttgatctcctctatttgtactatctagagattgtacttcttccagttctggataatatatacgttgatagattagctgagctattctatctccagtatttacattaaacgtacattttccattattaataagaatgactcctatgtttcccctataatcttcgtctattacaccacctcctatatcaatgccttttagtgacagaccagacctaggagctattctaccatagcagaacttaggcatggacatactaatatctgtcttaattaactgtctttctcctggagggatagtataatcgtaagcgctatacaaatcatatccggcagcacccggcgattgcctagtaggagatttagctctgttagtttccttaacaaatctaactggtgagttaatattcatgttgaacataaaactaatattttatttcaaaattatttaccatcccatatattccatgaataagtgtgatgattgtacacttctatagtatctatatacgatccacgataaaatcctcctatcaatagcagtttattatccactatgatcaattctggattatccctcggataaataggatcatctatcagagtccatgtattgctggattcacaataaaattccgcatttctaccaaccaagaataaccttctaccgaacactaacgcgcatgatttataatgaggataataagtggatggtccaaactgccactgatcatgattgggtagcaaatattctgtagttgtatcagtttcagaatgtcctcccattacgtatataacattgtttatggatgccactgctggattacatctaggtttcagaagactcggcatattaacccaagcagcatccccgtggaaccaacgctcaacagatgtgggatttggtagacctcctactacgtataatttattgttagcgggtatcccgctagcatacagtctggggctattcatcggaggaattggaatccaattgtttgatatataatttaccgctatagcattgttatgtatttcattgttcatccatccaccgatgagatatactacttctccaacatgagtacttgtacacatatggaatatatctataatttgatccatgttcataggatactctatgaatggatacttgtatgatttgcgtggttgtttatcacaatgaaatattttggtacagtctagtatccattttacattatttatacctctgggagaaagataatttgacctgattacatttttgataaggagtagcagatttcctaatttatttcttcgctttatataccacttaatgacaaaatcaactacataatcctcatctggaacatttagttcatcgctttctagaataagtttcatagatagataatcaaaattgtctatgatgtcatcttccagttccaaaaagtgtttggcaataaagtttttagtatgacataagagattggatagtccgtattctatacccatcatgtaacactcgacacaatattcctttctaaaatctcgtaagataaagtttatacaagtgtagatgataaattctacagaggttaatatagaagcacgtaataaattgacgacgttatgactatctatatatacctttccagtatacgagtaaataactatagaagttaaactgtgaatgtcaaggtctagacaaaccctcgtaactggatctttatttttcgtgtatttttgacgtaaatgtgtgcgaaagtaaggagataactttttcaatatcgtagaattgactattatattgcctcctatggcatcaataattgttttgaatttcttagtcatagacaatgctaatatattcttacagtacacagtattgacaaatatcggcatttatgtttctttaaaagtcaacatctagagaaaaatgattatctttttgagacataactcccattttttggtattcacccacacgtttttcgaaaaaattagtttttccttccaatgatatattttccatgaaatcaaacggattggtaacattataaatttttttaaatcccaattcagaaatcaatctatccgcgacgaattctatatatgttttcatcatttcacaattcattcctataagtttaactggaagagccgcagtaagaaattcttgttcaatggatactgcatctgttataatagatctaacggtttcttcactcggtggatgcaataaatgtttaaacatcaaacatgcgaaatcgcagtgcagaccctcgtctctactaattagttcgttggaaaacgtgagtccgggcattaggccacgctttttaagccaaaatatggaagcgaatgatccggaaaagaagattccttctactgcagcaaaggcaataagtctctctccataaccggcgctgtcatgtatccacttttgagcccaatcggccttcttttttacacaaggcatcgtttctatggcattaaagagatagtttttttcattactatctttaacataagtatcgatcaaaagactatacatttccgaatgaatgttttcaatggccatctgaaatccgtagaaacatctagcctcggtaatctgtacttctgtacaaaatcgttccgccaaattttcattcactattccgtcactggctgcaaaaaacgccaatacatgttttataaaatatttttcgtctggtgttagtttattccaatcattgatatctttagatatatctacttcttccactgtccaaaatgatgcctctgcctttttatacatgttccagatgtcatgatattggattgggaaaataacaaatctatttggatttggtgcaaggatgggttccataactaaattaacaataacaataaattttttttcagttatctatatgcctgtacttggattttttgtacatcgatatcgccgcaatcactacaataattacaagtattattgatagcattgttattagtactatcataattaaattatctacattcatgggtgctgaataatcgttattatcatcattatcattttgtaattgtgacatcatactagataaatcgtttgcgagattgttgtgggaagcgggcatggaggatgcattatcattattatttaacgccttccatttggattcacaaatgttacgcacattcaacattttatggaaactataattttgtgaaaacaaataacaagaaaactcgtcatcgttcaaatttttaacgatagtaaaccgattaaacgtcgagctaatttctaacgctagcgactctgttggatatgggtttccagatatatatcttttcagttcccctacgtatctataatcatctgtaggaaatggaagatatttccatttatctactgttcctaatatcatatgtggtggtgtagtagaaccattaagcgcgaaagatgttatttcgcatcgtattttaacttcgcaataatttctggttagataacgcactctaccagtcaagtcaatgatattagcctttacagatatattcatagtagtcgtaacgatgactccatcttttagatgcgatactcctttgtatgtaccagaatcttcgtacctcaaactcgatatatttaaacaagttaatgagatattaacgcgttttatgaatgatgatatataaccagaagttttatcctcggtggctagcgctataaccttatcattataataccaactagtgtgattaatatgtgacacgtcagtgtgggtacaaatatgtacattatcgtctacgtcgtattcgatacatccgcatacagccaacaaatataaaatgacaaatactctaacgccgttcgtacccatcttgatgcggtttaataaatgttttgatttcaatttattgtaaaaaaagattcggttttatactgttcgatattctcattgcttatattttcatctatcatctccacacagtcaaatccgtggttagcatgcacctcatcaaccggtaaaagactatcggactcttctatcattataactctagaatatttaatttggtcattattaatcaagtcaattatcttatttttaacaaacgtgagtattttactcattttttataaaaacttttagaaatatacagactctatcgtgtgtctatatcttctttttatatccaatgtatttatgtctgatttttcttcatttatcatatataatggtccaaattctacacgtgcttcggattcatccagatcattaaggttcttataattgtaacatccttctcttccctcttctacatcttccttcttattcttattcttagcgtcacagaatctaccacagcaggatcccatgacgagcgtcatattaaactaatccattttcaattataatatatgattagtaatgaccattaaaataaaaaatattcttcataaccggcaagaaagtgaaaagttcacattgaaactatgtcagtagtatacatcatgaaatgatgatatatatatactctattttggtggaggattatatgatataattcgtggataatcatttttaagacacatttctttattcgtaaatcttttcacgttaaatgagtgtccatattttgcaatttcttcatatgatggcggtgtacgtggacgaggctgctcctgttcttgttgtggtcgccgactgtcgtgtctgcgtttagatccctccattatcgcgattgcgtagatggagtactattttataccttgtaattaaatttttttattaattaaacgtataaaaacgttccgtatctgtatttaagagccagatttcgtctaatagaacaaatagctacagtaaaaataactagaataattgctacacccactagaaaccacggatcgtaatacggcaatcggttttcgataataggtggaacgtatattttatttaaggacttaacaattgtctgtaaaccacaatttgcttccgcggatcctgtattaactatctgtaaaagcatatgttgaccgggcggagccgaacattctccgatatctaatttctgtatatctataatattattaacctccgcatacgcattacagttcttttctagcttggataccgcactaggtacatcgtctagatctattcctatttcctcagcgatagctcttctatccttttccggaagcaatgaaatcacttcaataaatgattcaaccatgagtgtgaaactaagtcgagaattactcatgcatttgttagttattcggagcgcgcaatttttaaactgtcctataacctctcctatatgaatagcacaagtgacattagtagggatagaatgttgagctaatttttgtaaataactatctataaaaagattatacaaagttttaaactctttagtttccgccatttatccagtctgagaaaatgtctctcataataaatttttccaagaaactaattgggtgaagaatggaaacctttaatctatatttatcacagtctgttttggtacacatgatgaattcttccaatgccgtactaaattcgatatctttttcgatttctggatatgtttttaataaagtatgaacaaagaaatggaaatcgtaataccagttatgtttaactttgaaattgttttttattttcttgttaatgattccagccacttgggaaaagtcaaagtcgtttaatgccgatttaatacgttcattaaaaacaaactttttatcctttagatgaattattattggttcattggaatcaaaaagtaagatattatcgggtttaagatctgcgtgtaaaaagttgtcgcaacagggtagttcgtagattttaatgtataacagagccatctgtaaaaagataaactttatgtattgtaccaaagatttaaatcctaatttgatagctaactcggtatctactttatctgccgaatacagtgctaggggaaaaattataatgtttcctctttcatattcgtagttagttctcttttcatgttcgaaaaagtgaaacatgcggttaaaatagtttataacattaatattactgttaataactgccggataaaagtgggatagtaatttcacgaatttgatactgtcctttctctcgttaaacgcctttaaaaaaactttagaagaatatctcaatgagagttcctgaccatccatagtttgtatcaataatagcaacatatgaagaacacgtttatacagagtatgtaaaaatgttaatttatagtttaatcccatggcccacgcacacacgattaattttttttcatctccctttagattgttgtatagaaatttgggtactgtgaactccgccgtagtttccatgggactatataattttgtggcctcgaatacaaattttactacatagttatctatcttaaagactataccatatcctcctgtagatatgtgataaaaatcgtcgtttataggataaaatcgtttatccttttgttggaaaaaggatgaattaatgtaatcattctcttctatctttagtagtgtttccttattaaaattcttaaaataatttaacaatctaactgacggagcccaattttggtgtaaatctaattgggacattatattgttaaaatacaaacagtctcctaatataacagtatctgataatctatggggagacatccattgatattcaggggatgaatcattggcaacacccatttattgtacaaaaagccccaatttacaaacgaaagtccaggtttgatagagacaaacaattaactattttgtctctgtttttaacacctccacagtttttaatttctttagtaatgaaattattcacaatatcagtatcttctttatctaccagagattttactaacttgataaccttggctgtctcattcaatagggtagtaatatttgtatgtgtgatattgatatctttttgaattgtttcttttagaagtgattctttgatggtgccagcatacgaattacaataatgcagaaactcggttaacatgcaggaattatagtaagccaattccaattgttgcctgtgttgtattagagtgtcaatatgagcaatggtgtccttgcgtttctctgatagaatgcgagcagcgattttggcgttatcatttgacgatatttctggaatgacgaatcctgtttctactaactttttggtaggacaaagtgaaacaatcaagaagatagcttctcctcctatttgtggaagaaattgaactcctctagatgatctactgacgatagtatctccttgacagatattggaccgaattacagaagtacctggaatgtaaagccctgaaaccccctcattttttaagcagattgttgccgtaaatcctgcactatgcccaagatagagagctcctttggtgaatccatctctatgtttcagtttaaccaagaaacagtcagctggtctaaaatttccatctctatctaatacagcatctaacttgatgtcaggaactatgaccggtttaatgttatatgtaacattgagtaaatccttaagttcataatcatcactgtcatcagttatgtacgatccaaacaatgtttctaccggcatagtggatacgaagatgctatccatcagaatgtttccctgattagtattttctatatagctattcttctttaaacgattttccaaatcagtaactatgttcatttttttaggagtaggacgcctagccagtatggaagaggattttctagatcctctcttcaacatctttgatctcgatggaatgcaaaaccccatagtgaaacaaccaacgataaaaataatattgtttttcactttttataattttaccatctgactcatggattcattaatatctttataagagctactaacgtataattctttataactgaactgagatatatacaccggatctatggtttccataattgagtaaatgaatgctcggcaataactaatggcaaatgtatagaacaacgaaattatactagagttgttaaagttaatattttctatgagctgttccaataaattatttgttgtgactgcgttcaagtcataaatcatcttgatactatccagtaaaccgtttttaagttctggaatattatcatcccattgtaaagcccctaattcgactatcgaatatcctgctctgatagcagtttcaatatcgacggacgtcaatactgtaataaaggtggtagtattgtcatcatcgtgataaactacgggaatatggtcgttagtaggtacggtaactttacacaacgcgatatataactttccttttgtaccatttttaacgtagttgggacgtcctgcagggtattgttttgaagaaatgatatcgagaacagatttgatacgatatttgttggattcctgattattcactataatataatctagacagatagatgattcgataaatagagaaggtatatcgttggtaggataatacatccccattccagtattctcggatactctattgatgacactagttaagaacatgtcttctattctagaaaacgaaaacatcctacatggactcattaaaacttctaacgctcctgattgtgtctcgaatgcctcgtacaaggatttcaaggatgccatagattctttgaccaacgatttagaattgcgtttagcatctgatttttttattaaatcgaatggtcggctctctggtttgctaccccaatgataacaatagtcttgtaaagataaaccgcaagaaaatttatacgcatccatccaaataaccctagcaccatcggatgatattaatgtattattatagattttccatccacagttattgggccagtatactgttagcaacggtatatcgaatagattactcatgtaacctactagaatgatagttcgtgtactagtcataatatctttaatccaatctaagaaatttaaaattagattttttacactgttaaagttaacaaaggtattacccggatacgtggatatcatatatggcattggtccattatcagtaatagctccataaactgatacggcgatggtttttatatgtgtttgatctaacgaggaagaaattcgcgcccacaattcatctctagatatgtatttaatatcaaacggtaacacatcaatttcgggacgcgtatatgtttctaaatttttaatccaaatataatgatgacctatatgccctattatcatactgtcaactatagtacacctagagaacttacgatacatctgtttcctgtaatcgttaaattttacaaatctataacatgctaaaccttttgacgacagccattcattaatttctgatatggaatctgtattctcgataccgtatcgttctaaagccagtgctatatctccctgttcgtgggaacgctttcgtataatatcgatcaacggataatctgaagtttttggagaataatatgactcatgatctatttcgtccataaacaatctagacataggaattggaggcgatgatcttaattttgtgcaatgagtcgtcaatcctataacttctaatcttgtaatattcatcatcgacataatactatctatgttatcatcgtatattagtataccatgaccttcttcatttcgtgccaaaatgatatacagtcttaaatagttacgcaatatctcaatagtttcataattgttagctgttttcatcaaggtttgtatcctgtttaacatgatggcgttctataacgtctctattttctatttttaattttttaaatttttaacgatttactgtggctagatacccaatctctctcaaatatttttttagcctcgcttacaagctgtttatctatactattaaaactgacgaatccgtgattttggtaatgggttccgtcgaaatttgccgaagtgatatgaacatattcgtcgtcgactatcaacaattttgtattattctgaatagtgaaaaccttcacagatagatcattttgaacacacaacgcatctagacttttggcggttgccatagaatatacgtcgttcttatcccaattaccaactagaagtctgatcttaactcctctattaatggctgcttctataatggagttgtaaatgtcgggccaatagtagctattaccgtcgacacgtgtagtgggaactatggccaaatgttcaatatctatactagtcttagctgacctgagtttatcaataactacatcggtatctagatctctagaatatcccaataggtgttccggagaatcagtaaagaacactccacctataggattcttaatatgatacgcagtgctaactggcaaacaacaagccgcagagcataaattcaaccatgaattttttgcgctattaaaggctttaaaagtatcaaatcttctacgaagatctgtggccagcgggggataatcagaatatacacctaacgttttaatcgtatgtatagatcctccagtaaatgacgcgtttcctacataacatctttcatcatctgacacccaaaaacaaccgagtagtagtcccacattattttttttatctatattaacggttataaaatttatatccgggcagtgactttgtagctctcccagatttcttttccctcgttcatctagcaaaactattattttaatccctttttcagatgcctcttttagtttatcaaaaataagcgctcccctagtcgtactcagaggattacaacaaaaagatgctatgtatatatatttcttagctagagtgataatttcgttaaaacattcaaatgttgttaaatgatcggatctaaaatccatattttctggtagtgtttctaccagcctacattttgctcccgcaggtaccgatgcaaatggccacatttagttaacataaaaacttatacatcctgttctatcaacgattctagaatatcatcggctatatcgctaaaattttcatcaaagtcgacatcacaacctaactcagtcaatatattaagaagttccatgatgtcatcttcgtctatttctatatccgtatccattgtagattgttgaccgattatcgagtttaaatcattactaatactcaatccttcagaatacaatctgtgtttcattgtaaatttataggcggtgtatttaagttggtagattttcaattatgtattaatatagcaacagtagttcttgctcctccttgattctagcatcctcttcattattttcttctacgtacataaacatgtccaatacgttagacaacacaccgacgatggcggccgctacagacacgaatatgactaaaccgatgaccatttaaaaacccctctctagctttcacttaaactgtatcgatcattcttttagcacatgtataatataaaaacattattctatttcgaatttaggcttccaaaaatttttcatccgtaaaccgataataatatatatagacttgttaatagtcggaataaatagattaatgcttaaactatcatcatctccacgattagagatacaatatttacattctttttgctgtttcgaaactttatcaatacacgttaatacaaacccaggaaggagatattgaaactgaggctgttgaaaatgaaacggtgaatacaataattcagataatgtaaaatcatgattccgtattctgatgatattagaactgctaatggatgtcgatggtatgtatctaggagtatctattttaacaaagcatcgatttgctaatatacaattatccttttgattaattgttattttattcatattcttaaaaggtttcatatttatcaattcttctacattaaaaatttccatttttaatttatgtagccccgcaatactcctcattacgtttcattttttgtctataatatccattttgttcatctcggtacatagattatccaattgagaagcgcatttagtagttttgtacattttaagtttattgacgaatcgtcgaaaactagttatagttaacattttattatttgataccctgatattaatacccctgccgttactattatttataactgatgtaatccacgtaacattggaattaactatcgatagtaatgcatcgacgcttccaaaattgtctattataaactcaccgataatttttttattgcatgttttcatattcattaggattatcaaatctttaatcttattacgattgtatgcgttgatattacaagacgtcattctaaaagacggaggatctccatcaaatgccagacaatcacgtacaaagtacatggaaataggttttgttctattgcgcatcatagatttatatagaacacccgtagaaatactaatttgttttactctataaaatactaatgcatctatttcatcgttttgtataacgtctttccaagtgtcaaattccaaatttttttcattgatagtaccaaattcttctatctctttaactacttgcatagataggtaattacagtgatgcctacatgccgttttttgaaactgaatagatgcgtctagaagcgatgctacgctagtcacaatcaccactttcatatttagaatatatatatgtaaaaatatagtagaatttcattttgtttttttctatgctataaatgaattctcattttgcatctgctcatactccgttttatattaataccaaagaaggaagatatctggttctaaaagccgttaaagtatgcgatgttagaactgtagaatgcgaaggaagtaaagcttcctgcgtactcaaagtagataaaccctcatcgcccgcgtgtgagagaagaccttcgtccccgtccagatgcgagagaatgaataaccctggaaaacaagttccgtttatgaggacggacatgctacaaaatatgttcgcggctaatcgcgataatgtagcttctagacttttgtcctaaaatactattatatccttttcgatattaataaatccgtgtcgtccaggttttttatctctttcagtatgtgaatagataggtattttatctctattcatcatcgaatttaagagatccgataaacattgtttgtattctccagatgtcagcatctgatacaacaatatatgtgcacataaacctctggcacttatttcatgtaccttccccttatcactaaggagaatagtatttgagaaatatgtatacatgatattatcatgaattagatatacagaatttgtaacactctcgaaatcacacgatgtgtcggcgttaagatctaatatatcactcgataacacattttcatctagatacactagacattttttaaagctaaaatagtctttagtagtaacagtaactatgcgattattttcatcgatgatacatttcatcggcatattattacgcttaccatcaaagactataccatgtgtatatctaacgtattctagcatggttgccatacgcgcattaaacttttcaggatctttggatagatcttccaatctatctatttgagaaaacatttttatcatgttcaatagttgaaacgtcggatccactatatagatattatctataaagattttaggaactacgttcatggtatcctggcgaatattaaaactatcaatgatatgattatcgttttcatcttttatcaccatatagtttctaagatatgggattttacttaatataatattatttcccgtgataaattttattagaaaggccaaatctataagaaaagtcctagaattagtctgaagaatatctatatcgccgtatagtatatttggattaattagatatagagaatatgatccgtaacatatacaacttttattatggcgtctaagatattcttccatcaacttattaacatttttgactagggaagatacattatgacgtcccattacttttgccttgtctattactgcgacgttcatagaatttagcatatctcttgccaattcttccattgatgttacattataagaaattttagatgaaattacatttggagctttaatagtaagaactcctaatatgtccgtgtatgtggtcactaatacagattgtagttctataatcgtaaataatttacctatattatatgtttgagtctgtttagaaaagtagctaagtatacgatcttttatttctgatgcagatgtattaacatcggaaaaaaatctttttttattcttttttactaaagatacaaatatgtctttgttaaaaacagttattttctgaatatttctagcttgtaattttaacatatgatattcgttcacactaggtactctgcctaaataggtttctataatctttaatgtaatattaggaaaagtattctgatcaggattcctattcattttgaggatttaaaactctgattattgtctaatatggtctctacgcaaactttttcacagagcgatagagtttttgataactcgtttttcttaagaaatataaaactactgtctccagagctcgctctatcttttattttatctaattcgatacaaactcctgatactggttcagaaagtaattcattaattttcagtcctttatagaagatatttaatatagataatacaaaatcttcagtttttgatatcgatctgattgatcctagaactagatatattaataacgtgctcattaggcagtttatggcagcttgataattagatatagtatattccagttcatatttattagataccgcattgcccagattttgatattctatgaattcctctgaaaataaatccaaaataactagacattctattttttgtggattagtgtactctcttccctctatcatgttcactactggtgtccacgatgataaatatctagagggaatataatatagtccataggatgccaatctagcaatgtcgaataactgtaattttattcttcgctcttcattatgaattgattcttgaggtataaacctaacacaaattatattattagacttttcgtatgtaatgtctttcatgttataagtttttaatcctggaatagaatctattttaatgaggcttttaaacgcagagttctccaacgagtcaaagcataatactctgttgtttttcttatatacgatgttacgattttcttctttgaatggaataggtttttgaattagtttataattacaacataatagataaggaagtgtgcaaatagtacgcggaaaaaacataatagctcccctgttttcatccatggttttaagtaaatgatcactggcttctttagtcaatggatattcgaacattaaccgtttcatcatcattggacagaatccatatttcttaatgtaaagagtgatcaaatcattgtgtttattgtaccatcttgttgtaaatgtgtattcggttatcggatctgctcctttttctattaaagtatcgatgtcgatctcgtctaagaattcaactatatcgacatatttcatttgtatacacataaccattactaacgtagaatgtataggaagagatgtaacgggaacagggtttgttgattcgcaaactattctaatacataattcttctgttaatacgtcttgcacgtaatctattatagatgccaagatatctatataattattttgtaagatgatgttaactatgtgatctatataagtagtgtaataattcatgtatttcgatatatgttccaactctgtctttgtgatgtctagtttcgtaatatctatagcatcctcaaaaaatatattcgcatatattcccaagtcttcagttctatcttctaaaaaatcttcaacgtatggaatataataatctattttacctcttctgatatcattaatgatatagtttttgacactatcttctgtcaattgattcttattcactatatctaagaaacggatagcgtccctaggacgaactactgccattaatatctctattatagcttctggacataattcatctattataccagaattaatgggaactattccgtatctatctaacatagttttaagaaagtcagaatctaagacttgatgttcatatattggttcatacatgaaatgatctctattgatgatagtgactatttcattctctgaaaattggtaactcattctatatatgctttccttgttgatgaaggatagaatatactcaatagaatttgtaccaacaaactgttctcttatgaatcgtatatcatcatctgaaataatcatgtaaggcatacatttaacaattagagacttgtctcctgttatcaatatactattcttgtgataatttatgtgtgaggcaaatttgtccacgttctttaattttgttatagtagatatcaaatccaatggagctacagttcttggcttaaacagatatagtttttctggaacaaattctacaacattattataaaggactttgggtaaataagtgggatgaaatcctattttaattaatgcgatagccttgtcctcgtgcagatatccaaacgcttttgtgatagtatggcattcattgtctagaaacgctctacgaatatctgtgacagatatcatctttagagaatatactagtcgcgttaatagtactacaatttgtattttttaatctatctcaataaaaaaattaatatgtatgattcaatgtataactaaactactaactgttattgataactagaatcagaatctaatgatgacgtacccaagaagtttatctactgccaatttagctgcattatttttagcatctcgtttagattttccatctgccttatcgaatactcttccgtcgatatctacacaggcataaaatgtaggagagttactaggcccaactgattcaatacgaaaagaccaatctctcttagttatttggcagtactcattaataacggtgacagggttagcatctttccaatcaataatttttttagccggaataacatcatcaaaagacttatgatcctctctcattgatttttcgcgggatacatcatctattatgacgtcagccataacatcagcatccggcttatccgcctccgttgtcataaaccaacgaggaggaatatcgtcggagctgtacaccatagcactacgttgaagatcgtacagagctttattaacttctcgcttctccatattaagttgtctagttagttgtgcagcagtagctccttcgattccaatggttttaatagcctcacacacaatctctgcgttagaacgttcgtcgatatagattttagacatttttagagagaactaacacaaccagcaataaaactgaacctactttatcatttttttattcatcatcctctggtggttcgtcgttcctatcaaatgtagctctgattaacccgtcatctataggtgatgctggttctggagattctggaggagatggattattatctggaagaatctctgttatttccttgttttcatgtatcgattgcgttgtaacattaagattgcgaaatgctctaaatttgggaggcttaaagtgttgtttgcaatctctacacgcgtgtctaactagtggaggttcgtcagctgctctagtttgaatcatcatcggcgtagtattcctacttttacagttaggacacggtgtattgtatttctcgtcgagaacgttaaaataatcgttgtaactcacatcctttattttatctatattgtattctactcctttcttaatgcattttataccgaataagagatagcgaaggaattctttttcggtgccgctagtacccttaatcatatcacatagtgttttatattccaaatttgtggcaatagacggtttatttctatacgatagtttgtttctggaatcctttgagtattctataccaatattattctttgattcgaatttagtttcttcgatattagattttgtattacctatattcttgatgtagtactttgatgatttttccatggcccattctattaagtcttccaagttggcatcatccacatattgtgatagtaattctcggatatcagtagcggctaccgccattgatgtttgttcattggatgagtaactactaatgtatacattttccatttataacacttatgtattaactttgttcatttatattttttcattattatgttgatattaacaaaagtgaatatatatatatgttaataattgtattgtggttatacggctacaattttataatgagtgaaagtcagtgtccgatgatcaatgacgatagctttactctgaaaagaaagtatcaaatcgatagtgcggagtcaacaataaaaatggataagaagaggataaagtttcagaatagagccaaaatggtaaaagaaataaatcagacaataagagcagcacaaactcattacgagacattgaaactaggatacataaaatttaagagaatgattaggactactactctagaagatatagcaccatctattccaaataatcagaaaacttataaactattctcggacatttcagccatcggcaaagcatcacagaatccgagtaagatggtatatgctctgctgctttacatgtttcccaatttgtttggagatgatcatagattcattcgttatagaatgcatccaatgagtaaaatcaaacacaagatcttctctcctttcaaacttaatcttattagaatattagtggaagaaagattctataataatgaatgcagatctaataaatggaaaataattggaacacaagttgataaaatgttgatagctgaatctgataaatatacaatagatgcaaggtataacctaaaacccatgtatagaatcaagggagaatctgaagaagataccctcttcatcaaacagatggtagaacaatgtgtgacatcccaggaattggtggaaaaagtgttgaagatactgtttagagatttgttcaagagtggagaatacaaagcgtacagatacgatgatgatgtagaaaatggattcattggattggatacactaaaattaaacattgttcatgatatagttgaaccatgtatgcctgttcgtaggccagtggctaagatactgtgtaaagaaatggtaaataaatactttgagaatccgctacatattattggtaaaaatcttcaagagtgcattgactttgttagtgaataggcatttcatctttctccaatactaattcaaattgttaaattaataatggatagtataaatagttattagttataagatagtaaaaataattattagaataagagtgtagtatcatagataactctcttctataaaaatggattttattcgtagaaagtatcttatatacacagtagaaaataatatagattttttaaaggatgatacattaagtaaagtaaacaattttaccctcaatcatgtactagctctcaagtatctagttagcaattttcctcaacacgttattactaaggatgtattagctaataccaatttttttgttttcatacatatggtacgatgttgtaaagtgtacgaagcggttttacgacacgcatttgatgcacccacgttgtacgttaaagcattgactaagaattatttatcgtttagtaacacaatacaatcgtacaaggaaaccgtgcataaactaacacaagatgaaaaatttttagaggttgccgaatacatggacgaattaggagaacttataggcgtaaattatgacttagttcttaatccattatttcacggaggggaacccatcaaagatatggaaatcatttttttaaaactgtttaagaaaacagacttcaaagttgttaaaaaattaagtgttataagattacttatttgggcatacctaagcaagaaagatacaggcatagagtttgcggataatgatagacaagatatatatactctatttcaacaaactggtagaatcgtccatagcaatctaacagaaacgtttagagattatatctttcccggagataagactagctattgggtgtggttaaacgaaagtatagctaatgatgcggatatcgttcttaatagacacgccattaccatgtatgataaaattcttagttatatatactctgagataaaacaaggacgcgttaataaaaacatgcttaagttagtttatatctttgagcctgaaaaagatatcagagaacttctgctagaaatcatatatgatattcctggagatatcctatctattattgatgcaaaaaacgacgattggaaaaaatattttattagtttttataaagctaattttattaacggtaatacatttattagtgatagaacgtttaacgaggacttattcagagttgttgttcaaatagatcccgaatatttcgataatgaacgaattatgtctttattctctacgagtgctgcggacattaaacgatttgatgagttagatattaataacagttatatatctaatataatttatgaggtgaacgatatcacattagatacaatggatgatatgaagaagtgtcaaatctttaacgaggatacgtcgtattatgttaaggaatacaatacatacctgtttttgcacgagtcggatcccatggtcatagagaacggaatactaaagaaactgtcatctataaaatccaagagtagacggctgaacttgtttagcaaaaacattttaaaatattatttagacggacaattggctcgtctaggtcttgtgttagatgattataaaggagacttgttagttaaaatgataaaccatcttaagtctgtggaggatgtatccgcattcgttcgattttctacagataaaaaccctagtattcttccatcgctaatcaaaactattttagctagttataatatttccatcatcgtcttatttcaaaggtttttgagagataatctatatcatgtagaagaattcttggataaaagcatccatctaaccaagacggataagaaatatatacttcaattgataagacacggtagatcatagaacagaccaaatatattattaataatttggtatatacatagatataattatcacacatttttgataaatgggaactgctgcaacaattcagactcccaccaaattaatgaataaagaaaatgcagaaatgattttggaaaaaattgttgatcatatagttatgtatattagtgacgaatcaagtgattcagaaaataatcctgaatatattgattttcgtaacagatacgaagactatagatctctcattataaaaagtgatcacgagtttgtaaagctatgtaaaaatcatgcggagaaaagttctccagaaacgcaacaaatgattatcaaacacatatacgaacaatatcttattccagtatctgaagtactattaaaacctataatgtccatgggtgacataattacatataacggatgtaaagacaatgaatggatgctagaacaactctctaccctaaactttaacaatctccgcacatggaactcatgtagcataggcaatgtaacgcgtctgttttatacattttttagttatctgatgaaagataaactaaatatataagtataatcccattctaatactttaacctgatgtattagcatcttattagaatattaacctaactaaaagacataacataaaaactcattacatagttgataaaaagcggtaggatataaatattatggctgccaccgttccgcgttttgacgacgtgtacaaaaatgcacaaagaagaattctagatcaagaaacattttttagtagaggtctaagtagaccgttaatgaaaaacacatatctatttgataattacgcgtatggatggataccagaaactgcaatttggagtagtagatacgcaaacttagatgcaagtgactattatcccatttcgttgggattacttaaaaagttcgagtttctcatgtctctatataaaggtcctattccagtatacgaagaaaaagtaaatactgaattcattgctaatggatctttctccggtagatacgtatcatatcttagaaagttttctgctcttccaacaaacgagtttattagttttttgttactgacttccattccaatctataatatcttgttctggtttaaaaatactcagtttgatattactaaacacacattattcagatacgtctatacagataatgccaaacacctggcgttggctaggtatatgtatcaaacaggagactataagcctttgtttagtcgtctcaaagagaattatatatttaccggtcccgttccaatatgtatcaaagatatagatcaccctaatcttagtagagcaagaagtccatccgattatgagacattagctaatattagtactatattgtactttaccaagtatgatccggtattaatgtttttattgttttacgtacctgggtattcaattactacaaaaattactccagccgtagaatatctaatggataaactgaatctaacaaagagcgacgtacaactgttgtaaattattttatgcttcgtaaaatgtaggttttgaaccaaacattctttcaaagaatgagatgcataaaactttattatccaatagattgactatttcggacgtcaatcgtttaaagtaaacttcgtaaaatattctttgatcactgccgagtttaaaacttctatcgataattgtttcatatgttttaatatttacaagttttttggtccatggtccattaggacaaatatatgcaaaataatatcgttctccaagttctatagtctctggattatttttattatattcagtaaccaaatacatattagggttatctgcggatttataatttgagtgatgcattcgactcaacataaataattctagaggagacgatctactatcaaattcggatcgtaaatctgtttctaaagaacggagaatatctatacatacctgattagaattcatccgtccttcagacaacatctcagacagtctggttttgtacatcttaatcatattcttatgaaacttggaaacatctcttctagtttcactagtacctttattaattctctcaggtacagattttgaattcgacgatgctgagtatttcatcgttgtatatttcttcttcgattgcataatcagattcttatataccgcctcaaactctattttaaaattattaaacaatactctattattaatcagtcgttctaactctttcgctatttctatagacttatctacatcttgactgtctatctctgtaaacacggagtcggtatctccatacacgctacgaaaacgaaatctgtaatctataggcaacgatgttttcacaatcggattaatatctctatcgtccatataaaatggattacttaatggattggcaaaccgtaacataccgttagataactctgctccatttagtaccgattctagatacaagatcattctacgtcctatggatgtgcaactcttagccgaagcgtatgagtatagagcactatttctaaatcccatcagaccatatactgagttggctactatcttgtacgtatattgcatggaatcatagatggccttttcagttgaactggtagcctgttttagcatctttttatatctggctctctctgccaaaaatgttcttaatagtctaggaatggttccttctatcgatctatcgaaaattgctatttcagagatgaggttcggtagtctaggttcacaatgaaccgtaatatatctaggaggtggatatttctgaagcaatagctgattatttatttcttcttccaatctattggtactaacaacgacaccgactaatgtttccggagatagatttccaaagatacacacattaggatacagactgttataatcaaagattaatacattattactaaacattttttgttttggagcaaataccttaccgccttcataaggaaacttttgttttgtttctgatctaactaagatagttttagtttccaacaatagctttaacagtggacccttgatgactgtactcgctctatattcgaataccatggattgaggaagcacatatgttgacgcacccgcgtctgtttttgtttctactccataatactcccacaaatactgacacaaacaagcatcatgaatacagtatctagccatatctaaagctatgtttagattataatccttatacatctgagctaaatcaacgtcatcctttccgaaagataatttatatgtatcattaggtaaagtaggacataatagtacgactttaaatccattttcccaaatatctttacgaattactttacatataatatcctcatcaacagtcacataattacctgtggttaaaacctttgcaaatgcagcggctttgcctttcgcgtctgtagtatcgtcaccgatgaacgtcatttctctaactcctctatttaatactttacccatgcaactgaacgcgttcttggatatagaatccaatttgtacgaatccaatttttcaaatttttgaatgaatgaatatagatcgaaaaatatagttccattattgttattaacgtgaaacgtagtattggccatgccgcctactcccttatgactagactgatttctctcataaatacagagatgtacagcttcctttttgtccggagatctaaagataattttctctcctgttaataactctagacgattagtaatatatctcagatcaaagttatgtccgttaaaggtaacgacgtagtcgaacgttagttccaacaattgtttagctattcgtaacaaaactatttcagaacatagaactagttctcgttcgtaatccatttccattagtgactgtatcctcaaacatcctctatcgacggcttcttgtatttcctgttccgttaacatctcttcattaatgagcgtaaacaataatcgtttaccacttaaatcgatataacagtaacttgtatgcgagattgggttaataaatacagaaggaaacttcttatcgaagtgacactctatatctagaaataagtacgatcttgggatatcgaatctaggtatttttttagcgaaacagttacgtggatcgtcacaatgataacatccattgttaatctttgtcaaatattgctcgtccaacgagtaacatccgtctggagatatcccgttagaaatataaaaccaactaatattgagaaattcatccatggtggcattttgtatgctgcgtttctttggctcttctatcaaccacatatctgcgacggagcattttctatctttaatatctagattataacttattgtctcgtcaatgtctatagttctcatctttcccaacggcctcgcattaaatggaggaggagacaatgactgatatatttcgtccgtcactacgtaataaaagtaatgaggaaatcgtataaatacggtctcaccatttcgacatctggatttcagatataaaaatctgttttcaccgtgactttcaaaccaattaatgcaccgaacatccatttatagaatttagaaatatattttcatttaaatgaatcccaaacattggggaagagccgtatggaccattatttttatagtactttcgcaagcgggtttagacggcaacatagaagcgtgtaaacgaaaactatatactatagttagcactcttccatgtcctgcatgtagacggcacgcgactatcgctatagaggacaataatgtcatgtctagcgatgatctgaattatatttattattttttcatcagattatttaacaatttggcatctgatcccaaatacgcgatcgatgtgacaaaggttaaccctttataaacttaacccattataaaacttatgattagtcacaactgaaataaccgcgtgattattttttggtataattctacacggcatggtttctgtgactatgaattcaacccccgttacattagtgaaatctttaacaaacagcaagggttcgtcaaagacataaaactcattgtttacaatcgaaatagaccccctatcacacttaaaataaaaaatatccttatcctttaccaccaaataaaattctgattggtcaatgtgaatgtattcacttaacagttccacaaatttatttattaactccgaggcacatacatcgtcggtattttttatggcaaactttactcttccagcatccgtttctaaaaaaatattaacgagttccatttatatcatccaatattattgaaatgacgttgatggacagatgatacaaataagaaggtacggtacctttgtccaccatctcctccaattcatgctctattttgtcattaactttaatgtatgaaaacagtacgccacatgcttccatgacagtgtgtaacactttggatacaaaatgtttgacattagtataattgttcaagactgtcaatctataatagatagtagctataatatattctatgatggtattgaagaagatgacaaccttggcatattgatcatttaacacagacatggtatcaacagatagcttgaatgaaagagaatcagtaattggaataagcgtcttctcgatagagtgtccgtataccaacatgtctgatattttgatgtattccattaaattatttagttttttctttttattctcgttaaacagcatttctgtcaacggaccccaacatcgttgaccgattaagttttgattgatttttccgtgtaaggcgtatctagtcagatcgtatagcctatccaataatccatcatctgtgcgtagatcacatcgtacactttttaattctctatagaagagcgacagacatctggagcaattacagacagcaatttctttattctctacagatgtaagatacttgaagacattcctatgatgatgcagaattttggataacacggtattgatggtatctgttaccataattcctttgatggctgatagtgtcagagcacaagatttccaatctttgacaatttttagcaccattatctttgttttgatatctatatcagacagcatggtgcgtctgacaacacagggattaagacggaaagatgaaatgattctctcaacatcttcaatagataccttgctattttttctggcattatctatatgtgcgagaatatcctctagagaatcagtatcctttttgatgatagtggatctcaatgacatgggacgtttaaaccttcttattctatcaccagattgcatggtgatttgtcttctttcttttatcataatgtaatctctaaattcatcggcaaattgtctatatctaaaatcataatatgagatgtttacctctacaaatatctgttcgtccaatgttagagtatttacatcagttttgtattccaaattaaacatggcaacggatttaattttatattcctctattaagtcctcgtcgataataacagaatgtagataatcatttaatccatcgtacatggttggaagatgcttgttgacaaaatctttaattgtcttgatgaaggtgggactatatctaacatcttgattaataaaatttataacattgtccataggatactttgtaactagttttatacacatctcttcatcggtaagtttagacagaatatcgtgaacaggtggtatattatattcatcagatatacgaagaacaatgtccaaatctatattgtttaatatattatatagatgtagcgtagctcctacaggaatatctttaactaagtcaatgatttcatcaaccgttagatctattttaaagttaatcatataggcattgatttttaaaaggtatgtagccttgactacattctcattaattaaccattccaagtcactgtgtgtaagaagattatattctatcataagcttgactacatttggtcccgataccattaaagaattcttatgatataaggaaacagcttttaggtactcatctactctacaagaattttggagagccttaacgatatcagtgacgtttattatttcaggaggaaaaaacctaacattgagaatatcggaattaatagcttccagatacagtgattttggcaatagtccgtgtaatccataatccagtaacacgagctggtgcttgctagacaccttttcaatgtttaatttttttgaaataagctttgataaagccttcctcgcaaattccggatacatgaacatgtcggcgacatgattaagtattgttttttcattattttctcaataccccaatagatgatagaatatcacccaatgcgtccatgttgtctatttccaacaggtcgctatatccaccaatagaagtttttccaaaaaagattctaggaacagttctaccaccagtaatttgttcaaaatagtcacgcaattcattttcgggtttaaattctttaatatcgacaatttcatacgctcctcttttgaaactaaacttatttagaatatccagtgcatttctacaaaaaggacatgtatacttgacaaaaattgtcactttgttattggccaacctttgttgtacaaattcctcggccattttaatatttaagtgatataaaactatctcgacttatttaactctttagtcgagatatatggacgcagatagctatatgatagccaactacagaaggcaaacgctataaaaaacataattacgacgagcatatttataaatatttttattcagcattacttgatatagtaatattaggcacagtcaaacattcaaccactctcgatacattaactctctcattttctttaacaaattctgcaatatcttcgtaaaaagattcttgaaactttttagaatatctatcgactctagatgaaatagcgttcgtcaacatactatgttttgtatacataaaggcgcccattttaacagtttctagtgacaaaatgctagcgatcctaggatcctttagaatcacatagattgacgattcgtctctcttagtaactctagtaaaataatcatacaatctagtacgcgaaataatattatccttgacttgaggagatctaaacaatctagttttgagaacatcgataagttcatcgggaatgacatacatactatctttaatagaactcttttcatccagttgaatggattcgtccttaaccaactgattaatgagatcttctattttatcattttccagatgatatgtatgtccattaaagttaaattgtgtagcgcttctttttagtctagcagccaatactttaacatcactaatatcgatatacaaaggagatgatttatctatggtattaagaattcgtttttcgacatccgtcaaaaccaattcctttttgcctgtatcatccagttttccatcctttgtaaagaaattattttctactagactattaataagactgataaggattcctccataattgcacaatccaaactttttcacaaaactagactttacaagatctacaggaatgcgtacttcaggttttttagcttgtgattttttcttttgcggacattttctagtaaccaactcatctaccatttcattgattttagcagtgaaataagctttcaatgcacgggcactgatactattgaaaacgagttgatcttcaaattccgccatttaagttcaccaaacaacttttaaatacaaatatatcaatagtagtagaataagaactataaaaaaaataataattaaccaataccaaccccaacaaccggtattattagttgatgtgactgttttctcatcacttagaacagatttaacaatttctataaagtctgtcaaatcatcttccggagaccccataaatacaccaaatatagcggcgtacaacttatccatttatacattgaatattggcttttctttatcgctatcttcatcatattcatcatcaatatcaacaagtcccagattacgagccagatcttcttctacattttcagtcattgatacacgttcactatctccagagagtccgataacgttagccaccacttctctatcaatgattagtttcttgagcgcgaaagtaatttttgtttccgttccggatctatagaagacgataggtgtgataattgccttagccaattgtctttctcttttactgagtgattctagttcaccttctatagatctgagaatggatgattctccagtcgaaacatattctaccatggatccgtttaatttgttgatgaagatggattcatccttaaatgttttctctgtaatagtttccaccgaaagactatgcaaagaatttggaatgcgttccttgtgcttaatgtttccatagacggcttctagaagttgatacaacataggactagccgcggtaacttttatttttagaaagtatccatcgcttctatcttgtttagatttatttttataaagtttagtctctccttccaacataataaaagtggaagtcatttgactagataaactatcagtaagttttatagagatagacgaacaattagcgtattgagaagcatttagtgtaacgtattcgatacattttgcattagatttactaatcgattttgcatactctataacacccgcacaagtctgtagagaatcgctagatgcagtaggtcttggtgaagtttcaactctcttcttgattaccttactcatgattaaacctaaataattgtactttgtaatataatgatatatattttcactttatctcatttgagaataaaaatgtttttgtttaaccactgcatgatgtacagatttcggaatcgcaaaccaccagtggttttattttatccttgtccaatgtgaattgaatgggagcggatgcgggtttcgtacgtagatagtacattcccgtttttagaccgagactccatccgtaaaaatgcatactcgttagtttggaataactcggatctgctatatggatattcatagattgactttgatcgatgaaggctcccctgtctgcagccatttttatgatcgtcttttgtggaatttcccaaatagttttataaactcgcttaatatcttctggaaggtttgtattctgaatggatccaccatctgccataatcctattcttgatctcatcattccataattttctctcggttaaaactctaaggagatgcggattaactacttgaaattctccagacaatactctccgagtgtaaatattactggtatacggttccaccgactcattatttcccaaaatttgagcagttgatgcagtcggcataggtgccaccaataaactatttctaagaccgtatgttctgattttatcttttagaggttcccaattccaaagatccgacggtacaacattccaaagatcatattgtagaataccgttactggcgtacgatcctacatatgtatcgtatggtccttccttctcagctagttcacaactcgcctctaatgcaccgtaataaatggtttcgaagatcttcttatttagatcttgtgcttccaggctatcaaatggataatttaagagaataaacgcgtccgctaatccttgaacaccaataccgataggtctatgtctcttattagagatttcagcttctggaataggataataattaatatctataattttattgagatttctgacaattactttgaccacatccttcagtttgagaaaatcaaatcgcccatctattacaaacatgttcaaggcaacagatgccagattacaaacggctacctcattagcatccgcatattgtattatctcagtgcaaagattactacacttgatagttcctaaattttgttgattactctttttgttacacgcatccttataaagaatgaatggagtaccagtttcaatctgagattctataatcgctttccagacgactcgagcctttattatagatttgtatctcctttctctttcgtatagtgtatacaatcgttcgaactcgtctccccaaacattgtccaatccaggacattcatccggacacatcaacgaccactctccgtcatccttcactcgtttcataaagagatcaggaatccaaagagctataaatagatctctggttctatgttcctcgtttcctgtattctttttaagatcgaggaacgccataatatcagaatgccacggttccaagtatatggccataactccaggccgtttgtttcctccctgatctatgtatctagcggtgttattataaactctcaacattggaataataccgtttgatataccattggtaccggagatatagcttccactggcacgaatattactaattgatagacctattccccctgccattttagagattaatgcgcatcgttttaacgtgtcatagataccctctatgctatcatcgatcatgttaagtagaaaacagctagacatttggtgacgactagttcccgcattaaataaggtaggagaagcgtgcgtaaaccatttttcagaaagtagattgtacgtctcaatagctgagtctatatcccattgatgaattcctactgcgacacgcattaacatgtgctgaggtctttcaacgatcttgttgtttattttcaacaagtaggatttttccaaagttttaaaaccaaaatagttgtatgaaaagtctcgttcgtaaataataaccgagttgagtttatccttatatttgttaactatatccatggtgatacttgaaataatcggagaatgtttcccatttttaggattaacatagttgaataaatcctccatcacttcactaaatagtttttttgtttccttgtgtagatttgatacggctattctggcggctagaatggcataatccggatgttgtgtagtacaagtggctgctatttcggctgccagagtgtccaattctaccgttgttactccattatatattccttgaataaccttcatagctattttaataggatctatatgatccgtgtttaagccataacataattttctaatacgagacgtgattttatcaaacatgacattttccttgtatccatttcgtttaatgacaaacatttttgttggtgtaataaaaaaattatttaacttttcattaatagggatttgacgtatgtagcgtacaaaatgatcgttcctggtatatagataaagagtcctatatatttgaaaatcgttacggctcgattaaactttaatgattgcatagtgaatatatcattaggatttaactccttgactatcatggcggcgccagaaattaccatcaaaagcattaatacagttatgccgatcgcagttaaaacggttatagcatccaccatttatatctaaaaattagatcaaagaatatgtgacaaagtcctagttgtatactgagaattgacgaaacaatgtttcttacatatttttttcttattagtaactgacttaatagtaggaactggaaagctagacttgattattctataagtatagatacccttccagataatgttctctttgataaaagttccagaaaatgtagaattttttaaaaagttatcttttgctattaccaagattgtgtttagacgcttattattaatatgagtgatgaaatccacaccgcctctagatatcgcctttatttccacattagatggtaaatccaatagtgaaactatctttttaggaatgtatggactcgcgtttagaggagtgaacgtcttgggcgtcggaaaggatgattcgtcaaacgaataaacaatttcacaaatggatgttaatgtattagtaggaaattttttgacgctagtggaattgaagattctaatggatgatgttctacctatttcatccgataacatgttaatttccgacaccaacggttttaatatttcgatgatatacggtagtctctctttcggacttatatagcttattccacaatacgagtcattatatactccaaaaaacaaaataactagtataaaatctgtatcgaatgggaaaaacgaaattatcgacataggtatagaatccggaacattgaacgtattaatacttaattctttttctgtggtaagtaccgataggttattgacattgtatggttttaaatattctataacttgagacttgatagatattagtgatgaattgaaaattatttttatcaccacgtgtgtttcaggatcatcgtcgacgcccgtcaaccaaccgaatggagtaaaataaatatcattaatatatgctctagatattagtatttttattaatcctttgattatcatcttctcgtaggcgaatgattccatgatcaagagtgatttgagaacatcctccggagtattaatgggcttagtaaacagtccatcgttgcaataataaaagttatccaagttaaaggatattatgcattcgtttaaagatatcacctcatctgacggagacaattttttggtaggttttagagactttgaagctacttgtttaacaaagttattcatcgtcgtctactattctatttaattttgtagttaatttatcacatatcacattaattgactttttggtccatttttccatacgtttatattcttttaatcctgcgttatccgtttccgttatatccagggatagatcttgcaagttaaatagaatgctcttaaataatgtcattttcttatccgctaaaaatttaaagaatgtataaacctttttcagagatttgaaactcttaggtggtgtcctagtacacaatatcataaacaaactaataaacattccacattcagattccaacagctgattaacttccacattaatacagcctattttcgctccaaatgtacattcgaaaaatctgaataaaacatcgatgtcacaatttgtattatccaatacagaatgtttgtgattcgtgttaaaaccatcggagaaggaatagaaataaaaattattatagtggtggaattcagttggaatattgcctccggagtcataaaaggatactaaacattgttttttatcataaattacacatttccaatgagacaaataacaaaatccaaacattacaaatctagaggtagaacttttaattttgtctttaagtatatacgataagatatgtttattcataaacgcgtcaaatttttcatgaatcgctaaggagtttaagaatctcatgtcaaattgtcctatataatccacttcggatccataagcaaactgagagactaagttcttaatacttcgattgctcatccaggctcctctctcaggctctattttcatcttgacgacctttggattttcaccagtatgtattcctttacgtgataaatcatcgattttcaaatccatttgtgagaagtctatcgccttagatactttttcccgtagtcgaggtttaaaaaaatacgctaacggtatactagtaggtaactcaaagacatcatatatagaatggtaacgcgtctttaactcgtcggttaactctttcttttgatcgagttcgtcgctactattgggtctgctcaggtgccccgactctactagttccaacatcataccgataggaatacaagacactttgccggcggttgtagatttatcatatttttccactacatatccgttacaatttgttaaaaatttagatacatctatattgctacataatccagctagtgaatatatatgacataataaattggtaaatcctagttctggtattttactaattactaaatctgtatatctttccatttatcatggaaaagaatttaccagatatcttcttttttccaaactgcgttaatgtattctcttacaaatattcacaagatgaattcagtaatatgagtaaaacggaacgtgatagtttctcattggccgtgtttccagttataaaacatagatggcataacgcacacgttgtaaaacataaaggaatatacaaagttagtacagaagcacgtggaaaaaaagtatctcctccatcactaggaaaacccgcacacataaacctaaccgcgaagcaatatatatacagtgaacacacaataagctttgaatgttatagttttctaaaatgtataacaaatacagaaatcaattcgttcgatgagtatatattaagaggactattagaagctggtaatagtttacagatattttccaattccgtaggtaaacgaacagatactataggtgtactagggaataagtatccatttagcaaaattccattggcctcattaactcctaaagcacaacgagagatattttcagcgtggatttctcatagacctgtagttttaactggaggaaccggagtgggtaagacgtcacaggtacccaagttattgctttggtttaattatttatttggtggattctctactctagataaaattactgactttcacgaaagaccagtcattctatctcttcctaggatagctttagttagattgcatagcaataccattttaaaatcattgggatttaaggtactagatggatctcctatttctttacggtacggatctataccggaagaattaataaacaaacaaccaaaaaaatatggaattgtattttctacccataagttatctctaacaaaactatttagttatggcactcttattatagacgaagttcatgagcatgatcaaataggagatattattatagcagtagcgagaaagcatcatacgaaaatagattctatgtttttaatgactgccacattagaggatgaccgagaacggctaaaagtatttttacctaatcccgcatttatacatattcctggagatacactgtttaaaattagcgaggtatttattcataataagataaatccatcttccagaatggcatacatagaagaagaaaagagaaatttagttactgctatacagatgtatactcctcctgatggatcatccggtatagtctttgtggcatccgttgcacagtgtcacgaatataaatcatatttagaaaaaagattaccgtatgatatgtatattattcatggtaaggtcttagatatagacgaaatattagaaaaagtgtattcatcacctaatgtatcgataattatttctactccttatttggaatccagcgttactatacgcaatgttacacacatttatgatatgggtagagtttttgtccccgctccttttggaggatcgcaacaatttatttctaaatctatgagagatcaacgaaaaggaagagtaggaagagttaatcctggtacatacgtctatttctatgatctgtcttatatgaagtctatacagcgaatagattcagaatttctacataattatatattgtacgctaataagtttaatctaacactccccgaagatttgtttataatccctacaaatttggatattctatggcgtacaaaggaatatatagactcgttcgatattagtacagaaacatggaataaattattatccaattattatatgaagatgatagagtatgctaaactttatgtactaagtcctattctcgctgaggagttggataactttgagaggacgggagaattaactagtattgtacgagaagccattttatctctaaatttacgaattaagattttaaattttaaacataaagatgatgatacgtatatacacttttgtaaaatattattcggtgtctataacggaacaaacgctactatatattatcatagacctctaacgggatatatgaatatgatttcagatactatatttgttcctgtagataataactaaaaatcaaactctaatgaccacatctttttttagagatgaaaaattttccacatctccttttgtagacacgactaaacattttgcagaaaaaagtttattagtgtttagataatcgtatacttcatcagtgtagatagtaaatgtgaacagataaaaggtattcttgctcaatagattggtaaattccatagaatatattaatcctttcttcttgagatcccacatcatttcaaccagagacgttttatccaatgatttacctcgtactataccacatacaaaactagattttgcagtgacgtcgtacctggtattcctaccaaacaaaattttacttttagttcttttagaaaattctaaggtagaatctctatttgccaatatgtcatctatggaattaccactagcaaaaaatgatagaaatatatattgatacatcgcagctggttttgatctactatactttaaaaacgaatcagattccataattgcctgtatatcatcagctgaaaaactatgttttacacgtattccttcggcatttctttttaatgatatatcttgtttagacaatgataaagttatcatgtccatgagagacgcgtctccgtatcgtataaatatttcattagatgttagacgcttcattaggggtatacttctataaggtttcttaatcagtccatcattggttgcgtcaagaactactatcggatgttgttgggtatctctagtgttacacatggccttactaaagtttgggtaaataactatgatatctctattaattatagatgcatatatttcattcgtcaaggatattagtatcgacttgctatcgtcattaatacgtgtaatgtaatcatataaatcatgcgatagccaaggaaaatttaaatagatgttcatcatataatcgtcgctataattcatattaatacgttgacattgactaatttgtaatatagcctcgccacgaagaaagctctcgtattcagtttcatcgataaaggataccgttaaatataactggttgccgatagtctcatagtctattaagtggtaagtttcgtacaaatacagaatccctaaaatattatctaatgttggattaatctttaccataactgtataaaatggagacggagtcataactattttaccgtttgtacttactggaatagatgaaggaataatctccggacatgctggtaaagacccaaatgtctgtttgaagaaatccaatgttccaggtcctaatctcttaacaaaaattacgatattcgatcccgatatcctttgcattctatttaccagcatatcacgaactatattaagattatctatcatgtctattctcccaccgttatataaatcgcctccgctaagaaacgttagtatatccatacaatggaatacttcatttctaaaatagtattcgttttctaattctttaatgtgaaatcgtatactagaaagggaaaaattatctttgagttttccgttagaaaagaaccacgaaactaatgttctgattgcgtccgattccgttgctgaattaatggatttacaccaaaaactcatataacttctagatgtagaagcattcgctaaaaaattagtagaatcaaaggatataagtagatgttccaacaagtgagcaattcccaagatttcatctatatcattctcgaatccgaaattagaaattcccaagtagatatcctttttcatccgatcgttgatgaaaatacgaactttattcggtaagacaatcatttactaaggagtaaaataggaagtaatgttcgtatgtcgttatcatcgtataaattaaaggtgtgttttttaccattaagtgacattataattttaccaatattggaattataatataggtgtatttgcgcactcgcgacggttgatgcatcggtaaatatagctgtatctaatgttctagtcggtatttcatcatttcgctgtctaataatagcgttttctctatctgtttccattacagctgcctgaagtttattggtcggataatatgtaaaataataagaaatacatacgaataacaaaaataaaataagatataataaagatgccatttagagatctaattttgtttaacttgtccaaattcctacttacagaagatgaggaatcgttggagatagtgtcttccttatgtagaggatttgaaatatcttataatgacttgataacttactttccagataggaaataccataaatatatttataaagtatttgaacatgtagatttatcggaggaattaagtatggaattccatgatacaactctgagagatttagtctatcttagattgtacaagtattccaagtgtatacggccgtgttataaattaggagataatctaaaaggcatagttgttataaaggacaggaatatttatattagggaagcaaatgatgacttgatagaatatctcctcaaggaatacactcctcagatttatacatattctaatgagcgcgtccccataactggttcaaaattaattctttgtggattttctcaagttacatttatggcgtatacaacgtcgcatataacaacaaataaaaaggtagatgttctcgtttccaaaaaatgtatagatgaactagtcgatccaataaattatcaaatacttcaaaatttatttgataaaggaagcggaacaataaacaaaatactcaggaagatattttattcggtaacaggtggccaaactccataggtagctttttctatttcggattttagaatttccaaattcaccagcgatttatcggttttggtgaaatccaaggatttattaatgtccacaaatgccatttgttttgtctgtggattgtatttgaaaatggaaacgatgtagttagatagatgcgctgcaaagtttcctattagggttccgcgctttacgtcacccagcatacttgaatcaccatcctttaaaaaaaatgataagatatcaacatggagtatatcatactcggattttaattcttctactgcatcactgacattttcacaaatactacaatacggtttaccgaaaataatcagtacgttcttcatttatgggtatcaaaaacttaaaatcgttactgctggaaaataaatcactgacgatattagatgataatttatacaaagtatacaatggaatatttgtggatacaatgagtatttatatagccgtcgccaattgtgtcagaaacttagaagagttaactacggtattcataaaatacgtaaacggatgggtaaaaaagggagggcatgtaaccctttttatcgatagaggaagtataaaaattaaacaagacgttagagacaagagacgtaaatattctaaattaaccaaggacagaaaaatgttagaattagaaaagtgtacatccgaaatacaaaatgttaccggatttatggaagaagaaataaaggcagaaatgcaattaaaaatcgataaactcacatttcaaatatatttatctgattctgataacataaaaatatcattgaatgagatactaacacatttcaacaataatgagaatgttacattattttattgtgatgaacgagacgcagaattcgttatgtgtctcgaggctaaaacacatttctctaccacaggagaatggccgttgataataagtaccgatcaggatactatgctatttgcatctgctgataatcatcctaagatgataaaaaacttaactcaactgtttaaatttgttccctcggcagaggataactatttagcaaaattaacggcgttagtgaatggatgtgatttctttcctggactctatggggcatctataacacccaccaacttaaacaaaatacaattgtttagtgattttacaatcgataatatagtcactagtttggcaattaaaaattattatagaaagactaactctaccgtagacgtgcgtaatattgttacgtttataaacgattacgctaatttagacgatgtctactcgtatattcctccttgtcaatgcactgttcaagaatttatattttccgcattagatgaaaaatggaatgaatttaaatcatcttatttagaaagcgtgccgttaccctgccaattaatgtacgcgttagaaccacgcaaggagattgatgtttcagaagttaaaactttatcatcttatatagatttcgaaaatactaaatcagatatcgatgttataaaatctatatcctcgatcttcggatattctaacgaaaactgtaacacgatagtattcggcatctataaggataatttactactgagtataaataattcattttactttaacgatagtctgttaataaccaatactaaaagtgataatataataaatataggttactagattaaaaatggtgttccaactcgtgtgctctacatgcggtaaagatatttctcacgaacgatataaattgattatacgaaaaaaatcattaaaggatgtactcgtcagtgtaaagaacgaatgttgtaggttaaaattatctacacaaatagaacctcaacgtaacttaacagtgcaacctctattggatataaactaatatggatccggttaattttatcaagacatatgcgcctagaggttctattatttttattaattataccatgtcattaacaagtcatttgaatccatcgatagaaaaacatgtgggtatttattatggtacgttattatcggaacacttggtagttgaatctacctatagaaaaggagttcgaatagtcccattggatagtttttttgaaggatatcttagtgcaaaagtatacatgttagagaatattcaagttatgaaaatagcagctgatacgtcattaactttattgggtattccgtatggatttggtcataatagaatgtattgttttaaattggtagctgactgttataaaaatgccggtattgatacatcgtctaaacgaatattgggcaaagatatttttctgagccaaaacttcacagacgataatagatggataaagatatatgattctaataatttaacattttggcaaattgattaccttaaagggtgagttaatatgcataactactcctccgttgttttttccctcgttctttttcttaacgttgtttgccatcactctcataatgtaaagatattctaaaatggtaaacttttgcatatcggacgcagaaattggtataaatgttgtaattgtattatttcccgtcaatggactagtcacagctccatcagttttatatcctttagagtatttctcactcgtgtctaacattctagagcattccatgatctgtttatcgttgatattggccggaaagatagattttttattttttattatattactattggcaattgtagatataacttctggtaaatatttttctaccttttcaatctcttctattttcaagccggctatatattctgctatattgttgctagtatcaataccttttctggctaagaagtcatatgtggtattcactatatcagttttaactggtagttccattagcctttccacttctgcagaataatcagaaattggttctttaccagaaaatccagctactataataggctcaccgatgatcattggcaaaatcctatattgtaccagattaatgagagcatatttcatttccaataattctgctagttcttgagacattgatttatttgatgaatctagttggttctctagatactctaccatttctgccgcatacaataacttgttagataaaatcagggttatcaaagtgtttagcgtggctagaatagtgggcttgcatgtattaaagaatgcggtagtatgagtaaaccgttttaacgaattatatagtctccagaaatctgtggcgttacatacatgagccgaatgacatcgaagattgtccaatatttttaatagctgctctttgtccattatttctatatttgactcgcaacaattgtagataccattaatcaccgattcctttttcgatgccggacaatagcacaattgtttagctttggactctatgtattcagaattaatagatatatctctcaatacagattgcactatacattttgaaactatgtcaaaaattgtagaacgacgctgttctgcagccatttaactttaaataatttacaaaaatttaaaatgagcatccgtataaaaatcgataaactgcgccaaattgtggcatatttttcagagttcagtgaagaagtgtctataaatgtagactcgacggatgagttaatgtatatttttgccgccttgggcggatctgtaaacatttgggcaattatacctctaagtgcatcagtgttttaccgaggagccgaaaatattgtgtttaatcttcctgtgtccaaggtaaaatcgtgtttgtgtagttttcacaatgatgccatcatagatatagaacctgatctggaaaataatctagtaaaactttctagttatcatgtagtaagtgtcgattgtaacaaggaactgatgcctattaggacagatactactatttgtctaagtatagatcaaaagaaatcttacgtgtttaattttcacaagtatgaagaaaaatgttgtggtagaaccgtcattcatctagaatggttgttgggctttatcaagtgtattagtcagcatcagcatctggctattatgtttaaagatgacaatattattatgaagactcctggtaatactgatgcgttttccagggaatattctatgactgaatgttctcaagaactacaaaagttttctttcaaaatagctatctcgtctctcaacaaactacgaggattcaaaaagagagtcaatgtttttgaaactagaatcgtaatggataatgacgataacattttaggaatgttgttttcggatagagttcaatcctttaagatcaacatctttatggcgtttttagattaatactttcaatgagataaatatgggtggcggagtaagtgttgagctccctaaacgggatccgcctccgggagtacccactgatgagatgttattaaacgtggataaaatgcatgacgtgatagctcccgctaagcttttagaatatgtgcatataggaccactagcaaaagataaagaggataaagtaaagaaaagatatccagagtttagattagtcaacacaggacccggtggtctttcggcattgttaagacaatcgtataatggaaccgcacccaattgctgtcgcacttttaatcgtactcattattggaagaaggatggaaagatatcagataagtatgaagagggtgcagtattagaatcgtgttggccagacgttcacgacactggaaaatgcgatgttgatttattcgactggtgtcagggggatacgttcgatagaaacatatgccatcagtggatcggttcagcctttaataggagtaatagaactgtagagggtcaacaatcgttaataaatctgtataataagatgcaaacattatgtagtaaagatgctagtgtaccaatatgcgaatcatttttgcattatttacgcgcacacaatacagaagatagcaaagagatgatcgattatattctaagacaacagtctgcggactttaaacagaaatatatgagatgtagttatcccactagagataagttagaagagtcattaaaatatgcggaacctcgagaatgttgggatccagagtgttcgaatgccaatgttaatttcttactaacacgtaattataataatttaggactttgcaatattgtacgatgtaataccagcgtgaacaacttacagatggataaaacttcctcattaagattgtcatgtggattaagcaatagtgatagattttctactgttcccgtcaatagagcaaaagtagttcaacataatattaaacactcgttcgacctaaaattgcatttgatcagtttattatctctcttggtaatatggatactaattgtagctatttaaatgggtgccgcggcaagcatacagacgacggtgaatacactcagcgaacgtatctcgtctaaattagaacaagaagcgaacgctagtgctcaaacaaaatgtgatatagaaatcggaaatttttatatccgacaaaaccatggatgtaacctcactgttaaaaatatgtgctctgcggacgcggatgctcagttggatgctgtgttatcagccgctacagaaacatatagtggattaacaccggaacaaaaagcatacgtgccagctatgtttactgctgcgttaaacattcagacgagtgtaaacactgttgttagagattttgaaaattatgtgaaacagacttgtaattctagcgcggtcgtcgataacaaattaaagatacaaaacgtaatcatagatgaatgttacggagccccaggatctccaacaaatttggaatttattaatacaggatctagcaaaggaaattgtgccattaaagcgttgatgcaattgacgactaaggccactactcaaatagcacctagacaagttgctggtacaggagttcagttttatatgattgttatcggtgttataatattggcagcgttgtttatgtactatgccaagcgtatgttgttcacatccaccaatgataaaatcaaacttattttagccaataaggaaaacgtccattggactacttacatggacacattctttagaacttctccgatggttattgctaccacggatatgcaaaactgaaaatatattgataatattttaatagattaacatggaagttatcgctgatcgtctagacgatatagtgaaacaaaatatagcggatgaaaaatttgtagattttgttatacacggtctagagcatcaatgtcctgctatacttcgaccattaattaggttgtttattgatatactattatttgttatagtaatttatatttttacggtacgtctagtaagtagaaattatcaaatgttgttggtggtgctagtcatcacattaactattttttattactttatactataatagtactagactgacttctaacaaacatctcacctgccataaataaatgcttgatattaaagtcttctatttctaacactattccatctgtggaaaataatactctgacattatcgctaattgacacatcggtgagtgatatgcctataaagtaataatcttctttgggcacatataccagtgtaccaggttctaacaacctatttactggtgctcctgtagcatactttttctttaccttgagaatatccatcgtttgcttggtcaatagcgatatgtgattttttatcaaccactcaaaaaagtaattggagtgttcatatcctctacgggctattgtctcatggccgtgtatgaaatttaagtaacacgactgtggtagatttgttctatagagccgattgccgcaaatagatagaactaccaatatgtctgtacaaatgttaaacattaattgattaacagaaaaaacaatgttcgttctgggaatagaaaccagatcaaaacaaaattcgttagaatatatgccacgtttatacatggaatataaaataactacagtttgaaaaataacagtatcatttaaacatttaacttgcggggttaatctcacaactttactgtttttgaactgttcaaaatatagcatcgatccgtgagaaatacgtttagccgcctttaatagaggaaatcccaccgcctttctggatctcaccaacgacgatagttctgaccagcaactcatttcttcatcatccacctgttttaacatataataggcaggagatagatatccgtcattgcaatattccttctcgtaggcacacaatctaatattgataaaatctccattctcttctctgcatttattatcttgtctcggtggctgattaggctgtggtcttggtttaggccttggtctatcgttgttgaatctattttggtcattaaatctttcatttcttcctggtatatttttatcacctcgtttggttggatttttgtctatattatcgtttgtaacatcggtacgggtattcatttatcacaaaaaaaacttctctaaatgagtctactgctagaaaacctcatcgaagaagataccatattttttgcaggaagtatatctgagtatgatgatttacaaatggttattgccggcgcaaaatccaaatttccaagatctatgctttctatttttaatatagtacctagaacgatgtcaaaatatgagttggagttgattcataacgaaaatatcacaggagcaatgtttaccacaatgtataatataagaaacaatttgggtctaggagatgataaactaactattgaagccattgaaaactatttcttggatcctaacaatgaagttatgcctcttattattaataatacggatatgactgccgtcattcctaaaaaaagtggtaggagaaagaataagaacatggttatcttccgtcaaggatcatcacctatcttgtgcattttcgaaactcgtaaaaagattaatatttataaagaaaatatggaatccgcgtcgactgagtatacacctatcggagacaacaaggctttgatatctaaatatgcgggaattaatgtcctgaatgtgtattctccttccacatccataagattgaatgccatttacggattcaccaataaaaataaactagagaaacttagtactaataaggaactagaatcgtatagttctagccctcttcaagaacccattaggttaaatgattttctgggactattggaatgtgttaaaaagaatattcctctaacagatattccgacaaaggattgattactataaatggagaatgttcctaatgtatactttaatcctgtgtttatagagcccacgtttaaacattctttattaagtgtttataaacacagattaatagttttatttgaagtattcgttgtattcattctaatatatgtattttttagatctgaattaaatatgttcttcatgcctaaacgaaaaatacccgatcctattgatagattacgacgtgctaatctagcgtgtgaagacgataaattaatgatctatggattaccatggatgacaactcaaacatctgcgttatcaataaatagtaaaccgatagtgtataaagattgtgcaaagcttttgcgatcaataaatggatcacaaccagtatctcttaacgatgttcttcgcagatgatgattcattttttaagtatttggctagtcaagatgatgaatcttcattatctgatatattgcaaatcactcaatatctagactttctgttattattattgatccaatcaaaaaataaattagaagctgtgggtcattgttatgaatctctttcagaggaatacagacaattgacaaaattcacagactttcaagattttaaaaaactgtttaacaaggtccctattgttacagatggaagggtcaaacttaataaaggatatttgttcgactttgtgattagtttgatgcgattcaaaaaagaatcctctctagctaccaccgcaatagatcctgttagatacatagatcctcgtcgtgatatcgcattttctaacgtgatggatatattaaagtcgaataaagtgaacaataattaattctttattgtcatcatgaacggcggacatattcagttgataatcggccccatgttttcaggtaaaagtacagaattaattagacgagttagacgttatcaaatagctcaatataaatgcgtgactataaaatattctaacgataatagatacggaacgggactatggacgcatgataagaataattttgaagcattggaagcaactaaactatgtgatgtcttggaatcaattacagatttctccgtgataggtatcgatgaaggacagttctttccagacattgtttaattctgtgagcgtatggcaaacgaaggaaaaatagttatagtagccgcactcgatgggacatttcaacgtaaaccgtttaataatattttgaatcttattccattatctgaaatggtggtaaaactaactgctgtgtgtatgaaatgctttaaggaggcttccttttctaaacgattgggtgaggaaaccgagatagagataataggaggtaatgatatgtatcaatcggtgtgtagaaagtgttacgtcggctcataatattatattttttatctaaaaaactaaaaataaacattgattaaattttaatataatacttaaaaatggatgttgtgtcgttagataaaccgtttatgtattttgaggaaattgataatgagttagattacgaaccagaaagtgcaaatgaggtcgcaaaaaaactgccgtatcaaggacagttaaaactattactaggagaattattttttcttagtaagttacagcgacacggtatattagatggtgccaccgtagtgtatataggatcggctcctggtacacatatacgttatttgagagatcatttctataatttaggagtgatcatcaaatggatgctaattgacggccgccatcatgatcctattttaaatggattgcgtgatgtaactctagtgactcggttcgttgatgaggaatatctacgatccatcaaaaaacaactgcatccttctaagattattttaatttctgatgtgagatccaaacgaggaggaaatgaacctagtacggcggatttactaagtaattacgctctacaaaatgtcatgattagtattttaaaccccgtggcgtctagtcttaaatggagatgcccgtttccagatcaatggatcaaggacttttatatcccacacggtaataaaatgttacaaccttttgctccttcatattcagctgaaatgagattattaagtatttataccggtgagaacatgagactgactcgagttaccaaattagacgctgtaaattatgaaaaaaagatgtactaccttaataagatcgtccgtaacaaagtagttgttaactttgattatcctaatcaggaatatgactattttcacatgtactttatgctgaggaccgtgtactgcaataaaacatttcctactactaaagcaaaggtactatttctacaacaatctatatttcgtttcttaaatattccaacaacatcaactgaaaaagttagtcatgaaccaatacaacgtaaaatatctagcaaaaattctatgtctaaaaacagaaatagcaagagatccgtacgcggtaataaatagaaacgtactactgagatatactaccgatatagagtataatgatttagttactttaataaccgttagacataaaattgattctatgaaaactgtgtttcaggtatttaacgaatcatccataaattatactccggttgatgatgattatggagaaccaatcattataacatcgtatcttcaaaaaggtcataacaagtttcctgtaaattttctatacatagatgtggtaatatctgacttatttcctagctttgttagactagatactacagaaactaatatagttaatagtgtactacaaacaggcgatggtaaaaagactcttcgtcttcccaaaatgttagagacggaaatagttgtcaagattctctatcgccctaatataccattaaaaattgttagatttttccgcaataacatggtaactggagtagagatagccgatagatctgttatttcagtcgctgattaatcaattagtagagatgagataagaacattataataatcaataatatatcttatatcttatatcttatatcttatatcttgtttagaaaaatgctaatattaaaatagctaacgctagtaatccaatcggaagccatttgatatctataatagggtatctaatttcctgatttaaatagcggacagctatattctcggtagctactcgtttggaatcacaaacattatttacatctaatttactatctgtaatggaaacgtttcccaatgaaatggtacaatccgatacattgcattttgttatatttttttttaaagaggctggtaacaacgcatcgcttcgtttacatggctcgtaccaacaataatagggtaatcttgtatctattcctatccgtactatgcttttatcaggataaatacatttacatcgtatatcgtctttgttagcatcacagaatgcataaatttgttcgtccgtcatgataaaaatttaaagtgtaaatataactattatttttatagttgtaataaaaagggaaatttaattgtatactttcggttctttaaaagaaactgacttgataaaaatggctgtaatctctaaggttacgtatagtctatatgatcaaaaagagattaatgctacagatattatcattagtcatgttaaaaatgacgacgatatcggtaccgttaaagatggtagactaggtgctatggatggggcattatgtaagacttgtgggaaaacggaattggaatgtttcggtcactggggtaaagtaagtatttataaaactcatatagttaagcctgaatttatttcagaaattattcgtttactgaatcatatatgtattcactgcggattattgcgttcacgagaaccgtattccgacgatattaacctaaaagagttatcgggacacgctcttaggagattaaaggataaaatattatccaagaaaaagtcatgttggaacagtgaatgtatgcaaccgtatcaaaaaattactttttcaaagaaaaaggtttgtttcgtcaacaagttggatgatattaacgttcctaattctctcatctatcaaaagttaatttctattcatgaaaagttttggccattattagaaattcatcaatatccagctaacttattttatacagactactttcccatccctccgttgattattagaccggctattagtttttggatagatagtatacccaaagagaccaatgaattaacttacttattaggtatgatcgttaagaattgtaacttgaatgctgatgaacaggttatccagaaggcggtaatagaatacgatgatattaaaattatttctaataacactaccagtatcaatttatcatatattacatccggcaaaaataatatgattagaagttatatcgtcgcccgacgaaaagatcagaccgctagatctgtaattggtcccagtacatctatcaccgttaatgaggtaggaatgcccgcatatattagaaatacacttacagaaaagatatttgttaatgcctttacagtggataaagttaaacaactattagcgtcaaaccaagttaaattttactttaataaacgattaaaccaattaacaagaatacgccaaggaaagtttattaaaaataaaatacatttattgcctggtgattgggtagaagtagctgttcaagaatatacaagtattatttttggaagacagccgtctctacatagatacaacgtcatcgcttcatctatcagagctaccgaaggagatactatcaaaatatctcccggaattgccaactctcaaaatgctgatttcgacggggatgaggaatggatgatattagaacaaaatcctaaagctgtaattgaacaaagtattcttatgtatccgacgacgttactcaaacacgatattcatggagcccccgtttatggatctattcaagatgaaatcgtagcagcgtattcattgtttaggatacaagatctttgtttagatgaagtattgaacatcttggggaaatatggaagagagttcgatcctaaaggtaaatgtaaattcagcggtaaagatatctatacttacttgataggtgaaaagattaattatccgggtctcttaaaggatggtgaaattattgcaaacgacgtagatagtaattttgttgtggctatgaggcatctgtcattggctggactcttatccgatcataagtcgaacgtggaaggtatcaactttattatcaagtcatcttatgtttttaagagatatctatctatttacggttttggggtgacattcaaagatctgagaccaaattcgacgttcactaataaattggaggccatcaacgtagaaaaaatagaacttatcaaagaagcatacgccaaatatctcaacgatgtaagagacgggaaaatagttccattatctaaagctttagaggcggactatgtggaatccatgttatccaacttgacaaatcttaatatccgagagatagaagaacatatgagacaaacgctgatagatgatccagataataacctcctgaaaatggccaaagcgggttataaagtaaatcccacagaactaatgtatattctaggtacgtatggacaacaaaggattgatggtgaaccagcagagactcgagtattgggtagagttttaccttactatcttccagactctaaggatccagaaggaagaggttatattcttaattctttaacaaaaggattaacgggttctcaatattacttttcgatgctggttgcaagatctcaatctactgatatcgtctgtgaaacatcacgtaccggaacactggctagaaaaatcattaaaaagatggaggatatggtggtcgacggatacggacaagtagttataggtaatacgctcatcaagtacgccgccaattataccaaaattctaggctcagtatgtaaacctgtagatcttatctatccagatgagtccatgacttggtatttggaaattagtgctctgtggaataaaataaaacagggattcgtttactctcagaaacagaaacttgcaaagaagacattggcgccgtttaatttcctagtattcgtcaaacccaccactgaggataatgctattaaggttaaggatctgtacgatatgattcataacgtcattgatgatgtgagagagaaatacttctttacggtatctaatatagattttatggagtatatattcttgacgcatcttaatccttctagaattagaattacaaaagaaacggctatcactatctttgaaaagttctatgaaaaactcaattatactctaggtggtggaactcctattggaattatttctgcacaggtattgtctgagaagtttacacaacaagccctgtccagttttcacactactgaaaaaagtggtgccgtcaaacaaaaacttggtttcaacgagtttaataacttgactaatttgagtaagaataagaccgaaattatcactctggtatccgatgatatctctaaacttcaatctgttaagattaatttcgaatttgtatgtttgggagaattaaatccagacatcactcttcgaaaagaaacagataggtatgtagtagatataatagtcaatagattatacatcaagagagcagaaataaccgaattagtcgtcgaatatatgattgaacgatttatctcctttagcgtcattgtaaaggaatggggtatggaaacattcattgaggatgaggataatattagatttactgtctacctaaatttcgttgaaccggaagaattgaatcttagtaagtttatgatggttcttccgggtgccgccaacaagggaaagattagtaaattcaagattcctatctctgactatacgggttatgacgacttcaatcaaacaaaaaagctcaataagatgactgtagaactcatgaatctaaaagaattgggttctttcgatttggaaaacgtcaacgtgtatcctggagtatggaatacatacgatatcttcggtatcgaggccgctcgtgaatacttgtgcgaagccatgttaaacacctatggagaagggttcgattatctgtatcagccttgtgatcttctcgctagtttactatgtgctagttacgaaccagaatcagtgaataaattcaagttcggcgcagctagtactcttaagagagctacgttcggagacaataaagcattgttaaacgcggctcttcataaaaagtcagaacctattaacgataatagtagctgccacttttttagcaaggtccctaatataggaactggatattacaaatactttatcgacttgggtcttctcatgagaatggaaaggaaactatctgataagatatcttctcaaaagatcaaggaaatggaagaaacagaagacttttaattcttatcaataacatatttttctatgatctgtcttttaaacgatggattttccacaaatgcgcctctcaagtccctcatagaatgatacacgtataaaaaatatagcataggcaatgactccttatttttagacattagatatgccaaaatcatagccccgcttctatttactcccgcagcacaatgaaccaacacgggctcgtttcgttgatcacatttagataaaaaggcggttacgtcgtcaaaatatttactaatatcggtagttgtatcatctaccaacggtatatgaataatattaatattagagttaggtaatgtatatttatccatcgtcaaatttaaaacatatttgaacttaacttcagatgatggtgcatccatagcatttttataatttcccaaatacacattattggttacccttgtcattatagtgggagatttggctttgtgcatatctccagttgaacgtagtagtaagtatttatacaaacttttcttatccatttataacgtacaaatggataaaactactttatcggtaaacgcgtgtaatttagaatacgttagagaaaaggctatagtaggcgtacaagcagccaaaacatcaacacttatattctttgttattatattggcaattagtgcgctattactctggtttcagacgtctgataatccagtctttaatgaattaacgagatatatgcgaattaaaaatacggttaacgattggaaatcattaacggatagcaaaacaaaattagaaagtgatagaggtagacttctagccgctggtaaggatgatatattcgacttcaaatgtgtggatttcggcgcctattttatagctatgcgattggataagaaaacatatctgccgcaagctattaggcgaggtactggagacgcgtggatggttaaaaaggcggcaaaggtcgatccatctgctcaacaattttgtcagtatttgataaaacacaagtctaataatgttattacttgtggtaatgagatgttaaatgaattaggttatagcggttattttatgtcaccgcattggtgttccgattttagtaatatggaatagtgttagataaatgcggtaacgaatgttcctgtaaggaaccataacagcttagatttaacgttaaagatgagcataaacataataaacaaaattacaatcaaacttataacattaatatcaaacaatccaaaaaatgaaatcagtggagtagtaaacgcgtacataactcctggataacgtttagcagctgccgttcctattctagaccaaaaatttggtttcatgttttcgaaacggtattctgcaacaagtcggggatcgtgttctacatatttggcggcattatccagtatctgcctattgatcttcatttcgttttcgattctggctatttcaaaataaaatcccgatgatagacctccagactttataatttcatctacgatgttcagcgccgtagtaactctaataatataggctgataagctaacatcataccctcctgtatatgtgaatatggcatgatttttgtccattacaagctcggttttaactttattgcctgtaataatttctctcatctgtaggatatctatttttttgtcatgcattgccttcaagacgggacgaagaaacgtaatatcctcaataacgttatcgttttctacaataactacatattctacctttttattttctaactcggtaaaaaaattagaatcccatagggctaaatgtctagcgatatttcttttcgtttcctctgtacacatagtgttacaaaaccctgaaaagaagtgagtatacttgtcatcatttctaatgtttcctccagtccactgtataaacgcataatccttgtaatgatctggatcatccttgactaccacaacatttcttttttctggcataacttcgttgtcctttacatcatcgaacttctgatcattaatatgctcatgaacattaggaaatgtttctgatggaggtctatcaataactggcacaacaataacaggagttttcaccgccgccatttagttattgaaattaatcatatacaactctttaatacgagttatattttcgtctatccattgtttcacatttacatatttcgacaaaaagatataaaatgcgtattccaatgcttctctgtttaatgaattactaaaatatacaaacacgtcactgtctggcaataaatgatatcttagaatattgtaacaatttattttgtattgcacatgttcgtgatctatgagttcttcttcgaatggcataggatctccgaatctgaaaacgtataaataggagttagaataataatatttgagagtattggtaatatataaactctttagcggtataattagtttttttctctcaatttctatttttagatgtgatggaaaaatgactaattttgtagcattagtatcatgaactctaatcaaaatcttaatatcttcgtcacacgttagctctttgaagtttttaagagatgcatcagttggttctacagatggagtaggtgcaacaattttttgttctacacatgtatgtactggagccattgttttaactataatggtgcttgtatcgaaaaactttaatgcagatagcggaagctcttcgccgcgactttctacgtcgtaattgggttctaacgccgatctctgaatggatactagttttctaagttctaatgtgattctctgaaaatgtaaatccaattcctccggcattatagatgtgtatacatcggtaaataaaactatagtatccaacgatcccttctcgcaaattctagtcttaaccaaaaaatcgtatataaccacggagatggcgtatttaagagtggattcttctaccgttttgttcttggatgtcatataggaaactataaagtccgcactactgttaagaatgattactaacgcaactatatagttcaaattaagcattttggaaacataaaataactctgtagacgatacttgactttcgaataagtttgcagacaaacgaagaaagaacagacctctcttaatttcagaagaaaactttttttcgtattcctgacgtctagagtttatatcaataagaaagttaagaattagtcggttaatgttgtatttcattacccaagtttgagatttcataatattatcaaaagacatgataatattaaagataaagcgctgactatgaacgaaatagctatatggttcgctcaagaatatagtcttgttaaacgtggaaacgataactgtatttttaatcacgtcagcggcatctaaattaaatataggtatatttattccacacactctacaatatgccacaccatcttcataataaataaattcgttagcaaaattattaattttagtgaaatagttagcgtcaactttcatagcttccttcaatctaatttgatgctcacacggtgcgaattccactctaacatcccttttccatgcctcaggttcatcgatctctataatatctagttttttgcgtttcacaaacacaggctcgtctctcgcgatgagatctgtatagtaactatgtaaatgataactagatagaaagatgtagctatatagatgacgatcctttaagagaggtataataactttaccccaatcagatagactgttgttatggtcttcggaaaaagaatttttataaatttttccagtattttccaaatatacgtacttaacatctaaaaaatccttaatgataataggaatggataatccgtctattttataaagaaatacatatcgcacattatacttttttttggaaatgggaataccgatgtgtctacataaatatgcaaagtctaaatattttttagagaatcttagttggtccaaattcttttccaagtacggtaatagatttttcatattgaacggtatcttcttaatctctggttctagttccgcattaaatgatgaaactaagtcactatttttataactaacgattacatcacctctaacatcatcatttaccagaatactgatcttcttttgtcgtaaatacatgtctaatgtgttaaaaaaaagatcatacaagttatacgtcatttcatctgtggtattcttgtcattgaaggataaactcgtactaatctcttctttaacagcctgttcaaatttatatcctatatacgaaaaaatagcaaccagtgtttgatcatccgcgtcaatattctgttctatcgtagtgtataacaatcgtatatcttcttctgtgatagtcgatacgttataaaggttgataacgaaaatatttttatttcgtgaaataaagtcatcgtaggattttggacttatattcgcgtctagtagatatgcttttatttttggaatgatctcaattagaatagtctctttagagtccatttaaagttacaaacaactaggaaattggtttatgatgtataatttttttagtttttatagattctttattctatacttaaaaaatgaaaataaatacaaaggttcttgagggttgtgttaaattgaaagcgagaaataatcataaattatttcattatcgcgatatccgttaagtttgtatcgtaatggcgtggtcaattacgaataaagcggatactagtagcttcacaaagatggctgaaatcagagctcatctaaaaaatagcgctgaaaataaagataaaaacgaggatattttcccggaagatgtaataattccatctactaagcccaaaaccaaacgagccactactcctcgtaaaccagcggctactaaaagatcaaccaaaaaggaggaagtggaagaagaagtagttatagaggaatatcatcaaacaactgaaaaaaattctccatctcctggagtcagcgacattgtagaaagcgtggccgctgtagagctcgatgatagcgacggggatgatgaacctatggtacaagttgaagctggtaaagtaaatcatagtgctagaagcgatctctctgacctaaaggtggctaccgacaatatcgttaaagatcttaagaaaattattactagaatctctgcagtatcgacggttctagaggatgttcaagcagctggtatctctagacaatttacttctatgactaaagctattacaacactatctgatctagtcaccgagggaaaatctaaagttgttcgtaaaaaagttaaaacttgtaagaagtaaatgcgtgcacttttttataaagatggtaaactctttaccgataataattttttaaatcctgtatcagacgataatccagcgtatgaggttttgcaacatgttaaaattcctactcatttaacagatgtagtagtatatgaacaaacgtgggaggaggcgttaactagattaatttttgtgggaagcgattcaaaaggacgtagacaatacttttacggaaaaatgcatgtacagaatcgcaacgctaaaagagatcgtatttttgttagagtatataacgttatgaaacgaattaattgttttataaacaaaaatataaagaaatcgtccacagattccaattatcagttggcggtttttatgttaatggaaactatgttttttattagatttggtaaaatgaaatatcttaaggagaatgaaacagtagggttattaacactaaaaaataaacacatagaaataagtcccgatgaaatagttatcaagtttgtaggaaaggacaaagtttcacatgaatttgttgttcataagtctaatagactatataaaccgctattgaaactgacggatgattctagtcccgaagaatttctgttcaacaaactaagtgaacgaaaggtatatgaatgtatcaaacagtttggtattagaatcaaggatctccgaacgtatggagtcaattatacgtttttatataatttttggacaaatgtaaagtccatatctcctcttccatcaccaaaaaagttaatagcattaactatcaaacaaactgctgaagtggtaggtcatactccatcaatttcaaaaagagcttatatggcaacgactattttagaaatggtaaaggataaaaattttttagatgtagtatctaaaactacgttcgatgaattcctatctatagtcgtagatcacgttaaatcatctacggatggatgatatagatctttacacaaataattacaagaccgataaatggaaatggataagcgtatgaaatctctcgcaatgacagctttcttcggagagctaagcacattagatattatggcattgataatgtctatatttaaacgccatccaaacaataccattttttcagtggataaggatggtcagtttatgattgatttcgaatacgataattataaggcttctcaatatttggatctgaccctcactccgatatctggagatgaatgcaagactcacgcatcgagtatagccgaacaattggcgtgtgtggatattattaaagaggatattagcgaatatatcaaaactactccccgtcttaaacgatttataaaaaaataccgcaatagatcagatactcgcatcagtcgagatacagaaaagcttaaaatagctctagctaaaggcatagattacgaatatataaaagacgcttgttaataagtaaatgaaaaaaaactagtcgtttataataaaacacgatatggatgccaacgtagtatcatcttctactattgcgacgtatatagacgctttagcgaagaatgcttcagaattagaacagaggtctaccgcatacgaaataaataatgaattggaactagtatttattaagccgccattgattactttgacaaatgtagtgaatatctctacgattcaggaatcgtttattcgatttaccgttactaataaggaaggtgttaaaattagaactaagattccattatctaaggtacatggtctagatgtaaaaaatgtacagttagtagatgctatagataacatagtttgggaaaagaaatcattagtgacggaaaatcgtcttcacaaagaatgcttgttgagactatcgacagaggaacgtcatatatttttggattacaagaaatatggatcctctatccgactagaattagtcaatcttattcaagcaaaaacaaaaaactttacgatagactttaagctaaaatattttctaggatccggtgcccaatctaaaagttctttgttgcacgctattaatcatccaaagtcaaggcctaatacatctctggaaatagaattcacacctagagacaatgaaacagttccatatgatgaactaataaaggaattgacgactctctcgcgtcatatatttatggcttctccagagaatgtaattctttctccgcctattaacgcgcctataaaaacctttatgttgcctaaacaagatatagtaggtttggatctggaaaatctatatgccgtaactaagactgacggcattcctataactatcagagttacatcaaacgggttgtattgttattttacacatcttggttatattattagatatcctgttaagagaataatagattccgaagtagtagtctttggtgaggcagttaaggataagaactggaccgtatatctcattaagctaatagagcctgtgaatgcaatcaatgatagactagaagaaagtaagtatgttgaatctaaactagtggatatttgtgatcggatagtattcaagtcaaagaaatacgaaggtccgtttactacaactagtgaagtcgtcgatatgttatctacatatttaccaaagcaaccagaaggtgttattctgttctattcaaagggacctaaatctaacattgattttaaaattaaaaaggaaaatactatagaccaaactgcaaatgtagtatttaggtacatgtccagtgaaccaattatctttggagaatcgtctatctttgtagagtataagaaatttagcaacgataaaggctttcctaaagaatatggttctggtaagattgtgttatataacggcgttaattatctaaataatatctattgtttggaatatattaatacacataatgaagtgggtattaagtccgtggttgtacctattaagtttatagcagaattcttagttaatggagaaatacttaaacctagaattgataaaaccatgaaatatattaactcagaagattattatggaaatcaacataatatcatagtcgaacatttaagagatcaaagcatcaaaataggagatatctttaacgaggataaactatcggatgtgggacatcaatacgccaataatgataaatttagattaaatccagaagttagttattttacgaataaacgaactagaggaccgttgggaattttatcaaactacgtcaagactcttcttatttctatgtattgttccaaaacatttttagacgattccaacaaacgaaaggtattggcgattgattttggaaacggtgctgacctggaaaaatacttttatggagagattgcgttattggtagcgacggatccggatgctgatgctatagctagaggaaatgaaagatacaacaaattaaactctggaattaaaaccaagtactacaaatttgactacattcaggaaactattcgatccgatacatttgtctctagtgtcagagaagtattctattttggaaagtttaatatcatcgactggcagtttgctatccattattcttttcatccgagacattatgctaccgtcatgaataacttatccgaactaactgcttctggaggcaaggtattaatcactaccatggacggagacaaattatcaaaattaacagataaaaagacttttataattcataagaatttacctagtagcgaaaactatatgtctgtagaaaaaatagctgatgatagaatagtggtatataatccatcaacaatgtctactccaatgactgaatacattatcaaaaagaacgatatagtcagagtgtttaacgaatacggatttgttcttgtagataacgttgatttcgctacaattatagaacgaagtaaaaagtttattaatggcgcatctacaatggaagatagaccgtctacaaaaaactttttcgaactaaatagaggagccattaaatgtgaaggtttagatgtcgaagacttacttagttactatgttgtttatgtcttttctaagcggtaaataataatatggtatgggttctgatatccccgttctaaatgcattaaataattccaatagagcgatttttgttcctataggaccttccaactgtggatactctgtattgttaatagatatattaatacttttgtcgggtaacagaggttctacgtcttctaaaaataaaagttttataacatctggcctgttcataaataaaaacttggcgattctatatatactcttattatcaaatctagccattgtcttatagatgtgagctactgtaggtgtaccatttgattttctttctaatactatatatttctctcgaagaagttcttgcacatcatctgggaataaaatactactgttgagtaaatcagttattttttttatatcgatattgatggacatttttatagttaaggataataagtatcccaaagtcgataacgacgataacgaagtatttatacttttaggaaatcacaatgactttatcagattaaaattaacaaaattaaaggagcatgtatttttttctgaatatattgtgactccagatacatatggatctttatgcgtcgaattaaatgggtctagttttcagcacggtggtagatatatagaggtggaggaatttatagatgctggaagacaagttagatggtgttctacatccaatcatatatctaaagatatacccgaagatatgcacactgataaatttgtcatttatgatatatacacttttgacgctttcaagaataaacgattggtattcgtacaggtacctccgtcgttaggagatgatagtcatttgactaatccgttattgtctccgtattatcgtaattcagtagccagacaaatggtcaataatatgatttttaatcaagattcatttttaaaatatttattagaacatctgattagaagccactatagagtttctaaacatataacaatagttagatacaaggataccgaagaattaaatctaacgagaatatgttataatagagataagtttaaggcgtttgtattcgcttggtttaacggcgtttcggaaaatgaaaaggtactagatacgtataaaaaggtatctaatttgatataatgaattcagtgactgtatcacacgcgccatatactattacttatcacgatgattgggaaccagtaatgagtcaattggtagagttttataacgaagtagccagttggctgctacgagacgagacgtcgcctattcctgataagttctttatacagttgaaacaaccgcttagaaataaacgagtatgtgtgtgcggtatagatccgtatccgaaagatggaactggtgtaccgttcgaatcaccaaattttacaaaaaaatcaattaaggagatagcttcatctatatctagattaaccggagtaattgattataaaggttataaccttaatataatagacggggttataccctggaattattacttaagttgtaaattaggagaaacaaaaagtcacgcgatctactgggataagatttccaagttactgctgcagcatataactaaacacgttagtgttctttattgtttgggtaaaacagatttctcgaatatacgggcaaagttagaatccccggtaactaccatagtcggatatcatccagcggctagagaccgccaattcgagaaagatagatcatttgaaattatcaacgttttactggaattagacaacaaggcacctataaattgggctcaagggtttatttattaatgctttagtgaaattttaacttgtgttctaaatggatgcggctattagaggtaatgatgttatctttgttcttaagactataggtgtcccgtcagcgtgcagacaaaatgaagatccaagatttgtagaagcatttaaatgcgacgagttagaaagatatattgagaataatccagaatgtacactattcgaaagtcttagggatgaggaagcatactctatagtcagaattttcatggatgtagatttagacgcgtgtctagacgaaatagattatttaacggctattcaagattttattatcgaggtgtcaaactgtgtagctagattcgcgtttacagaatgcggtgccattcatgaaaatgtaataaaatccatgagatctaatttttcattgactaagtctacaaatagagataaaacaagttttcatattatctttttagacacgtataccactatggatacattgatagctatgaaacgaacactattagaattaagtagatcatctgaaaatccactaaccagatcgatagacactgccgtatataggagaaaaacaactcttcgggttgtaggtactaggaaaaatccaaattgcgacactattcatgtaatgcaaccaccgcatgataatatagaagattacctattcacttacgtggatatgaacaacaatagttattacttttctctacaacaacgattggaggatttagttcctgataagttatgggaaccagggtttatttcattcgaagacgctataaaaagagtttcaaaaatattcattaattctataataaactttaatgatctcgatgaaaataattttacaacggtaccactggtcatagattacgtaacaccttgtgcattatgtaaaaaacgatcgcataaacatccgcatcaactatcgttggaaaatggtgctattagaatttacaaaactggtaatccacatagttgtaaagttaaaattgttccgttggatggtaataaactgtttaatattgcacaaagaattttagacactaactctgttttattaaccgaacgaggagaccatatagtttggattaataattcatggaaatttaacagcgaagaacccttgataacaaaactaattttgtcaataagacatcaactacctaaggaatattcaagcgaattactctgtccgaggaaacgaaagactgtagaagctaacatacgagacatgttagtagattcagtggagaccgatacctatccggataaacttccgtttaaaaatggtgtattggacctggtagacggaatgttttactctggagatgatgctaaaaaatatacgtgtactgtatcaaccggatttaaatttgacgatacaaagttcgtcgaagacagtccagaaatggaagagttaatgaatatcattaacgatatccaaccattaacggatgaaaataagaaaaatagagagctatatgaaaaaacattatctagttgtttatgcggtgctaccaaaggatgtttaacattcttttttggagaaactgcaactggaaagtcgacaaccaaacgtttgttaaagtctgctatcggtgacctgtttgttgagacgggtcaaacaattttaacagatgtattggataaaggacctaatccatttatcgctaacatgcatttgaaaagatctgtattctgtagcgaactacctgattttgcatgtagtgggtcaaagaaaatcagatctgataatattaaaaagttgacagaaccttgtgtcattggaagaccgtgtttctccaataaaattaataatagaaaccatgcgacaatcattatcgatactaattacaaacctgtttttgataggatagataacgcattaatgagaagaattgccgtcgtgcgattcagaacacacttttctcaaccttctggtagagaggctgctgaaaataatgacgcgtacgataaagtcaaactattagacgaggggttagatggtaaaatacaaaataatagatatagattcgcatttctatacttgttggtgaaatggtacagaaaatatcatgttcctattatgaaactatatcctacacccgaagagattcctgactttgcattctatctcaaaataggtactctgttagtatctagctctgtaaagcatattccattaatgacggacctctccaaaaagggatatatattgtacgataatgtggttactcttccgttgactactttccaacagaaaatatccaagtattttaattctagactatttggacacgatatagagagcttcatcaatagacataagaaatttgccaatgttagtgatgaatatctgcaatatatattcatagaggatatttcatctccgtaaatatatgctcatatatttatagaagatatcacatatctaaatgaataccggaatcatagatttatttgataatcatgttgatagtataccaactatattacctcatcagttagctactctagattatctagttagaactatcatagatgagaacagaagcgtgttattgttccatattatgggatcaggtaaaacaataatcgctttgttgttcgccttggtagcttccagatttaaaaaggtttacattctagtgccgaacatcaacatcttaaaaattttcaattataatatgggtgtagctatgaacttgtttaatgacgaattcatagctgagaatatctttattcattccacaacaagtttttattctcttaattataacgataacgtcattaattataacggattatctcgctacaataactctatttttatcgttgatgaggcacataatatctttgggaataatactggagaacttatgaccgtgataaaaaataaaaacaagattccttttttactattgtctggatctcccattactaacacacctaatactctgggtcatattatagatttaatgtccgaagagacgatagattttggtgaaattattagtcgtggtaagaaagtaattcagacacttcttaacgaacgcggtgtgaatgtacttaaggatttgcttaaaggaagaatatcatattacgaaatgcctgataaagatctaccaacgataagatatcacggacgtaagtttctagatactagagtagtatattgtcacatgtctaaacttcaagagagagattatatgattactagacgacagctatgttatcatgaaatgtttgataaaaatatgtataacgtgtcaatggcagtattgggacaacttaatctgatgaataatttagatactttatttcaggaacaggataaggaattgtacccaaatctgaaaataaataatggcgtgttatacggagaagaattggtaacgttaaacattagttccaaatttaaatactttattaatcggatacagacactcaacggaaaacattttatatacttttctaattctacatatggcggattggtaattaaatatatcatgctcagtaatggatattctgaatataatggttctcagggaactaatccacatatgataaacggcaaaccaaaaacatttgctatcgttactagtaaaatgaaatcgtctttagaggatctattagatgtgtataattctcctgaaaacgatgatggtagtcaattgatgtttttgttttcatcaaacattatgtccgaatcctatactctaaaagaggtaaggcatatttggtttatgactatcccagatactttttctcaatacaaccaaattcttggacgatctattagaaaattctcttacgccgatatttctgaaccagttaatgtatatcttttagccgccgtatattccgatttcaatgacgaagtgacgtcattaaacgattacacacaggatgaattaattaatgttttaccatttgacatcaaaaagctgttgtatctaaaatttaagacgaaagaaacgaatagaatatactctattcttcaagagatgtctgaaacgtattctcttccaccacatccatcaattgtaaaagttttattgggagaattggtcagacaatttttttataataattctcgtattaagtataacgataccaagttacttaaaatggttacatcagttataaaaaataaagaagacgctaggaattacatagatgatattgtaaacggtcacttctttgtatcgaataaagtatttgataaatctcttttatacaaatacgaaaacgatattattacagtaccgtttagactttcctacgaaccatttgtttggggagttaactttcgtaaagaatataacgtggtatcttctccataaaactgatgagatatataaagaaataaatgtcgagctttgttaccaatggatacctttccgttacattggaaccacacgagctgacgttagacataaaaactaatattaggaatgccgtatataagacgtatctccatagagaaattagtggtaaaatggccaagaaaatagaaattcgtgaagacgtggaattacctctcggcgaaatagttaataattctgtagttataaacgttccgtgtgtaataacctacgcgtattatcacgttggggatatagtcagaggaacattaaacatcgaagatgaatcaaatgtaactattcaatgtggagatttaatctgtaaactaagtagagattcgggtactgtatcatttagcgattcaaagtactgcttttttcgaaatggtaatgcgtatgacaatggcagcgaagtcactgccgttctaatggaggctcaacaaggtatcgaatctagttttgtttttctcgcgaatatcgtcgactcataaaaaagagaatagcggtaagtataaacacgaatactatggcaataattgcgaatgttttattctcttcgatatatttttgataatatgaaaaacatgtctctctcaaatcggacaaccatctcataaaatagttctcgcgcgctggagaggtagttgccgctcgtataatctctccagaataatatacttgcgtgtcgtcgttcaatttatacggatttctatagttctctgttatataatgcggtttgccctcatgattagacgacgacaatagtgttctaaatttagatagttgatcagaatgaatgtttattggcgttggaaaaattatccatacagcgtctgcagagtggttgatagttgttcctagatatgtaaaataatccaacttactaggcagcaaattgtctagataaaatactgaatcaaacggtgcagacgtattggcggatctaatggaatccaattgattaactatcttttgaaaatatacatttttatgatccaatacttgtaagaatatagaaataatgataagtccatcatcgtgtttttttgcctcttcataagaactatattttttcttattccaatgaacaagattaatctctccagagtatttgtacacatctatcaagtgattggatccataatcgtcttcctttccccaatatatatgtagtgatgataacacatattcattggggagaaaccctccacttatatatcctcctttaaaattaatccttactagttttccagtgttctggatagtggttggtttcgactcattataatgtatgtctaacggcttcaatcgcgcgttagaaattgcttttttagtttctatattaataggagatagttgttgcggcatagtaaaaatgaaatgataactgtttaaaaatagctcttagtatgggaattacaatggatgaggaagtgatatttgaaactcctagagaattaatatctattaaacgaataaaagatattccaagatcaaaagacacgcatgtgtttgctgcgtgtataacaagtgacggatatccgttaataggagctagaagaacttcattcgcgttccaggcgatattatctcaacaaaattcagattctatctttagagtatccactaaactattacggtttatgtactacaatgaactaagagaaatctttagacggttgagaaaaggttctatcaacaatatcgatcctcactttgaagagttaatattattgggtggtaaactagataaaaaggaatctattaaagattgtttaagaagagaattaaaagaggaaagtgatgaacgtataacagtaaaagaatttggaaatgtaattctaaaacttacaacacgggataaattatttaataaagtatatataagttattgcatggcgtgttttattaatcaatcgttggaggatttatcgcatactagtatttacaatgtagaaattagaaagattaaatcattaaatgattgtattaacgacgataaatacgaatatctgtcttatatttataatatgctagttaatagtaaatgaacttttacagatctagtataattagtcagattattaagtataatagacgactagctaagtctattatttgcgaggatgactctcaaattattacactcacggcattcgttaaccaatgcctatggtgtcataaacgagtatccgtgtccgctattttattaactactgataacaaaatattagtatgtaacagacgagatagttttctctattctgaaataattagaactagaaacatgtttagaaagaaacgattatttctgaattattccaattatttgaacaaacaggaaagaagtatactatcgtcatttttttctctagatccagctactactgataatgatagaatagatgctatttatccgggtggcatacccaaaaggggtgagaatgttccagagtgtttatccagggaaattaaagaagaagttaatatagacaattcttttgtattcatagacactcggttttttattcatggcatcatagaagataccattattaataaattttttgaggtaatcttctttgtcggaagaatatctctaacgagtgatcaaatcattgatacatttaaaagtaatcatgaaatcaaggatctaatatttttagatccgaattcaggtaatggactccaatacgaaattgcaaaatatgctctagatactgcaaaacttaaatgttacggccatagaggatgttattatgaatcattaaaaaaattaactgaggatgattgattagaaaatataaattaatttaccatcgtgtatttttataacgggattgtccggcatatcatgtagatagttaccgtctacatcgtatactcgaccatctacgcctttaaatcctctatttattgacattaatctattagaattggaataccaaatattagtaccctcaattagtttattggtaatattttttttagacgatagatcgatggctcttgaaaccaaggttttccaaccggactcattgtcgatcggtgagaagtctttttcattagcatgaatccattctaatgatgtatgtttaaacactctaaacaattggacaaattcttttgatttgctttgaatgatttcaaataggtcttcgtctacagtaggcataccattagataatctagccattataaagtgcacgtttacatatctacgttctggaggagtaagaacgtgactattgagacgaatggctcttcctactatctgacgaagagacgcctcgttccatgtcatatctaaaatgaagatatcattaattgagaaaaaactaataccctcgcctccactagaagagaatacgcatgttttaatgcattctccgttagtgtttgattcttggttaaactcagccaccgccttgattctagtatcttttgttctagatgagaactctatattagagataccaaagactttgaaatatagtaataagatttctattcctgactgattaacaaatggttcaaagactagacatttaccatgggatgctaatattcccaaacatacatctataaatttgacgcttttctcttttaattcagtaaatagagagatatcagccgcactagcatcccctttcaatagttctccctttttaaaggtatctaatgcggatttagaaaactctctatctcttaatgaatttttaaaatcattatatagtgttgctatctcttgcgcgtattcgcccggatcacgattttgtctttcaggaaagctatcgaacgtaaacgtagtagccatacgtctcagaattctaaatgatgatatacctgtttttatttcagcgagtttagccttttgataaatttcttcttgctttttcgacatattaacgtatcgcattaatactgttttcttagcgaatgatgcagacccttctacgtcatcaaaaatagaaaactcgttattaactatatacgaacatagtcctcctagtttggagactaattctttttcatcgactagacgtttattctcaaatagtgattggtgttgtaaggatcctggtcgtagtaagttaaccaacatggtgaattcttgcacactattgacgataggtgtagccgataaacaaatcatcttatggttttttaacgcaatggtcttagataaaaaattatatactgaacgagtaggacggatcttaccatcttctttgattaatgatttagaaatgaagttatgacattcatcaatgatgacgcatattctactcttggaattaatagttttgatattagtaaaaaatttatttctaaaattttgatcatcgtaattaataaaaatacaatccttcgttatctctggagcgtatctgagtatagtgttcatccaaggatcttctatcaaagcctttttcaccaataagataatagcccaattcgtataaatatccttaagatgtttgagaatatatacagtagtcattgttttaccgacacccgtttcatggaacaataaaagagaatgcatactgtctaatcctaagaaaactcttgctacaaaatgttgataatccttgaggcgtactacgtccgaccccatcatttcaacgggcatattagtagttctgcgtaaggcataatcgatataggccgcgtgtgatttactcatttatgagtgataagtaataactatgttttaaaaatcacagcagtagtttaactagtcttctctgatgtttgttttcgatactttttgaatcagaagtcatactagaataaagcaacgagtgaacgtaatagagagcttcgtatactctattcgaaaactctaagaacttattaatgaattccgtatccactggattgtttaaaatactaaattgaacactgttcacatccttccaagaagaagacttagtgacggacttaacatgagacataaataaatccaaattttttttacaaacatcactagccaccataatggcgctatctttcaaccagctatcgcttacgcattttagcagtctaacatttttaaagagactacaatatattctcatagtatcgattacacctctaccgaataaagttggaagtttaataatacaatatttttcgtttacaaaatcaaataatggtcgaaacacgtcgaaggttaacatcttataatcgctaatgtatagattgttttcagtgagatgattattagatttaatagcatctcgttcacgtttgaacagtttattgcgtgcgctgaggtcggcaactacggcgtccgctttagtactcctcccataatactttacgctattaatctttaaaatttcatagactttatctagatcgctttctggtaacatgatatcatgtgtaaaaagttttaacatgtcggtcggcattctatttagatcattaactctagaaatctgaagaaagtaattagctccgtattccagactaggtaatgggcttttacctagagacagattaagttctggcaatgtttcataaaatggaagaaggacatgcgttccctcccggatattttttacaatttcatccatttacaactctatagtttgttttcattattattagttattatctcccataatcttggtaatacttaccccttgatcgtaagataccttatacaggtcattacatacaactaccaattgtttttgtacataatagattggatggttgacatccatggtggaataaactactcgaacagatagtttatctttccccctagatacattagccgtaatagttgtcggcctaaagaatatctttggtgtaaagttaaaagttagggttcttgttccattattgctttttgtcagtagttcattataaattctcgagatgggtccgttctctgaatatagaacatcatttccaaatctaacttctagtctagaaataatatcggtcttattcttaaaatctattcccttgatgaagggatcgttaatgaacaaatccttggcctttgattcggctgatctattatctccgttatagacgttacgttgactagtccaaagacttacaggaatagatgtatcgatgatgttgatactatgtgatatgtgagcaaagattgttctcttagtggcatcactatatgttccagtaatggcggaaaactttttagaaatgttatatataaaagaattttttcgtgttccaaacattagcagattagtatgaagataaacactcatattatcaggaacattatcaatttttacatacacatcagcatcttgaatagaaacgataccatcttctggaacctctacgatctcggcagactccggataaccagtcggtgggccatcgctaacaataactagatcatccaacaatctactcacatatgcatctatataatctttttcatcttgtgagtaccctggatacgaaataaatttattatccgtatttccataataaggtttagtataaacagagagagatgttgccgcatgaacttcagttacagtcgccgttggttggtttatttgacctattactctcctaggtttctctataaacgatggtttaatttgtacattcttaaccatatatccaataaagctcaattcaggaacataaacaaattctttgttgaacgtttcaaagtcgaacgaagagtcacgaataacgatatcggatactggattgaaggttaccgttacggtaatttttgaatcggatagtttaagactgctgaatgtatcttccacatcaaacggagttttaatataaacgtatactgtagatggttctttaatagtgtcattaggagttaggccaatagaaatatcattaagttcactagaatatccagagtgtttcaaagcaattgtattattgatacaattattatataattcttcgccctcaatttcccaaataacaccgttacacgaagagatagatacgtgattaatacatttatatccaacatatggtacgtaactgaatcttcccatacctttaacttctggaagttccaaactcagaaccaaatgattaagcgcagtaatatactgatccctaatttcgaagctagcgatagcctgattgtctggaccatcgtttgtcataactccggatagagaaatatattgcggcatatataaagttggaatttgactatcgactgcgaagacattagaccgtttaatagagtcatccccaccgatcaaagaattaatgatagtattattcattttctatttaaaatggaaaaagcttacaataaactccgtagagaaatatctataatttgtgagttttccttaaagtaacagcttccgtaaacgccgtctttatctcttagtaggtttattgtatttatgaccttttccttatcttcatagaatactaaaggcaacaaagaaatttttggttcttctctaagagctacgtgagacttaaccatagaagccaacgaatccctacatattttagaacagaaataccctacttcaccacccttgtatgtctcaatactaataggtctaaaaaccaaatcttgattacaaaaccaacacttatcaattacactatttgtcttaatagacacatctgccatagatttataatactttggtagtatacaagcgagtgcttcttctttagcgggcttaaagactgctttaggtgctgaaataaccacatctggaaggcttactcgcttagccatttaattacggaactatttttttatacttctaatgagcaagtagaaaacctctcatctacaaaaacgtactcgtgtccataatcctctaccatagttacacgttttttagatctcatatgtgctaaaaagttttcccatactaattggttactattatttttcgtataatttttaacagtttgaggttttagatttttagttacagaagtgatatcgaatattttatccaaaaagaatgaataattaattgtcttagaaggagtgttttcttggcaaaagaataccaagtgcttaaatatttctactacttcattaatcttttctgtactcagattcagtttctcatcttttacttgattgattatttcaaagactaacttataatcctttttatttattctctcgttagccttaagaaaactagatacaaaatttgcatctacatcatccgtggatatttgatttttttccatgatatccaagagttccgagataatttctccagaacattgatgagacaataatctccgcaatacatttctcaaatgaataagtttattagacacgtggaagtttgactttttttgtacctttgtacatttttgaaataccgactcgcaaaaaatacaatattcatatccttgttcagatactataccgttatgtctacaaccgctacataatcgtagattcatgttaacactctacgtatctcgtcgtccaatattttatataaaaacattttatttctagacgttgccagaaaatcctgtaatatttttagttttttgggctgtgaataaagtatcgccctaatattgttaccgtcttccgccaatatagtagttaaattatccgcacatgcagaagaacaccgcttaggcggattcagtacaatgttatatttttcgtaccaactcatttaaatatcataatctaaaatagttctgtaatatgtctagcgctaatatattgatcataatcctgtgcataaattaagatacaacaatgtctcgaaatcatcgacatggcttcttccatagttagaagatcgtcgtcaaagttagcaacgtgattcatcaacatttgctgttttgaggcagcaaatactgaaccgtcgccattcaaccattcataaaaaccatcgtctgaatccattgataatttcttgtactggtttttgagagctcgcatcaatctagcatttctagctcccggattgaaaacagaaagaggatcgtacatccagggtccattttctgtaaatagaatcgtataatgtcccttcaagaagatatcagacgatccacaatcaaagaattggtctccgagtttgtaacaaactgcggactttaacctatacatgataccgtttagcataatttctggtgatacgtcaatcggagtatcatctattagagatctaaagccggtgtaacattctccaccaaacatattcttattctgacgtcgttctacataaaacatcattgctccattaacgataacaggggaatgaacagcactacccatcacattagttcccaatggatcaatgtgtgtaactccagaacatcttccatagcctatgttaggaggagcgaacaccactcttccactattgccatcgaatgccatagaataaatatccttggaattgatagaaatcggactgtcggatgttgtgatcatcttcataggattaacaactatgtatggtgccgcctgaagtttcatatcgtaactgatgccgtttataggtctagccacagaaaccaacgtaggtctaaatccaactatagacaaaatagaagccaatatctgttcctcatctgtcataacttgagagcatccagtatgaataatcttcattagatggggatctaccgcatcatcatcgttacaataaaaaattcccattctaatgttcataattgcttttctaatcatggtatgcatgtttgctctctgaatctctgtggaaattagatctgatacacctgtaatcactatcggattatcctccgtaagacgattaaccaacaacatataattataagactttacttttctaaattcataaagttgctggattaggctataggtgtctccatgtacatacgcgttctcgagcgcaggaagtttaataccgaatagtgccatcagaataggatgaatatagtaattagtttctggttttctataaataaaagacaaatcttgtgaactagacatatcggtaaaatgcatggattggaatcgtgtagtcgacagaagaatatgatgattagatggagagtatattttatctaactctttgagttggtcaccgattctaggactagctcgagaatgaataagtactaaaggatgagtacatttcacagaaacactagcattgttcaatgtgctctttacatgggtaaggagttgaaatagctcgtttctatttgttctgacaatatttagtttattcataatgttaagcatatcctgaatagtaaagttagatgtgtcatacttgttagtagttagatatttagcaattgcattcccatcatttctcaatctcgtactccaatcatgcgtggatgctacttcgtcgatggaaaccatacaatcctttttgataggctgttgagattgattatttcctgcacgtttaggtttggtacgttgatttctagcccctgcggatataaagtcatcgtctacaatttgggacaatgaattgcatacactacaagacaaagatttatcagaagtgtgaatatgatcttcatctaccaaagaaagagtttgattagtataactagattttagtcctgcgttagatgttaaaaaaacatcgctattgaccacggcttccattatttatattcgtagtttttactcgaaagcgtgattttaatatccaatcttattacttttggaatcgttcaaaacctttgactaattgtagaatttgatctattgccctacgcgtatactcccttgcatcatatacgttcgtcaccagatcgtttgtttcggcctgaagttggtgcatatctctttcaacattcgacatgagatccttaagggccatatcgtctagattttgttgagatgctgctcctggatttggattttgttgtgctgttgtacatactgtaccaccagtaggtgtaggagtacatacagtggccacaataggaggttgaggaggtgtaaccgttggagtagtacaagaaatatttccatccgattgttgtgtacatgtagttgttggtaacgtctgagaaggttgggtagatggcggtgtcgtcgtcttttgatctttattaaatttagagataatatcctgaacagcattgctcggcgtcaacgctggaaggagtgaactcgccggcgcatcagtatctgcagacagccaatcaaaaagattagacatatcagatgatgtattagtttgttgtcgtggttttggtgtaggagcagtactactaggtagaagaataggagccggtgtagctgttggaaccggctgtggagttatatgaatagttggttgtagcggttggataggctgtctgctggcggccatcatattatctctagctagttgttctcgcaactgtctttgataatacgactcttgagactttagtcctatttcaatcgcttcatcctttttcgtatccggatccttttcttcagaataatagattgacgactttggtgtagaggattctgccagcctctgtgagaacttgttaaagaagtccatttaaggctttaaaattgaattgcgattataagattaaatggcagacacagacgatattatcgactatgaatccgatgatctcaccgaatacgaggatgatgaagaagaggaagaagatggagagtcactagaaactagtgatatagatcccaaatcttcttataagattgtagaatcagcatccactcatatagaagatgcgcattccaatcttaaacatatagggaatcatatatctgctcttaaacgacgctatactagacgtataagtctatttgaaatagcgggtataatagcagaaagctataacttgcttcaacgaggaagattacctctagtttcagaattttctgacgaaacgatgaagcaaaatatgctacatgtaattatacaagagatagaggagggttcttgtcctatagtcatcgaaaagaacggagaattgttgtcggtaaacgattttgacaaagatggtctaaaattccatctagactatattatcaaaatttggaaacttcaaaaacgatattagaatttatacgaatatcgttctctaaatgtcacaatcaagtctcgcatgttcagcaatttattgtcgtactttatatcgtgttcattaacgatattttgcaaaatagtaatgattctatcttccttcgatagatattcttcagagattattgtcttatattctttcttgttatccgatatgaatttgataagactttgaacattattgatacccgtctgtttaattttttctacagatattttagttttggcagattctatcgtatctgtcaatagacatccaacatcgacattcgacgtcaattgtctataaatcaacgtataaattttagaaataacattagcgaattgttgtgcattgatgtcgttattctgaaacagtatgattttaggtagcattttcttaacaaagagaacgtatttattgttactcagttgaacagatgatatatccagattactaacgcatctgattccgtataccaaactttcagaagaaatggtatacaattgtttgtattcattcaatgtctctttttcagaaattagtttagagtcgaatactgcaataattttcaagagatagttttcatcagataagattttatttagtgtagatatgataaaactattgttttgttggagaacttgatacgccgcgttctctgtagtcgacgctctcaaatgggaaacaatctccattatttttttggaatcggatactatatcttcggtatcttgacgcagtctagtatacatagagttaagagagattagagtttgtacattaagcaacatgtctctaaatgtggctacaaacttttcctttttcacatcatctagtttattatataccgatttcacaacggcaccagatttaaggaaccagaatgaaaaactctgataactacaatatttcatcatagttacgattttatcatcttctatagttggtgtaatagcgcatacctttttctccaagactggaaccaacgtcataaaaatgtttaaatcaaaatccatatcaacatctgatgcgctaagaccagtctcgcgttcaagattatctttactaatggtgacgaactcatcgtataaaactctaagtttgtccattatttatttacagatttagttgtttaatttatttgtgctcttccagagttgggatagtatttttctaacgtcggtattatattattaggatctacgttcatatgtatcataatattaatcatccacgttttgataaatctatctttagcttctgaaataacgtatttaaacaaaggagaaaaatatttagctacggcatcagacgcaataacattttttgtaaatgtaacgtatttagacgacagatcttcgttaaaaagttttccatctatgtagaatccatcggttgttaacaccattcccgcgtcagattgaataggagtttgaatagtttgttttggaaatagatccttcaataacttatagttgggtgggaaaaaatcgattttatcactagactctttcttttttactatcattacctcatgaactatttcttgaatgagtatatgtattttctttcctatatcggacgcgttcattggaaaatataccatgtcgttaactataagaatatttttatcctcgtttacaaactgaataatatcagatgtagttcgtaaacgaactatatcatcaccagcacaacatctaactatatgatatccactagtttcctttagccgtttattatcttgttccatattagcagtcattccatcatttaagaaggcgtcaaagataatagggagaaatgacattttggattctgttacgactttaccaaaattaaggatatacggacttactatctttttctcaacgtcaatttgatgaacacacgatgaaaatgtgcttctatgagattgatcatgtagaaaacaacaagggatacaatatttccgcatatcatgaaatatattaagaaatcccaccttattatatttccccaaaggatccatgcacgtaaacattatgccgttatcattaataaagacttctttctcatcggatctgtaaaagttgttactgatttttttcattccaggatctagataattaataatgatgggttttctattcttattctttgtattttggcatatcctagaccagtaaacagtttccactttggtaaaatcagcagacttttgaacgctattaaacatggcattaatggcaataactaaaaatgtaaaatatttttctatgttaggaatatggtttttcactttaatagatatatggtttttggccaaaatgatagatatttttttatccgaggatagtaaaatattattagtcgccgtctctataaaaatgaagctagtctcgatatccaattttattctagaattgataggagtcgccaaatgtaccttatacgttatatctcccttgatgcgttccatttgtgtatctatatcggacacaagatctgtaaatagttttacgttattaatcatcacggtatcgccgtcgctagataacgctaatgtaccatccaagtcccaaatggagagatttaactgttcatcgtttagaataaaatgattaccggtcatattaataaagtgttcatcgtatctagataacaacgacttataattaatgtccaagtcttgaactcgctgaatgatcttttttaacccagttagttttagattggtacgaaatatattgttaaactttgattctacagtaatgtccaaatctagttgtggaaatacttccatcaacattgtttcaaacttgataatattattatctacatcttcgtacgatccaaattccggaatagatgtatcgcacgctctggccacccagataaccaaaaagtcacacgctccaggatatacattgtataaaaagctatcgttttttagtagggtttttttctgcgtgtatacgaagggattaaaaatagtattatcaacgtaactatattccaaattattcttatgagaatagataataatatcgtccttaatatctaacaaatttcctaaatatccctttaattgagtcattcgaagcgtcaatagaatatgtctcttaactatttccggctgttgtatatttaaatgacttcgtaaaaaataatatatgggcgacttctcatctatgtaatcatatggagtgagatatagggctcgttctacctcctgccccttacccacctgtaataccaattgcggacttactatatatcgcatatttatatcgtggggtaaagtgaaaatctactaccgatgatgtaagtcttacaatgttcgaaccagtaccagatcttaatttggaggcctccgtagaactaggggaggtaaatatagatcaaacaacacctatgataaaggagaatagcggttttatatcccgcagtagacgtctattcgcccatagatctaaggatgatgagagaaaactagcactacgattctttttacaaagactttattttttagatcatagagagattcattatttgttcagatgcgttgacgctgtaaaagacgtcactattaccaaaaaaaataacattatcgtggcgccttatatagcacttttaactatcgcatcaaaaggatgcaaacttacagaaacaatgattgaagcattctttccagaactatataatgaacatagtaagaaatttaaattcaactctcaagtatccatcatccaagaaaaactcggataccagtttggaaactatcacgtttatgattttgaaccgtattactctacagtagctctggctattcgagatgaacattcatctggcatttttaatatccgtcaagagagttatctggtaagttcattatctgaaataacatatagattttatctaattaatctaaaatctgatcttgttcaatggagtgctagtacgggcgctgtaattaatcaaatggtaaatactgtattgattacagtgtatgaaaagttacaactggtcatagaaaatgattcacaatttacatgttcattggctgtggaatcaaaacttccaataaaattacttaaagatagaaatgaattatttacaaaattcattaacgagttaaaaaagaccagttcattcaagataagcaaacgcgataaggatacgctactaaaatattttacttaggactggagttagaatttatagacgactcatttcgtttatcattgttactattattactattactatcattattagtgttggcattattagtattcttcttgtcatcttgttcagaaatatacagcaatgctatacctaatactaaatacattatcatgctcgcaatggctctaacaacaacgaaccaaaatgaatttggtcgtagcttttgttcacaaaaatacataaagaaatgtctacataaatctatggcgccattggctacttgaaatagcgccagtcctcctacagattttaatatagctgtataacatgacatttattcatcatcaaaagagacagagtcaccatctgtcatatttagattttttttcatgtgttcaaagtatcctctactcatttcattataatagtttatcatacttagaattttaggacggatcaatgagtaagacttgactagatcgtcagtagtaatttgtgcatcgtctattctgcatccgcttcgtcgaataatgtatagcatcgctttgagattctccatagctatcaagtctttatacaatgacatggaaatatctgtgaatactttatacttctccaacatcgatgccttaacatcatcgcctactttagcattgaaaatacgttctattgtgtagatggatgtagcaagatttttaaacaacaatgccatcttacacgatgattgcctcaagtctccaatcgtttgtttagaacgattagctacagagtccaatgcttggctgactagcatattattatctttagaaattgtattcttcaatgaggcgtttatcatatctgtgatttcgttagtcatattacagtctgactgggttgtaatgttatccaacatatcacctatggatacggtacacgtaccagcatttgtaataatcctatctaagatgttgtatggcattgcgcagaaaatatcttctcctgtaatatctccactctcgataaatctactcagattattcttaaatgccttattctctggagaaaagatatcagtgtccatcatttcattaatagtatacgcagaaaagataccacgagtatcaattctatccaagatacttatcggttccgagtcacagataatggtttcctctccttcgggagatcctgcatagaaatatctaggacaatagtttctatactgtctgtaactctgataatctctaaagtcactaactgataccatgaaattgagaagatcaaacgctgaagtaattaatttttctgcctcgtttttactacaactagttttcatcaatgtagtgacgatgtattgtttagttacttttggtctaatactgatgatagagatattattgcttcccataatggatcttctagtagtcaccttaaagcccattgatgcgaatagcagatagataaagtcttggtatgactcctttctaatatagtacggactacctttgtcacccaactttatacccacataagccataacaacctctttaatagccgtttcatgaggtttatcagccatgagcctgagtagttggaagaatctcatgaatcccgtctcagaaagtcctatatgcatgatagatttatctttcctgggaaactctcgtatagtcatagatgaaatactctttaaagtttctgaaataagattagtaacagtcttacctccgactactctaggtaacaaacaaactctaataggtgttttctctgcggagataatatcagaaaggatagagcaataagtagtattattgtgattataaagaccgaatacataacaggtagaatttataaacatcatgtcctgaaggtttttagacttgtattcctcgtaatccataccgtcccaaaacatggatttggtaactttgatagccgtagatctttgttccttcgccaacaggttaaagaaattaataaagaatttgttgtttctatttatgtccacaaattgcacgtttggaagcgccacggttacattcactgcagcattttgaggatcgcgagtatgaagtacgatgttattgtttactggtatatctggaaagaaatctaccagtctaggaataagagattgatatcgcatagaaatagtaaagtttataatctcatcatcgaagagcattttgttaccattgtaataaatatccactctgtcatatgtataaatgaagtactgttcaaacatgatgagatgtttatatgttggcatagtagtgagatcgacgtttggtaatggcaatgtattaagattaactccataatgtctagcagcatctgcgatgttataagcgtcgtcaaagcggggtcgatcttgtattgttatatattgtctaacacctataagattatcaaaatcttgtctgcttaatacaccgttaacaatttttgccttgaattcttttattggtgcattaataacatccttatagaggatgttaaacaaataagtgttatcaaagttaagatctggatatttcttttctgctagaacatccattgagtcggagccatctggtttaatataaccaccgataaatctagctctgtattctgtatccgtcaatctaatattaagaaggtgttgagtgaaaggtggaagatcgtaaaagctgtgagtattaatgataggattagtttccgaactaatgttaattggggtattaataatatctatatttccagcgttaagtgtaacattaaacagttttaattcacgtgacgtggtatcaattaaataattaatgcccaatttggatatagcagcctgaagctcatcttgtttagttacggatcctaatgagttattaagcaatatatcgaacggatgaacgaaggttgttttaagttggtcacatactttgtaatctagacatagatgcggaagaacggtagaaactatacgaaataaatattcagagtcctctaattgatcaagagtaactattgacttaataggcatcatttatttagtattaaatgacgaccgtaccagtgacggatatacaaaacgatttaattacagagttttcagaagataattatccatctaacaaaaattatgaaataactcttcgtcaaatgtctattctaactcacgttaacaacgtggtagatagagaacataatgccgccgtagtgtcatctccagaggaaatatcctcacaacttaatgaagatctatttccagatgatgattcaccggccactattatcgaacgagtacaacctcatactactattattgacgatactccacctcctacgtttcgtagagagttattaatatcggaacaacgtcaacaacgagaaaaaagatttaatattacagtatcgaaaaatgctgaagcaataatggaatctagatctatgataacttctataccaacacaaacaccatccttgggagtagtttatgataaagataaaagaattcagatgttagaggatgaagtggttaatcttagaaatcaacgatctaatacaaaatcatctgataatttagataattttaccaaaatactatttggtaagactccgtacaaatcaacagaagttaataagcgtatagccatcgttaattatgcaaatttgaacgggtcccccttatcagtcgaggacttggatgtttgttcggaggatgaaatagatagaatctataaaacgattaaacaatatcacgaaagtagaaaacgaaaaattatcgtcactaacgtgattattattgtcataaacattatcgagcaggcattgctaaaactcggatttgaagaaatcaaaggactgagtaccgatatcacttcagaaattatcgatgtggagatcggagatgactgcgatgctgtagcatctaaactaggaatcggtaacagtccggttcttaatattgtattgtttatactcaagatattcgttaaacgaattaaaattatttaatttaatacattcccatatccagacaacaatcgtctggattaatctgttcctgtcgtctcataccggacgacatattaatctttttattagtgggcatctttttagatggtttctttttcccagcattaactgagtcgatacctagaagatcgtgattgatctctccgaccattccacgaacttctaattggccgtctctgacggtaccataaactattttaccagcattagtaacagcttggacaatctgaccatccatcgcattgtacgatgtagtagtaactgttgttctacgtctaggagcaccagaagtatttttggagcccttggatgttgatgtagaagaagacgaggattttgattttggtttacatgtaatacattttgaactctttgattttgtatcacatgcgccggcagtcacatctgtttgagaattaagattattgttgcctcctttgacggctgcatctccaccgatttgcgctagtagatttttaagctgtggtgtaatcttattaactgtttcgatataatcatcgtaactgcttctaacggctaaattttttttatccgccatttagaagctaaaaatatttttatttatgcagaagatttaactagattatacaatgaactaatatgatccttttccagattatttacaaacttggtattttttggttctggaggaggcgaatttaaattcggacttggattcggattttgtaagttcttgatcttattatacatcgagtataggatggcgacagtaactgctacacaaataccgatcaaaagaagaataccaatcatttattgacaataacttcactattgatcaagtatgcaatatatcatcttttcactaaataagtagtaataatgattcaacaatgtcgagatatatggacgataataatttagttcatggaaatatcgctatgattggtgtgaatgactccgctaactctgtggggtgcgcagtgctttccccacatagaataaattagcattccgactgtgataataataccaagtataaacgccataatactcaatactttccatgtacgagtgggactggtagacttactaaagtcaataaaggcgaagatacacgaaagaatcaaaagaatgattccagcgattagcacgccggaaaaataatttccaatcataagcatcatgtccatttaactaataaaaattttaaatcgccgaatgaacaaagtggaatataaaccatataaaaacaatagtttgtactgcaaaaataatatctatttttgttttcgaagatatggtaaaattaaatagtagtacacagcatgttataactaacagcagcaacggctcgtaattacttatcatttactagacgaaaaggtggtgggatattttcttgctcaaataatacgaatatatcacccatccattttatgcgatgtttatatactctaatctttaatagatctatagacgacgggtttaccaacaatatagattttatcgattcatctaatttaaacccttccttaaacgtgaatgatctattatctggcataacgatgaccctacctgatgaatcggacaatgtactgggccatgtagaataaattatcaacgaattatcgtctacgaacatttatatcatttgttttaattttaggacgcgaataaatggatataaaatagaaaataacagatattacaaccagtgttatggccgcgcccaaccaggtaggcagttttattttatcttttactacaggttctcctggatgtacgtcaccaacggcggacgtagttctagtacaattagacgtaagttccgcttgggaattttttaacgctaaagagttaacgttaatcgtgcacccaacgtatttacatctagttcgttgaacatcttgattataatataaccattttctatctctagattcgtcagtgcactcatgtaaccaacataccctaggtcctaaatatttatctccggaattagattttggataattcgcgcaccaacaatttctatttcctttatgatcgttacaaaagacgtataatgccgtatccccaaaagtaaaataatcaggacgaataattctaataaactcagaacaatatctcgcatccatatgtttggagcaaatatcggaataagtagacatagccggtttccgttttgcacgtaaccattctaaacaattggggtttccaggatcgtttctacaaaatccagtcatgaaatcgtcacaatgttctgtcttgtaattattattaaatatttttggacagtgtttggtatttgtcttagaacaacattttgccacgctatcactatcgcccaggagataatccttttttataaaatgacatcgttgcccggatgctatataatcagtagcgtgttttaaatccttaatatattcaggagttacctcgttctgataatagattaatgatccaggacgaaatttgaaagaactacatggttctccatgaattaatacatattgtttagcaaattcaggaactataaaactactacaatgatctatcgacataccatctatcaaacaaaacttgggtttaatttctcccggagatgtttcataatagtacgtataactttcttctgcaaacttaacagctctattatattcaggataattaaaacctaattccatatatttgtctcgtatatctgctattcctggtgctattttgattctattaagagtaacagctgcccccattcttaataatcgtcagtatttaaactgttaaatgttggtatatcaacatctaccttatttcccgcagtataaggtttgttgcaggtatactgttcaggaatggttacatttatacttcttctatagtcctgtctttcgatgttcatcacatatgcaaagaacagaataaacaaaataatgtaagaaataatattaaatatctgtgaattcgtaaatacattgattgccataataattacagcagctacaatacatacaatagacattcccacagtgttgccattacctccacgatacatttgagttactaagcaataggtaataactaagctagtaagaggcaatagaaaagatgagataaatatcatcaatatagagattagaggagggctatatagagccaagacgaacaaaatcaaaccgagtaacgttctaacatcattatttttgaagattcccaaataatcattcattcctccataatcgttttgcatcatacctccatctttaggcataaacgattgctgctgttcctctgtaaataaatctttatcaagcactccagcacccgcagagaagtcgtcaagcatattgtaatatcttaaataactcatttatatattaaaaaatgtcactattaaagatggagtataatctttatgccgaactaaaaaaaatgacttgtggtcaacccctaagtctttttaacgaagacggggatttcgtagaagttgaaccgggatcatcctttaagtttctgatacctaagggattttacgcctctccttccgtaaagacgagtctagtattcgagacattaacaacgaccgataataaaatcactagtatcaatccaacaaatgcgccaaagttatatcctcttcaacgcaaagtcgtatctgaagtagtttctaatatgaggaaaatgatcgaatcaaaacgtcctctatacattactcttcacttggcgtgtggatttggtaagactattaccacgtgttatcttatggctacacacggtagaaaaaccgtcatttgcgtacccaataaaatgttaatacatcaatggaagacacaggtagaggcagtcggattggaacataagatatccatagatggagtaagtagtctattaaaggaactaaagactcaaagtccggatgtattaatagtagtcagtagacatctgacaaacgatgccttttgtaaatatatcaataagcattatgatttgttcatcttggatgaatcacatacgtataatctgatgaacaatacagcagttacaagatttttagcgtattatcctccgatgatgtgttattttttaactgctacacctagaccatctaaccgaatttattgtaacagtattattaatattgccaagttatccaatctaaaaaaaactatctatgcagtagatagtttttttgagccatattccacagataatattagacatatggtaaaacgactagatggaccatctaataaatatcatatatataccgagaagttattatctgtagacgagcctagaaatcaacttattcttgataccctggtagaagaattcaagtcaggaactattaatcgcattttagttattactaaactacgtgaacatatggtattattctacaaacgattattagattttttcggaccagaggttgtatttataggagacgcccaaaatagacgtactccagatatggtcaaatcaatcaaggaactaaatagatttatattcgtatccaccttattttattccggtactggtttagatattcctagtttggattcgttgttcatttgctcggcagtaatcaacaatatgcaaatagagcaattactagggagggtatgtcgagaaacagaactattagataggacggtatatgtatttcctaacacatccatcaaagaaataaagtacatgataggaaatttcatgcaacgaattattagtctgtctgtagataaactaggatttaaacaaaaaagttatcggaaacatcaagaatccgatcccacttctgcatgtacaacatcatccagagaagaacgtgtattaaatagaatatttaactcgcaaaatcgttaagaagtttaagcgacgatccgcatgctgcgcaggccagtgtattacccctcatagtattaatataatccaatgatacttttgtgatgtcggaaatcttaaccaatttagactgacaggcagaacacgtcatgcaatcatcatcgtcatcgataactgtagtcttgggcttctttttgcgactcttcattccggaacgcacattggtgctatccatttaggtagtaaaaaataagtcagaatatgccctataacacgatcgtgcaaaacctggtatatcgtctctatctttatcacaatatagtgtatcgacatttttattattattgacctcgtttatcttggaacatggaatgggaacatttttgttatcaacggccatctttgccttaattccagatgttgtaaaattataactaaacagtctatcatcgacacaaatgaaattcttgtttagacgtttgtagtttacgtatgcggctcgttcgcgtctcattttttcagatattgcaggtactataatattaaaaataagaatgaaataacataggattaaaaataaagttatcatgacttctagcgctgatttaactaacttaaaagaattacttagtctgtacaaaagtttgagattttcagattctgcggctatagaaaagtataattctttggtagaatggggaacatctacttactggaaaataggcgtgcaaaaggtagctaatgtcgagacgtcaatatctgattattatgatgaggtaaaaaataaaccgtttaatattgatccgggctattacattttcttaccggtatattttgggagcgtctttatttattcgaagggtaaaaatatggtagaacttggatctggaaactcttttcaaataccagatgatatgcgaagtgcgtgtaacaaagtattagacagcgataacggaatagactttctgagatttgttttgttaaacaatagatggataatggaagatgctatatcaaaatatcagtctccagttaatatatttaaactagctagtgagtacggattaaacatacccaaatatttagaaattgaaatagaggaagacacattatttgacgacgagttatactctattatagaacgctctttcgatgataaatttccaaaaatatccatatcgtatattaagttgggagaacttagacggcaagttgtagactttttcaaattctcattcatgtatattgagtccatcaaggtagatcgtataggagataatatttttattcctagcgttataacaaaatcaggaaaaaagatattagtaaaagatgtagaccatttaatacgatccaaggttagagaacatacatttgtaaaagtaaaaaagaaaaacacattttccattttatacgactatgatggaaacggaacagaaactagaggagaagtaataaaacgaattatagacactataggacgagactattatgttaacggaaagtatttctctaaggttggtagtgcaggcttaaagcaattgactaataaattagatattaatgagtgcgcaactgtcgatgagttagttgatgagattaataaatccggaactgtaaaacgaaaaataaaaaaccaatcagcatttgatttaagcagagaatgtttgggatatccagaagcggattttataacgttagttaataacatgcggttcaaaatagaaaattgtaaggttgtaaatttcaatattgaaaatactaattgtttaaataacccgagtattgaaactatatatggaaactttaaccagttcgtctcaatctttaatgtcgtcaccgatgtcaaaaaaagattattcgagtgaaataatatgcgcctttgatataggtgcaaaaaatcctgccagaactgttttagaagtcaaggataactccgttagggtattggatatatcaaaattagactggagttctgattgggaaaggcgcatagctaaagatttgtcacaatatgaatacactacagttcttctagaacgtcagcctagaaggtcgccgtatgttaaatttatctattttattaaaggctttttatatcatacatcggctgccaaagttatttgcgtctcgcctgtcatgtctggtaattcatatagagatcgaaaaaagagatcggtcgaagcatttcttgattggatggacacattcggattgcgagactccgttccggatagacgcaaattagacgatgtagcggatagtttcaatttggctatgagatacgtattagataaatggaatactaattatacaccttataataggtgtaaatctagaaattacataaaaaaaatgtaataacgttagtaacgccattatggataatctatttacctttctacatgaaatagaagatagatatgccagaactatttttaactttcatctaataagttgcgatgaaataggagatatatatggtcttatgaaagaacgcatttccttagaggatatgtttgataatatagtgtataataaagatatacatcctgccattaagaaactagtgtattgcgacatccaacttactaaacacattattaatcagaatacgtatccggtatttaacgattcttcacaagtgaaatgttgtcattatttcgacataaactcagataatagcaatattagctctcgtacagtagagatatttgagagggaaaagtcatctcttgtatcatatattaaaactaccaataagaagagaaaggtcaattacggcgaaataaagaaaactgttcatggaggcactaatgcaaattacttttccggtaaaaagtctgacgagtatctgagtactacagttagatccaacattaatcaaccttggatcaaaaccatctctaagaggatgagagttgatatcattaatcactctatagtaacgcgtggaaaaagctctatattacaaactatagaaattatttttactaatagaacatgtgtgaaaatattcaaggattctactatgcacattattctatccaaggacaaggatgaaaaggggtgtatacacatgattgacaaattattctatgtctattataatttatttctgttgttcgaagatatcatccaaaacgagtactttaaagaagtagctaatgttgtaaaccacgtactcacggctacggcattagatgagaaattattcctaattaagaaaatggctgaacacgatgtttatggagttagcaatttcaaaatagggatgtttaacctgacatttattaagtcgttggatcataccgttttcccctctctgttagatgaggatagcaaaataaagttttttaaggggaaaaagctcaatattgtagcattacgatctctggaggattgtataaattacgtgactaaatccgagaatatgatagaaatgatgaaggaaagatcgactattttaaatagcatagatatagaaacggaatcggtagatcgtctaaaagaattgcttctaaaatgaaaaaaaacactgattcagaaatggatcaacgactcggatataagtttttggtgcctgatcctaaagccggagttttttatagaccgttacatttccaatatgtatcgtattctaattttatattgcatcgattgcatgaaatcttgaccgtcaagcggccactcttatcgtttaagaataatacagaacgaattatgatagaaattagcaatgttaaagtgactcctccagattactcacctataatcgcgagtattaaaggtaagagttatgacgcattagccacgttcactgtaaatatctttaaagaggtaatgaccaaagagggtatatccatcactaaaataagtagttatgagggaaaagattctcatttgataaaaattccgctactaataggatacgggaataaaaatccacttgatacagccaagtatcttgttcctaatgtcataggtggagtctttatcaataaacaatctgtcgaaaaagtaggaattaatctagtagaaaagattacaacatggccaaaatttagggttgttaagccaaactcattcactttctcgttttcctccgtatcccctcctaatgtattaccgacaagatatcgccattacaagatatctctggatatatcacaattggaagcgttgaatatatcatcgacaaagacatttataacggtcaatattgttttgctgtctcaatatttatctagagtgagtctagaattcattagacgtagtttatcatacgatatgcctccagaagttgtctatctagtaaacgcgataatagatagtgctaaacgaattactgaatctattactgactttaatattgatacatacattaatgacctggtggaagctgaacacattaaacaaaaatctcagttaacgattaacgagttcaaatatgaaatgctgcataactttttacctcatatgaactatacacccgatcaactaaagggattttatatgatatctttactaagaaagtttctctactgtatcttccacacttctagatatccagatagagattcgatggtttgtcatcgcatcctaacgtacggcaaatattttgagacgttggcacatgatgaattagagaattacataggcaacatccgaaacgatatcatgaacaatcacaagaacagaggcacttacgcggtaaacattcatgtactaacaactcccggacttaatcacgcgttttctagcttattgagtggaaagttcaaaaagtcagacggtagttatcgaacacatcctcactattcatggatgcagaatatttctattcctaggagtgttggattttatccggatcaagtaaagatttcaaagatgttttctgtcagaaaataccatccaagtcaatatctttacttttgttcatcagacgttccggaaagaggtcctcaggtaggtttagtatctcaattgtctgtcttgagttccattacaaatatactaacgtctgagtatttggatttggaaaagaaaatttgtgagtatatcagatcatattataaagatgatataagttactttgaaacaggatttccaatcactatagaaaatgctctagtcgcatctcttaatccaaatatgatatgtgattttgtaactgactttagacgtagaaaacggatgggattcttcggtaacttggaggtaggtattactttagttagggatcacatgaatgaaattcgcattaatattggagcgggaagattagtcagaccattcttggttgtggataacggagagctcatgatggatgtgtgtccggagttagaaagcagattagacgacatgacattctctgacattcagaaagagtttccgcatgtcatcgaaatggtagatatagaacaatttacttttagtaacgtatgtgaatcggttcaaaaatttagaatgatgtcaaaggatgaaagaaagcaatacgatttatgtgactttcctgccgaatttagagatggatatgtagcatcttcactagtgggaatcaatcacaattctggacccagagctattcttggatgtgctcaagctaaacaagctatctcttgtctgagttcggatatacgaaataaaatagacaatggaattcatttgatgtatccagagaggccaatcgtgattagtaaggctttagaaacttcaaagattgcggctaattgcttcggccaacatgttactatagcattaatgtcgtacaaaggtatcaatcaagaggatggaattatcatcaaaaaacaatttattcagagaggcggtctcgatatagttaccgcaaagaaacatcaagtagaaattccattggaaaactttaataacaaagaaagagataggtctaacgcctattcaaaattagaaagtaatggattagttagactgaatgctttcttggaatccggagacgctatggcacgaaatatctcatcaagaactcttgaagatgattttgctagagataatcagattagcttcgatgtttccgagaaatataccgatatgtacaaatctcgcgttgaacgagtacaagtagaacttactgacaaagttaaggtacgagtattaaccatgaaagaaagaagacccattctaggagacaaatttaccactagaacgagtcaaaagggaacagtcgcgtatgtcgcggatgaaacggaacttccatacgacgaaaatggtatcacaccagatgtcattattaattctacatccatcttctctagaaaaactatatctatgttgatagaagttattttaacagccgcatattctgctaagccgtacaacaataagggagaaaaccgacctgtctgttttcctagtagtaacgaaacatccatcgatacatatatgcaattcgctaaacaatgttatgagcattcaaatccgaaattgtccgatgaagaattatcggataaaatcttttgtgaaaagattctctatgatcctgaaacggataagccttatgcatccaaagtattttttggaccaatttattacttgcgtctgaggcatttaactcaggacaaggcaaccgttagatgtagaggtaaaaagacgaagctcattagacaggcgaatgagggacgaaaacgtggaggaggtatcaagttcggagaaatggagagagactgtttaatagcgcatggtgcagccaatactattacagaagttttgaaagattcggaagaagattatcaagatgtgtatgtttgtgaaaattgtggagacatagcagcacaaatcaagggtattaatacatgtcttagatgttcaaaacttaatctctctcctctcttaacaaaaattgataccacgcacgtatctaaagtatttcttactcaaatgaacgccagaggcgtaaaagtcaaattagatttcgaacgaaggcctccttcgttttataaaccattagataaagttgatctcaagccgtcttttctggtgtaatattctagtttggtagtagatacatatcaatatcatcaaattcgagatccgaattataaaatgggcgtggattgttaactatagaatcggacgtctgatattcgaaaatctgtggagtttcaggttttggtggaggtgtaactgctacttgggatactgaagtctgatattcagaaagctgtggatgttctggttcggcatccaccgatggtgtcacatcactaatcggttcggtaacgtctgtggatggaggtgctacttctacagaacctgtagcctcagttgtcaacggagatacatttttaatgcgagaaaatgtataatttggtaatggtttcttatgtggatctgaagaagaggtaagatatctactagaaagataccgatcacgttctagttctcttttgtagaacttaactttttctttctccgcatctagttgatattccaacctcttcacgttactacgttcagattccaattcacgttcgcatgggttacctccgcagtttttacgagcgatttcacgttcagccttcatgcgtctctccctctctctatcgagtttatcagagcagtctttctgaaggcgatcgaactccataaatttctccaacgctttgattgtttccatagatttccgaagttcagcttttaggactgtgattctttttctttcgaattcacagctggatgtacaaccgtttccattaccgccatctctaagtttcttttctagatcggcaacatttcatccccatgccttttacattcctcgagtctactgtcgtcgaaatatcgttccagctccttttcgacatcaataactttagcacgttgtctctcaagctctcttttgtagttatctgattccctggcacgtttaagatcttcatgcaattgagtcagctcttaacttcctctcttgcttcttcgtcatagtacgcgcaatcactgtgagatccattgttaccacgtctacactcggcgagctcgcgtttaagagattcaatttcccgtttgtattggtccatgtttccattgctaccaccattagatttacaggctgctagttgtcgttcgagatcagaaatacgggttttcttggaattgatttcgtcgatgtacttggcatcgaaacacttattaagttctttttccaattctacgattttatttctttcgcgagtcaattccctcctgtagtaactatctgttttgtcagattcacgctctctacgtagactttcttgcaagttactaatttgttccctagcacgtccgagtttagttttatatgctgaatagagttctgattcatcctttgagcagatctctagcgatcgtttaagattcctaattctagtctttagcctatttacctcctcagaagatgttccgttaccgttgcgtttacactcgttaagctgtctatcaagatccatgattctatctctaagacgttgcatctctctttccatatcagcattgctttcattattacgtctgcagtcactcaactgtctttcaatatctgagattctatctctaagacgtcgcatctctctctgtttcggcattggtttcattattacgtctacagtcgttcaactgtctttcaagatctgatattctagattggagtctgctaatctctgtagcattttcacggcattcactcagttgtctttcaagatctgaaattttagattggagtctgctaatctctgtaagatttcctcctccgctctcgatgcagtcggtcaacttattctctagttctctaatacgcgaacgcagtgcatcaacttcttgcgtgtcttcctggttgcgtgtacattcatcgagtctagattcgagatctctaacgcgtcgtcgttcttcctcaagttctctgcgtactacagaaagcgtgtccctatcttgttgatatttagcaatttctgattctagagtactgattttgcttacgtagttactaatatttgtcttggccttatcaagatcctccttgtatttgtcgcattccttgatatccctacgaagtctggacagttcccattcgacattacgacgtttatcgatttcagctcggagatcgtcatcgcgttgttttagccacatacgactgagttcaagttctcgttgacaagatccatctacttttccattcctaatagtatccagttccttttctagttctgaacgcatttctcgttccctatcaagcgattctctcaattctcggatagtcttcttatcaatttctaataaatctgaaccatcatctgtcccattttgaatatccctgtgttctttgatctcttttgtaagtcggtcgattctttcggttttataaacagaatccctttccaaagtcctaatcttactgagtttatcactaagttctgcattcaattcggtgagttttctcttggcttcttccaactctgttttaaactctccactatttccgcattcttcctcgcatttatctaaccattcaattagtttattaataactagttggtaatcagcgattcctatagccgttcttgtaattgtgggaacataattaggatcttctaatggattgtatggcttgatagcatcatctttatcattattagggggatggacaaccttaattggttggtcctcatctcctccagtagcgtgtggttcttcaataccagtgttagtaataggcttaggcaaatgcttgtcgtacgcgggcacttcctcatccatcaagtatttataatcgggttctacttcagaatattcttttctaagagacgcgacttcgggagttagtagaagaactctgtttctgtatctatcaacgctggaatcaatactcaagttaaggatagcgaatacctcatcgtcatcatccgtatcttctgaaacaccatcatatgacatttcatgaagtctaacgtattgataaatagaatcagatttagtattaaacagatccttaacctttttagtaaacgcatatgtatattttagatctccagatttcataatatgatcacatgccttaaatgtcagtgcttccatgatataatctggaacactaatgggtgacgaaaaagatacagcaccatatgctacgttgataaataaatctgaaccactaagtagataatgattaatgttaagaaagaggaaatattcagtgtataggtatgtcttggcgtcatatcttgtactaaacacgctaaacagtttgttaatgtgatcaatttccaatagattaattagagcagcgggaataccaacaaacatattaccacatccgtattttctatgaatatcacatatcatgttaaaaaatcttgatagaagagcgaatatctcgtctgacttaatgagtcgtagttcagcagcaacataagtcataactgtaaatagaacatactttcctgtagtgttgattctagactccacatcaacaccattattaaaaatagttttatatacatctttaatctgctctccgttaatcgtcgaacgttctagtatacggaaacactttgatttcttatctgtagttaatgacttagtgatatcacgaagaatattacgaattacatttcttgtttttcttgagagacctgattcagaactcaactcatcgttccatagtttttctacctcagtggcgaaatctttggagtgcttggtacatttttcaataaggttcgtgacctccatttattataaaaaatttattcaaaacttaactacaatcgggtaattataaaatcgtagatctcccatgtggcggaatactaccatctatcgcatgtggatggacagtaggtaatggccatgggaacagtaatgtttgcatatttatctttcttgccagtattactgcatattgtcccaatgtttcgatgtgatgttctaacctatcaactgccgctgtatcacaacaatagtgtccgatgaaattaagattatgatccaatgtgtttaatatatgattatcaagtcttatacgatccgcgtcttttttgacaggatcaggttcttctacaggaagaagtttcggcctcttatgatattcatgtctgggaaacggtggtctagggtgaggctccggtatcggagtgggttttggattataatcatcatcgtctatgacatcatcttcgacttcgatatttattttgctatcttgatgatgtcctgtatcagttgcattttcagcactcgactgaatattagcgcattcattgtctattattaccatatttctaaacccaaaatgtatgtgttgaacatcagtactatcgttgatgagtcttatagcatgaattcgcttatcgttatcgggtttatcttctgtcaccttagcaattccttttttattaaactctacataatcatatccatttctattgtttgttctaatataaacgagtatagcatcattgctaaatttttcaatagtatcaaaaacagaatatcctaaaccatataatatatattcaggaacactcaaactaaatgtccaggattctcctaaatacgtaaactttaatagtgcgaaatcattcaaaaatctaccacttatagatagatagtacataaatgcgtatagtagtctacctatctctttattatgaaaaccggcattacgatcatatatgtcgtgatatacctgtgatccgtttacgttaaaccataaatacatgggtgatcctataaacatgaatttatttctaattctcagagctatagttaattgaccgtgtaatatttgcttacatgcatacttgatacgcttattaataagatttttatcattgctcgttatttcagaatcgtatatataaggagtaccatcgtgattcttaccagatattatacaaaatactatatataaaatatattgaccaacgttagtaatcatataaatgtttaacgttttaaattttgtattcaatgatccattatcatacgctagcatggtcttatgatattcattctttaaaatataatattgtgttagccattgcattggggctcctaatggagattttttattctcatccattttaggataggctttcataaagtccctaataacttcgtgaataatgtttctatgttttctactgatgcatgtatttgcttcgatttttttatcccatgtttcatctatcatagatttaaacgcagtaatgctcgcaacattaacatcttgaaccgttggtacaattccgttccataaatttataatgttcgccatttatataactcattttttgaatatacttttaattaacaaaagagttaagttactcatatggacgccgtccagtctgaacatcaatctttttagccagagatatcatagccgctcttagagtttcagcgtgattttccaacctaaatagaacttcatcgttgcgtttacaacacttttctatttgttcaaactttgttgttacattagtaatctttttttccaaattagttagccgttgtttgagagtttcctcattgtcgtctccatcggctttaacaattgcttcgcgtttagcctctggctttttagcagcctttgtagaaaaaaattcagttgctggaattgcaagatcgtcatctccggggaaaagagttccgtccatttaaagtacagattttagaaactgacactctgcgttatttatatttggtacaacacatggattataaatattgatgttaataacatcagaaaatgtaaagtctatacattgttgcatcgtgttaaattttctaatggatctagtattattgggtccaacttctgcctgaaatccaaatatggaagcggatacaaaaccgtttcctggataaaccacacatctccacttttgctttacatcagaaattgtgtcgttgacatcttgaactctcctatctaatgccggtgttccacctatagattttgaatattcgaatgctgcatgagtagcattaaattccttaatattgccataattttcatatattgagtaaccctggataaaaagtaaacacaccgcagccgtcgctaccacaataaaaaaaattgatagagagttcatttataatctattagaagctgacaaaatttttttacacgcatcagacaatgctttaataaatagttcaacatctacttttgtcatatcgaaccgatggtatgattctaacctagaattacatccgaaaaagttgactatgttcatagtcattaagtcattaacaaacaacattccagactctggattataagacgatactgtttcgtcacaattacctaccttaatcatgtgattatgaatattggctattagagcaccttctaagaaatctataatatctttgaaacacgatttaaaatcaaaccacgaatatacttctacgaagaaagttagtttacccataggagaaataactataaatggagatctaaatacaaaatccggatctatgatagttttaacattattatattctctattaaatacctccacatctaaaaatgttaattttgaaactatgtcttcgtttattaccgtacctgaactaaacgctataagctctattgtttgagaactctttaaacgatattcttgaaatacatgtaacaaagtttcctttaactcggtcggtttatctaccatagttacagaatttgtatccttatctataatataataatcaaaatcgtataaagttatataattatcgcgttcagattgggatcttttcaaatagactaaaaaccccatttctctagtaagtatcttatgtatatgtttgtaaaatatcttcatggtgggaatatgctctaccgcagttagccattcctcattgacagcggtagatgtattagacaaaactattccaatgtttaacaagggccattttacgagattattaaatccttgtttgataaatgtagccaatgagggttcgagttcaacgacgattgaattctcttcccgcggatgctgcatgatgaacgacgggatgttgttcgattgatttggaattctttttcgactttttgtttatattaaatattttaaaatttatagcggatagcaattcatgtaccacggataatgtagacgcgtattgcgcatcgatatctttattattagataaatttatcaataaatgtgagaagtttgcctcgttaaggtcttccatttaaatattatataaacatttgtgtttgtaacttattcgtcttttatggaatagttttttactagtaaagctgcaattacacactttgtccgtaaaacataaatataaacaccagcttttatcaatcgttccaaaaagtcgacggcggacatttttaacatggcatctattttaaatacacttaggtttttggaaaaaacatcattttataattgtaacgattcaataactaaagaaaagattaagattaaacataagggaatgtcatttgtattttataagccaaagcattctaccgttgttaaatacttgtctggaggaggtatatatcatgatgatttggttgtattggggaaggtaacaattaataatctaaagatgatgctattttacatggatttatcatatcatggagtgacaagtagtggagcaatttacaaattgggatcgtctatcgatagactttctctaaataggactattgttacaaaagttaataattatgatgatacattttttgacgacgatgattgatcgctattgcacaattttgtttttgtactttctaatatagtgtttaggttctttttcatatgagaatattgatttactaaaatatctatgtttaacttttgttctatgacgtccttatcggcggtatcggtacatatacgtaattcaccttcacaaaatacggagtcttcgataataatagccaatcgattattggatctagctgtctgtatcatattcaacatgtttaatatatcctttcgtttcccctttacaggcatcgatcgtagcatattttccgcgtctgatatggaaatgttaaaactacaaaaatgcgtaatgttagcccgtcctaatattggtacgtgtctataagtttggcatagtagaataatagacgtgtttaaatgccttccaaagtttaagaattctattagagtattgcattttgatagtttatcgcctacatcatcaaaaataagtaaaaagtgtgctgattttttatgattttgtgcgacagcaatacatttttctatgttacttttagttcgtatcagattatattctagagattcctgactactaacgaaattaatatgatttggccaaatgtatccatcataatctgggttataaacgggtgtaaacaagaatatatgtttatattttttaactagtgtagaaaacagagatagtaaatagatagtttttccagatccagatcctcctgttaaaaccattctaaacggcatttttaataaattttctcttgaaaattgtttttcttggaaacaattcataattatatttacagttactaaattaatttgataataaatcaaaatatggaaaactaaggttgttagtagggaggagaacaaagaaggcacatcgtgatataaataacatttattatcatgatgacaccagaaaacgacgaagagcagacatctgtgttctccgctactgtttacggagacaaaattcagggaaagaataaacgcaaacgcgtgattggtctatgtattagaatatctatggttatttcactactatctatgattaccatgtccgcgtttctcatagtgcgcctaaatcaatgcatgtctgctaacgaggctgctattactgacgccgctgttgccgttgctgctgcatcatctactcatagaaaggttgcgtctagcactacgcaatatgatcacaaagaaagctgtaatggtttatattaccagggttcttgttatatattacattcagactaccagttattctcggatgctaaagcaaattgcactgcggaatcatcaacactacccaataaatccgatgtcttgactacctggctcattgattatgttgaggatacatggggatctgatggtaatccaattacaaaaactacatccgattatcaagattctgatgtatcacaagaagttagaaagtatttttgtgttaaaacaatgaactaatatttatttttgtacattaataaatgaaatcgcttaatagacaaactgtaagtaggtttaagaagttgtcggtgccggccgctataatgatgatactctcaaccattattagtggcataggaacatttctgcattacaaagaagaactgatgcctagtgcttgcgccaatggatggatacaatacgataaacattgttatttagatactaacattaaaatgtctacagataatgcggtttatcagtgtcgtaaattacgagctagattgcctagacctgatactagacatctgagagtattgtttagtattttttataaagattattgggtaagtttaaaaaagaccaatgataaatggttagatattaataatgataaagatatagatattagtaaattaacaaattttaaacaactaaacagtacgacggatgctgaagcgtgttatatatacaagtctggaaaactggttaaaacagtatgtaaaagtactcaatctgtactatgtgttaaaaaattctacaagtgacaacaaaaaatgaattaataataagtcgttaacgtacgccgccatggacgccgcgtttgttattactccaatgggtgtgttgactataacagatacattgtatgatgatctcgatatctcaatcatggactttataggaccatacattataggtaacataaaaactgtccaaatagatgtacgggatataaaatattccgacatgcaaaaatgctactttagctataagggtaaaatagttcctcaggattctaatgatttggctagattcaacatttatagcatttgtgccgcatacagatcaaaaaataccatcatcatagcatgcgactatgatatcatgttagatatagaagataaacatcagccattttatctattcccatctattgatgtttttaacgctacaatcatagaagcgtataacctgtatacagctggagattatcatctaatcatcaatccttcagataatctgaaaatgaaattgtcgtttaattcttcattctgcatatcagacggcaatggatggatcataattgatgggaaatgcaatagtaattttttatcataaaagttgtaaagtaaataataaaacaataaatattgaactagtagtacgtatattgagcaatcagaaatgatgctggtacctcttatcacggtgaccgtagttgcgggaacaatattagtatgttatatattatatatttgtaggaaaaagatacgtactgtctataatgacaataaaattatcatgacaaaattaaaaaagataaagagttctaattccagcaaatctagtaaatcaactgatagcgaatcagactgggaggatcactgtagtgctatggaacaaaacaatgacgtagataatatttctaggaatgagatattggacgatgatagcttcgctggtagtttaatatgggataacgaatccaatgttatggcgcctagcacagaacacatttacgatagtgttgctggaagcacgctgctaataaataatgatcgtaatgaacagactatttatcagaacactacagtagtaattaatgaaacggagactgttgaagtacttaatgaagataccaaacagaatcctaactattcatccaatcctttcgtaaattataataaaaccagtatttgtagcaagtcaaatccgtttattacagaacttaacaataaatttagtgagaataatccgtttagacgagcacatagcgatgattatcttaataagcaagaacaagatcatgaacacgatgatatagaatcatcggtcgtatcattggtgtgattagtttcctttttataaaattgaagtaatatttagtattattgctgccgtcacgttgtacaaatggagatattccctgtattcggcatttctaaaattagcaattttattgctaataatgactgtagatattatatagatacagaacatcaaaaaattatatctgatgagatcaatagacagatggatgaaacggtacttcttaccaacatcttaagcgtagaagttgtaaatgacaatgagatgtaccatcttattcctcatagattatcgacgattatactctgtattagttctgtcggaggatgtgttatctctatagataatgacgtcaatggcaaaaatattctaacctttcccattgatcatgctgtaatcatatccccactgagtaaatgtgtcgtagttagcaagggtcctacaaccatattggttgttaaagcggatatacctagcaaacgattggtaacatcgtttacaaacgacatactatatgtaaacaatctgtcactgattaattatttgccgttgtctgtattcattattagacgagtcaccgactatttggatagacacatatgcgatcagatatttgctaataataagtggtattcccttataaccatcgacgataagcaatatcctattccatcaaactgtataggtatgtcctctgccaagtacataaattctagcatcgagcaagatactttaatccatgtttgtaacctcgagcatccgttcgactcagtatacaaaaaaatgcagtcgtacaattctctacctatcaaggaacaaatattgtacggtagaattgataatataaatatgagcattagtatttctgtggattaatagatttctagtatggggatcattaatcatctctaatctctaaatacctcataaaacgaaaaaaaagctattatcaaatactgtacggaatggattcattctcttctctttttatgaaactctgttgtatatctactgataaaactggaagcaaaaaatctgatagaaagaataagaataagatcaaggattatatggaacacgattattataaaataacaatagttcctggttcctcttccacgtctactagctcgtggtattatacacatgcctagtaatagtctctttgcgttgacggaaagcagactagaaataacaggctaaaatgttcagacaccataatagttcccaacccagataataacagagttccatcaacacattcctttaaactcaatcccaaacccaaaaccgttaaaatgtatccggccaattgatagtagataatgaggtgtacagcgcatgataatttacacagtaaccaaaatgaaaacactttagtaattataagaaatatagacggtaatgtcatcatcaacaatccgataatatgcctgagagtaaacattgatggataaaacaaaaatgctccgcataactctatcatggcaataacacaaccaaacacttgtaaaattcctaaattagtagaaaatacaacgaatatcgatgtataagtgatctcgagaaataataagaataaagtaatgcccgtaaagataaacatcaacattgtttggtaatcattaaaccaattagtatgaagttgaactaatttcacagtagattttattccagtgttatcctcgcatgtataagtacctggtaagatatctttatattccataatcaatgagacatcactatctgataacgaatgaagtctagcactagtatgccatttacttaatattgtcgtcttggaagttttattataagttaaaatatcatggttatccaatttccatctaatatactttgtcggattatctatagtacacggaataatgatggtatcattacatgctgtatactctatggtctttgtagttgttataacaaccaacgtatagaggtatatcaacgatattctaactcttgacattttttatttatttaaaatgatacctttgttatttattttattctattttgctaacggtattgaatggcataagtttgaaacgagtgaagaaataatttctacttacttattagacgacgtattatacacgggtgttaatggggcggtatacacattttcaaataataaactaaacaaaactggtttaactaataataattatataacaacatctataaaagtagaggatgcggataaggatacattagtatgcggaaccaataacggaaatcccaaatgttggaaaatagacggttcagacgacccaaaacatagaggtagaggatacgctccttatcaaaatagcaaagtaacgataatcagtcacaacggatgtgtactatctgacataaacatatcaaaagaaggaattaaacgatggagaagatttgacggaccatgtggttatgatttattcacggcggataacgtaattccaaaagatggtttacgaggagcattcgtcgataaagacggtacttatgacaaagtttacattcttttcactgatactatcggctcaaagagaattgtcaaaattccgtatatagcacaaatgtgcctaaacgacgaaggtggtccatcatcattgtctagtcatagatggtcgacgtttctcaaagtcgaattagaatgtgatatcgacggaagaagttatagacaaattattcattctagaactataaaaacagataatgatacgatactatatgtattcttcgatagtccttattccaagtccgcattatgtacctattctatgaataccattaaacaatctttttctacgtcaaaattggaaggatatacaaagcaattgccgtctccagctcctggtatatgtttaccagctggaaaagttgttccacataccacgtttgaagtcatagaacaatataatgtactagatgatattataaagcctttatctaaccaacctatcttcgaaggaccgtctggtgttaaatggttcgatataaaggagaaggaaaatgaacatcgggaatatagaatatacttcataaaagaaaattctatatattcgttcgatacaaaatctaaacaaactcgtagctcgcaagtcgatgcgcgactattttcagtaatggtaactgcgaaaccgttatttatagcagatatagggataggagtaggaatgccacaaatgaaaaaaatacttaaaatgtaatcttaatcgagtacaccacacgacaatgaacaaacataagacagattatgctggttatgcttgctgcgtaatatgcggtctaattgtcggaattatttttacagcgacactattaaaagttgtagaacgtaaattagttcatacaccattaatagataaaacgataaaagatgcatatattagagaagattgtcctactgactggataagctataataataaatgtatccatttatctactgatcgaaaaacctgggaggaaggacgtaatgcatgcaaagctctaaattcaaattcggatctaattaagatagagactccaaacgagttaagttttttaagaagccttagacgaggctattgggtaggagaatccgaaatattaaaccagacaaccccatataattttatagctaagaatgccacgaagaatggaactaaaaaacggaaatatatttgtagcacaacgaatactcccaaactgcattcgtgttacactatataacaattacactacatttttatcataccactacttcggttagatgttttagaaaaaaataaatatcgccgtaccgttcttgtttttataaaaataacaattaacaattatcaaattttttctttaatattttacgtggttgaccattcttggtggtaaaataatctcttagtgttggaatggaatgctgtttaatgtttccacactcatcgtatattttgacgtatgtagtcacatcgtttacgcaatagtcagactgtagttctatcatgcttcctacatcagaaggaggaacagttttaaagtctcttggttttaatctattaccgttagttttcatgaaatcctttgttttatccacttcacattttaaataaatgtccactatacattcttttgttaattttactagatcgtcatgggtcatagaatttataggttccgtagtccatggatccaaactagcaaacttcgcgtatacggtatcgcgattagtgtatacaccaactgtatgaaaattaagaaaacagtttaataaatcaacagaaatatttaatcctccgtttgatacagatgcgccatatttatggatttcggattcacacgttgtttgtctgaggtgttcgtctagtgttgcttctacgtaaacttcgattcccatatattctttattgtcagaatcgcataccgatttatcatcatacactgtttgaaaactaaatggtatacacatcaaaataataaataataacgagtacattctgcaatattgttatcgtaattggaaaaatagtgttcgagtgagttggattatgtgagtattggattgtatattttattttatattttgtaataagaataaaatgctaatgtcaagtttattccaatagatgtcttattaaaaacatatataataaataacaatggctgaatggcataaaattatcgaggatatctcaaaaaataataagttcgaggatgccgccatcgttgattacaagactacaaagaatgttctagctgctattcctaacagaacatttgccaagattaatccgggtgaaattattcctctcatcactaatcgtaatattctaaaacctcttattggtcagaaatattgtattgtatatactaactctctaatggatgagaacacgtatgctatggagttgcttactgggtacgcccctgtatctccgatcgttatagcgagaactcataccgcacttatatttttgatgggtaagccaacaacatccagacgtgacgtgtatagaacgtgtagagatcacgctacccgtgtacgtgcaactggtaattaaaataaaaagtaatattcatatgtagtgtcaattttaaatgatgatgatgaaatggataatatccatattgacgatgtcaataatgccggtattggcatacagttcatcgatttttagatttcattcagaggatgtggaattatgttatgggcatttgtattttgataggatctataatgtagtaaatataaaatataatccgcatattccatatagatataattttattaatcgcacgttaaccgtagatgaactagacgataatgtcttttttacacatggttattttttaaaacacaaatatggttcacttaatcctagtttgattgtctcattatcaggaaacttaaaatataatgatatacaatgctcagtaaatgtatcgtgtctcattaaaaatttggcaacgagtacatctactatattaacatctaaacataagacttattctctacatcggtccacgtgtattactataataggatacgattctattatatggtataaagatataaatgacaagtataatgacatctatgattttactgcaatatgtatgctaatagcgtctacattgatagtgaccatatacgtgtttaaaaaaataaaaatgaactcttaattatgctatgctattagaaatggataaaatcaaaattacggttgattcaaaaattggtaatgttgttaccatatcgtataacttggaaaagataactattgatgtcacacctaaaaagaaaaaagaaaaggatgtattattagcgcaatcagttgctgtcgaagaggcaaaagatgtcaaggtagaagaaaaaaatattatcgatattgaagatgacgatgatatggatgtagaaagcgcgtaatacgatctataaaaataagtatataaatactttttatttactgtactcttactgtgtagtggtgataccctactcgattatttttttaaaaaaaaaatacttattctgattcttctagccatttccgtgttcgtttgaatgccacatcgacgtcaaagataggggagtagttgaaatctagttctgcattgttggtacgcacctcaaatgtagtgttggatatcttcaacgtatagttgttgagtagtgatggttttctaaatagaattctcttcatatcattcttgcacgcgtacatttttagcatccatcttggaatcctagatccttgttctattcccaatggtttcatcaatagaagattaaacatatcgtacgaacacgatggagagtaatcgtagcaaaagtaagcatttcctttaatctcagatcccggatactggatatattttgcagccaacacgtgcatccatgcaacatttcctacatatacccggctatgcaccgcgtcatcatcgactgtacgatacataatgttaccgtgttgcttacattgctcgtaaaagactttcatcaatttgtctccttctccgtaaattccagtgggtcttaggcaacaagtatacaattttgctccattcatgattacggaattattggctttcataaccagttgctcggccatacgtttactttttgcgtatacatgtcctggtgatatatcataaagggtatgctcatggccgatgaatggatcaccgtgtttattgggtcctattgcttccatgctactagtatagatcaaatacttgattcctaggtccacacaagctgccaaaatagtctgtgttccataatagtttactttcatgatttcattatcggtgtattttccaaatacatccactagagcagccgtatgaataatcagatttaccccatctagcgcttctctcaccttatcaaagtcgtttatatcacattgtatatagtttataaccttaactttcgaggttattggttgtggatcttctacaatatctatgactctgatttcttgaacatcatctgcactaattaacagttttactatatacctgcctagaaatccggcaccaccagtaaccgcgtacacggccattgctgccactcataatatcagactacttattctattttactaaataatggctgtttgtataatagaccacgataatatcagaggagttatttactttgaaccagtccatggaaaagataaagttttaggatcagttattggattaaaatccggaacgtatagtttgataattcatcgttacggagatattagtcaaggatgtgattccataggcagtccagaaatatttatcggtaacatctttgtaaacagatatggtgtagcatatgtttatttagatacagatgtaaatatatttacaattattggaaaggcgttatctatttcaaaaaatgatcagagattagcgtgtggagttattggtatttcttacataaatgaaaagataatacattttcttacaattaacgagaatggcgtttgatatatcagttaatgcgtctaaaacaataaatgcattagtttacttttctactcagcaaaataaattagtcatacgtaatgaagttaatgatacacactacactgtcgaatttgatagggacaaagtagttgacacgtttatttcatataatagacataatgacaccatagaaataagaggggtgcttccagaggaaactaatattggttgcgcggttaatacgccggttagtatgacttacttgtataataagtatagttttaaactgattttagcagaatatataagacacagaaatactatatccggcaatatttattcggcattgatgacactagatgatttggctattaaacagtatggagacattgatctattatttaatgagaaacttaaagtagactccgattcgggactatttgactttgtcaactttgtaaaggatatgatatgttgtgattctagaatagtagtagctctatctagtctagtatctaaacattgggaattgacaaataaaaaatataggtgtatggcattagccgaacatatatctgatagtattccaatatctgagctatctagactacgatacaatctatgtaagtatctacgcgggcacactgagagcatagaggatgaatttgattattttgaagacgatgattcgtctacatgttctgccgtaaccgacagggaaacggatgtataatttttttttatagcgtgaaggatatgataaaaaatataattgttgtatttatcccattccaatcaccttatatgattctgtaacacaataaaggagtcttatagatgtatagaggtcagatactggtttgataaactgtttattccacataagtatgtttgactttatggttagacccgcatactttaacaaatcactgaaaattggagttaggtattgacctctcagaatcagttgccgttctggaacattaaatgtattttttatgatatactccaacgcatttatgtgggcatacaacaagtcattactaatggagtattccaagagttttagttgtctagtatttaacaagagaagagatttcaacagactgtttatgaactcgaatgccgcctcattgtcgcttatattgatgatgtcgaattctcccaatatcatcaccgatgagtagctcatcttgttatcgggatccaagttttctaaagatgtcattaaaccctcgatcatgaatggatttatcatcatcgtttttatgttggacatgagcttagtccgtttgtccacatctatagacgacgatttctgaattatttcatatatccctctctttaactccaggaacttgtcaggatggtctactttaatatgttctcgtctaagagatgaaaatctttggatggttgtacgcgacttttctctaaaggatgacgttgcccaagatcctctcttaaatgaatccatcttatccttggacaagatggacagtctattttccttagatggtttaatatttttgttacccatgatctataaaggtagacctaatcgtctcggatgacctatatatttattttcagttttattatacgcataaattgtaaaaaatatgttaggtttacaaaaatgtctcgtggggcattaatcgtttttgaaggattggacaaatctggaaaaacaacacaatgtatgaacatcatggaatctataccggcaaacacgataaaatatcttaactttcctcagagatccactgtcactggaaagatgatagatgactatctaactcgtaaaaaaacctataatgatcatatagttaatctattattttgtgcaaatagatgggagtttgcatcttttatacaagaacaactagaacagggaattactttaatagttgatagatacgcattttctggagtagcgtatgccgccgctaaaggcgcgtcaatgactctcagtaagagttatgaatctggattgcctaaacccgacttagttatattcttggaatctggtagcaaagaaattaatagaaacgtcggcgaggaaatttatgaagatgttacattccaacaaaaggtattacaagaatataaaaaaatgattgaagaaggagatattcattggcaaattatttcttctgaattcgaggaagatgtaaagaaggagttgattaagaatatagttatagaggctatacacacggttactggaccagtggggcaactgtggatgtaatagtgaaattacattttttataaatagatgttagtacagtgttataaatggatgaagcatattactctggcaacttggaatcagtactcggatacgtgtccgatatgcataccgaactcgcatcaatatctcaattagttattgccaagatagaaactatagataatgatatattaaacaaggacattgtaaattttatcatgtgtagatcaaacttggataatccatttatctctttcctagatactgtatatactattatagatcaagagaactatcagactgagttgattaattcattagacgacaatgaaattatcgattgtatagttaataagtttatgagcttttataaggataacctagaaaatatagtagatgctatcattactctaaaatatataatgaataatccagattttaaaactacgtatgcagaagtactcggttccagaatagccgatatagatattaaacaagtgatacgtaagaatatactacaattgtctaatgatatccgcgaacgatatttgtgaaaatattaaaaaaaaatactttttttattaaatgacgtcgcttcgcgaatttagaaaattatgctgtgatatatatcacgcatcaggatataaagaaaaatctaaattaattagagactttataacagatagggatgataaatatttgatcattaagctattgcttcccggattagacgatagaatttataacatgaacgataaacaaattataaaattatatagtataatatttaaacaatctcaggaagatatgctacaagatttaggatacggatatataggagacactattaggactttcttcaaagagaacacagaaatccgtccacgagataaaagcattttaactttagaagaagtggatagttttttaactacgttatcatccgtaactaaagaatcgcatcaaataaaattattgactgatatcgcatccgtttgtacatgtaatgatttaaaatgtgtagtcatgcttattgataaagatctaaaaattaaagcgggtcctcggtacgtacttaacgctattagtcctaatgcctatgatgtgtttagaaaatctaataacttgaaagagataatagaaaatgcatctaaacaaaatctagactctatatctatttctgttatgactccaattaatcccatgttagcggaatcgtgtgattctgtcaataaggcgtttaaaaaatttccatcaggaatgtttgcggaagtcaaatacgatggtgaaagagtacaagttcataaaaataataacgagtttgccttctttagtagaaacatgaaaccagtactctctcataaagtggattatctcaaagaatacataccgaaagcatttaaaaaagctacgtctatcgtattggattctgaaattgttcttgtagacgaacataatgtaccgctcccgtttggaagtttaggaatacacaaaaagaaagaatataaaaactctaacatgtgtttgttcgtgtttgactgtttgtactttgatggattcgatatgacggacattccattgtacgaacgaagatcttttctcaaagatgttatggttgaaatacccaatagaatagtattctcagagttgacgaatattagtaacgagtctcagttaactgacgtattggatgatgcactaacgagaaaattagaaggattggtcttaaaagatattaatggagtatacgaaccgggaaagagaagatggttaaaaataaagcgagactatttgaacgagggttccatggcagattctgccgatttagtagtactaggtgcttactatggtaaaggagcaaagggtggtatcatggcagtctttctaatgggttgttacgacgatgaatccggtaaatggaagacggttaccaagtgttcaggacacgatgataatacgttaagggagttgcaagaccaattaaagatgattaaaattaacaaggatcccaaaaaaattccagagtggttagtagttaataaaatctatattcccgattttgtagtagaggatccgaaacaatctcagatatgggaaatttcaggagcagagtttacatcttccaagtcccataccgcaaatggaatatccattagatttcctagatttactaggataagagaggataaaacgtggaaagaatctactcatctaaacgatttagtaaacttgactaaatcttaatagttacatacaaactgaaaattaaaataacactatttagttggtggtcgccatggatggtgttattgtatactgtctaaacgcgctagtaaaacatggcgaggaaataaatcatataaaaaatgatttcatgattaaaccatgttgtgaaagagtttgtgaaaaagtcaagaacgttcacattggcggacaatctaaaaacaatacagtgattgcagatttgccatatctggataatgcggtatccgatgtatgcaattcactgtataaaaagaatgtatcaagaatatccagatttgctaatttgataaagatagatgacgatgacaagactcctactggtgtatataattattttaaacctaaagatgccattcctgttattatatccataggaaaggatagagatgtttgtgaactattaatctcatcagacatatcgtgtgcatgcgtggagttaaattcatatcacgtagccattcttcccatggatgtttccttttttaccaaaggaaatgcatcattgattattctcctgtttgatttctctatcgatgcggcacctctcttaagaagtgtaaccgataataatgttattatatctagacaccagcgtatacatgacgagcttccgagttccaattggttcaagttttacataagtataaagtccgactattgttctatattatatatggttgttgatggatctgtgatgcatgcgatagctgataatagaactcacgcaattattagcaaaaatatattagacaatactacgattaacgatgagtgtagatgctgttattttgaaccacagattaggattcttgatagagatgagatgctcaatggatcatcgtgtgatatgaacagacattgtattatgatgaatttacctgatgtaggcgaatttggatctagtatgttggggaaatatgaacctgacatgattaagattgctctttcggtggctggtaatttaataagaaatcgagactacattcccgggagacgaggatatagctactacgtttacggtatagcctctagataatttttttaagcacgaaataaaaaacataattttaaaccaatctatttcatactattttgtgtgatcaccatggacataaagatagatattagtatttctggtgataaatttacggtgactactaggagggaaaatgaagaaagaaaaaaatatctacctctccaaaaagaaaaaactactgatgttatcaaacctgattatcttgagtacgatgacttgttagatagagatgagatgtttactattctagaggaatattttatgtacagaggtctattaggcctcagaataaaatatggacgactctttaacgaaattagaaaattcgacaatgatgcggaagaacaattcggtactatagaagaactcaagcagaaacttagattaaattctgaagagggagcagataactttatagattatataaaggtacaaaaacaggatatcgtcaaacttactgtatacgattgcatatctatgataggattgtgtgcatgcgtggtagatgtttggagaaatgagaaactgttttctagatggaaatattgtttacgagcgattaaactgtttattgatgatcacatgcttgataagataaaatctatactgcagaatagactagtatatgtggaaatgtcatagaaagttaaaagttaatgagagcaaaaatatataaggttgtattccatatttgttatttttttctgtaatagttagaaaaatacattcgatggtctatctatcagattattatgtgttataaggtactttttctcataataaactagagtatgagtaagatagtgtttttcaaaacatataaatctaaaattgatggatgagatatacagctattaatttcgaaaatatattttaatctgataactttaaacatggatttttgatggtggtttaacgttttaaaaaaagattttgttattgtagtatatgataatattaaaagatggatataaagaatttgctgactgcatgtactattttttacattactacattggctacggcagatatacctacttcgtcactgccacacgctccggtaaacggggcatgtgacgagggagaatatcttgataagaggcataatcaatgttgtaatcagtgtccacctggagaatttgccaaggtcagatgtagtggtagtgataacacaaaatgtgaacgctgcccacctcatacatataccgcaatccccaattactctaatggatgtcatcaatgtagaaaatgcccaacaggatcatttgataaggtaaagtgtaccggaacacagaacagtaaatgttcgtgtcttcctggttggtattgcgctactgattcttcacagactgaagattgtcgagattgtataccaaaaaggagatgtccatgcggatactttggtggaatagatgaacaaggaaatcctatttgtaaatcgtgttgtgttggtgaatattgcgactacctacgtaattatagacttgatccatttcctccatgcaaactatctaaatgtaattaattatgattttgatgataatgttaccatacattatatcgctacttggttagtgtattattcagtatgaagacctattaataattacttatcttttgacgatcttgttataattataatataaaaatacttatggcatagtaactcataattgctgacgcgataaattcgtaataatctgttttgttcaaaggaatctacaggcataaaaataaaaatataatttataatatactcttacagcgcgccatcatgaataacagcagtaaattaattgctgttattaatggatttagaaatagtggacgattttgtgatattaatatagttattaatgatgaaaggataaacgctcacagactcatcctatctggagcctccgaatatttttccattctgttttccaataattttatcgattctaatgaatacgaagttaatctaagtcatttagattatcaaagcgtaaacgatttgatcgattacatttatgggatacctttgagcctaactaacgataacgtgaaatatattctttcaaccgctgattttttacaaattggatctgctattacggagtgtgaaaattacatacttaaaaatctttgttctagaaactgtatcgatttctacatatacgctgataaatataataacaagaaaatagaatcagcgtcgtttaacacaatattacaaaatattttgagactcatcaacgatgaaaactttaaatacttaacagaggaatcaatgataaaaattttaagcgatgatatgttaaatataaaaaatgaggatttcgccccactaattctcattaaatggttagagagtactcaacaaccatgcaccgtcgagttacttaaatgcctcagaatatcattgctttccccacaagttataaaatcactttatagtcatcgactggttagttcaatctacgaatgtataacattcttaaacaatatagcattcttggatgaatcatttcctagataccatagcatcgagttgatatctatcggtataagtaattcgcatgataagatttccataaactgctacaatcataaaaaaaatacatgggaaatgatatcttcacgtagatataggtgtagtttcgcagtggccgtcctggataatattatttatatgatgggtggatatgatcagtccccgtatagaagttcaaaggttatagcgtacaatacatgtacaaattcttggatatatgatataccagagctaaaatatcctcgttctaattgtgggggactggctgatgacgaatacatttattgtataggcggcatacgcgatcaggattcatcgttgacatctagtattgatagatggaagccatcaaaaccatattggcagaagtatgctaaaatgcgcgaaccaaaatgtgatatgggggttgcgatgttaaacggattaatatatgttataggtggaatcgttaaaggtgacacgtgtaccgacgcactagagagtttatcagaagatggatggatgaagcatcaacgtcttccaataaaaatgtccaatatgtcgacgattgttcatgatggcaagatttatatatctggaggttacaacaatagtagtgtagttaatgtaatatcgaatttagtccttagctataattcgatatatgatgaatggaccaaattatcatcattaaacattcctagaattaatcccgctctatggtcagcgcataataaattatatgtaggaggaggaatatctgatgatgttcgaactaatacatctgaaacatacgacaaagaaaaagattgttggacattggataatggtcacgtgttaccacgcaattatataatgtataaatgcgaaccgattaaacataaatatccattggaaaaaacacagtacacgaatgattttctaaagtatttggaaagttttataggtagttgatagaacaaaatacataattttgtaaaaataaatcactttttatactaatatgacacgattaccaatacttttgttactaatatcattagtatacgctacaccttttcctcagacatctaaaaaaataggtgatgatgcaactctatcatgtaatcgaaataatacaaatgactacgttgttatgagtgcttggtataaggagcccaattccattattcttttagctgctaaaagcgacgtcttgtattttgataattataccaaggataaaatatcttacgactctccatacgatgatctagttacaactatcacaattaaatcattgactgctagagatgccggtacttatgtatgtgcattctttatgacatcgcctacaaatgacactgataaagtagattatgaagaatactccacagagttgattgtaaatacagatagtgaatcgactatagacataatactatctggatctacacattcaccggaaactagttctgagaaacctgattatatagataattctaattgctcgtcggtattcgaaatcgcgactccggaaccaattactgataatgtagaagatcatacagacaccgtcacatacactagtgatagcattaatacagtaagtgcatcatctggagaatccacaacagacgagactccggaaccaattactgataaagaagatcatacagttacagacactgtctcatacactacagtaagtacatcatctggaattgtcactactaaatcaaccaccgatgatacgtacaatgataatgatacagtaccaccaactactgtaggcggtagtacaacctctattagcaattataaaaccaaggactttgtagaaatatttggtattaccgcattaattatattgtcggccgtggcaatattctgtattacgtattatatatgtaataaacgttcacgtaaatacaaaacagagaacaaagtctagatttttgacttacataaatgtctgggatagtaaaatctatcatattgagcgggccatctggtttaggaaagacagccatagccaaaagactatgggaatatatttggatttgtggtgtcccataccactagatttcctcgtcctatggaacgagaaggtgtcgattaccattacgttaacagagaggccatctggaagggaatagccgccggaaactttctagaacatactgagtttttaggaaatatttacggaacttctaaaactgctgtgaatacagcggctattaataatcgtatttgtgtgatggatctaaacatcgatggcgttagaagtcttaaaaatacgtacctaatgccttactcggtgtatataagacctacctctcttaaaatggttgagaccaagcttcgttgtagaaacactgaagcggatgatgagattcatcgtcgtgtgatgttggcaaaaactgacatggatgaggcaggtgaagccggtctattcgacactattatcattgaagatgatgtgaatttagcatatagtaagttaattcagatactacaggaccgtattagaatgtattttaacactaattagagacttaagacttaaaacttgataattaataatataactcgtttttatatgtggctatttcaacgtctaatgtattagttaaatattaaaacttaccacgtaaaacttaaaatttaaaatgatatttcattgacagatagatcacacattatgaactttcaaggacttgtgttaactgacaattgcaaaaatcaatgggtcgttggaccattaataggaaaaggtggatttggtagtatttatactactaatgacaataattatgtagtaaaaatagagcccaaagctaacggatcattatttaccgaacaggcattttatactagagtacttaaaccatccgttatcgaagaatggaaaaaatctcacaatataaagcacgtaggtcttatcacgtgcaaggcatttggtctatacaaatccattaatgtggaatatcgattcttggtaattaatagattaggtgcagatctagatgcggtgatcagagccaataataatagattaccaaaaaggtcggtgatgttgatcggaatcgaaatcttaaataccatacaatttatgcacgagcaaggatattctcacggagatattaaagcgagtaatatagtcttggatcaaatagataagaataaattatatctagtggattacggattggtttctaaattcatgtctaatggcgaacatgttccatttataagaaatccaaataaaatggataacggtactctagaatttacacctatagattcgcataaaggatacgttgtatctagacgtggagatctagaaacacttggatattgtatgattagatggttgggaggtatcttgccatggactaagatatctgaaacaaagaattgtgcattagtaagtgccacaaaacagaaatatgttaacaatactgcgactttgttaatgaccagtttgcaatatgcacctagagaattgctgcaatatattaccatggtaaactctttgacatattttgaggaacccaattacgacaagtttcggcacatattaatgcagggtgtatattattaagtgtggtgtttggtcgataaaaattaaaaaataacttaatttattattgatctcgtgtgtacaaccgaaatcatggcgatgttttacgcacacgctctcggtgggtacgacgagaatcttcatgcctttcctggaatatcatcgactgttgccaatgatgtcaggaaatattctgttgtgttagtttataataacaagtatgacattgtaaaagacaaatatatgtggtgttacagtcaggtgaacaagagatatattggagcactgctgcctatgtttgagtgcaatgaatatctacaaattggagatccgatccatgatcaagaaggaaatcaaatctctatcatcacatatcgccacaaaaactactatgctctaagcggaatcgggtacgagagtctagacttgtgtttggaaggagtagggattcatcatcacgtacttgaaacaggaaacgctgtatatggaaaagttcaacatgattattctactatcaaagagaaggccaaagaaatgagtacacttagtccaggacctatcatcgattaccacgtctggataggagattgtatctgtcaagttactgctgtggacgtacatggaaaggaaattatgaaaatgagattcaaaaagggtgcggtgcttccgatcccaaatctggtaaaagttaaacttggggagaatgatacagaaaatctttcttctactatatcggcgacaccatcgaggtaaccacctctctggaagacagcgtgaataatgtactcatgaaacgtttggaaactatacgccatatgtggtctgttgtatatgatcattttgatattgtgaatggtaaagaatgctgttatgtgcatacgcatttgtctaatcaaaatcttataccgagtactgtaaaaacaaatttgtacatgaagactatgggatcatgcattcaaatggattccatggaagctctagagtatcttagcgaactgaaggaatcaggtggatggagtcccagaccagaaatgcaggaatttgaatatccagatggagtggaagacactgaatcaattgagagattggtagaggagttcttcaatagatcagaacttcaggctggtgaatcagtcaaatttggtaattctattaatgttaaacatacatctgtttcagctaagcaactaagaacacgtatacggcagcagcttccttctatactctcatcttttaccaacacaaagggtggatatttgttcattggagttgataataatacacacaaagtatttggattcacggtgggttacgactacctcagactgatagagaatgatatagaaaagcatatcaaaagactttgtgttgtgtatttctgtgagaagaaagaggacatcaagtacgcgtgtcgattcatcaaggtatataaacctggggatgaggctacctcgacatacgtgtgcgctatcaaagtggaaagatgctgttgtgctgtgtttgcagattggccagaatcatggtatatggatactaatggtatcaagaagtattctccagatgaatgggtgtcacatataaaattttaattaatgtaatagagaacaaataataaggttgtaatatcatatagacaataactaacaattaattagtaactgttatctcttttttaactaaccaactaactatatacctattaatacatcgtaattatagttcttaacatctattaatcattgattcgcttctttaattttttataaactaacattgttaattgaaaagggataacatgttacagaatataaattatatatggatttttttaaaaaggaaatacttgactggagtatatatttatctcttcattatatagcacgcgtgttttccaatttttccacatcccatataatacaggattataatctcgttcgaacatacgagaaagtggataaaacaatagttgattttttatctaggttgccaaatttattccatattttagaatatggggaaaatattctacatatttattctatggatgatgctaatacgaatattataattttttttctagatagagtattaaatattaataagaacgggtcatttatacacaatctcgggttatcatcatccattaatataaaagaatatgtatatcaattagttaataatgatcatccagataataggataagactaatgcttgaaaatggacgtagaacaagacattttttgtcctatatatcagatacagttaatatctatatatgtattttaataaatcatggattttatatagatgccgaagacagttacggttgtacattattacatagatgtatatatcactataagaaatcagaatcagaatcatacaatgaattaattaagatattgttaaataatggatcagatgtagataaaaaagatacgtacggaaacacaccttttatcctattatgtaaacacgatatcaacaacgtggaattgtttgagatatgtttagagaatgctaatatagactctgtagactttaatagatatacacctcttcattatgtctcatgtcgtaataaatatgattttgtaaagttattaatttctaaaggagcaaatgttaatgcgcgtaataaattcggaactactccattttattgtggaattatacacggtatctcgcttataaaactatatttggaatcagacacagagttagaaatagataatgaacatatagttcgtcatttaataatttttgatgctgttgaatctttagattatctattatccagaggagttattgatattaactatcgtactatatacaacgaaacatctatttacgacgctgtcagttataatgcgtataatacgttggtctatctattaaacaaaaatggtgattttgagacgattactactagtggatgtacatgtatttcggaagcagtcgcaaacaacaacaaaataataatggaagtactattgtctaaacgaccatctttgaaaattatgatacagtctatgatagcaattactaaacataaacagcataatgcagatttattgaaaatgtgtataaaatatactgcgtgtatgaccgattatgatactcttatagatgtacagtcgctacagcaatataaatggtatattttaagatgtttcgatgaaatagatatcatgaagagatgttatataaaaaataaaactgtattccaattagttttttgtatcaaagacattaatactttaatgagatacggtaaacatccttctttcgtgaaatgcactagtctcgacgtatacggaagtcgtgtacgtaatatcatagcatctattagatatcgtcagagattaattagtctattatccaagaagctggatcctggagataaatggtcgtgttttcctaacgaaataaaatataaaatattggaaaactttaacgataacgaactatccacatatctaaaaatcttataaacattattaaaatataaaatctaagtaggataaaatcacactacatcattgtttccttttagtgctcgacagtgtatactatttttaacgctcataaataaaaatgaaaacgatttccgttgttacgttgttatgcgtactacctgctgttgtttattcaacatgtactgtacccactatgaataacgctaaattaacgtctaccgaaacatcgtttaatgataaccagaaagttacgtttacatgtgatcagggatatcattctttggatccaaatgctgtctgtgaaacagataaatggaaatacgaaaatccatgcaaaaaaatgtgcacagtttctgattatgtctctgaactatataataaaccgctatacgaagtgaattccaccatgacactaagttgcaacggcgaaacaaaatattttcgttgcgaagaaaaaaatggaaatacttcttggaatgatactgttacgtgtcctaatgcggaatgtcaacctcttcaattagaacacggatcgtgtcaaccagttaaagaaaaatactcatttggggaatatatgactatcaactgtgatgttggatatgaggttattggtgcttcgtacataagttgtacagctaattcttggaatgttattccatcatgtcaacaaaaatgtgatatgccgtctctatctaacggattaatttccggatctacattttctatcggtggcgttatacatcttagttgtaaaagtggttttacactaacggggtctccatcatccacatgtatcgacggtaaatggaatcccatactcccaatatgtgtacgaactaacgaaaaatttgatccagtggatgatggtcccgacgatgagacagatttgagcaaactctcgaaagacgttgtacaatatgaacaagaaatagaatcgttagaagcaacttatcatataatcatagtggcgttgacaattatgggcgtcatatttttaatctccgttatagtattagtttgttcctgtgacaaaaataatgaccaatataagttccataaattgctaccgtaaatataaatccgttaaaataattaataatttaataacaaacaagtatcaaaagattaaagacttatagctagaatcaattgagatgtcttcttcagtggatgttgatatctacgatgccgttagagcatttttactcaggcactattataacaagagatttattgtgtatggaagaagtaacgccatattacataatatatacaggctatttacaagatgcgccgttataccgttcgatgatatagtacgtactatgccaaatgaatcacgtgttaaacaatgggtgatggatacacttaatggtataatgatgaatgaacgcgatattactgtaagcgttggcaccggaatactattcatggaaatgtttttcgattacaataaaaatagtatcaacaatcaactaatgtatgatataattaatagcgtatctataattctagctaatgagagatatagaagcgcttttaacgacgatggtatatacatccgtagaaatatgattaacaagttgtacggatacgcatctctaactactattggcacgatcgctggaggtgtttgttattatctgttgatgcatctagttagtttgtataaataattatttcaatatactagttaaaattttaagattttaaatgtataaaaaactaataacgtttttatttgtaataggtgcattagcatcctattcgaataatgagtacactccgtttaataaactgagtgtaaaactctatatagatggagtagataatatagaaaattcatatactgatgataataatgaattggtgttaaattttaaagagtacacaatttctattattacagagtcatgcgacgtcggatttgattccatagatatagatgttataaacgactataaaattattgatatgtataccattgactcgtctactattcaacgcagaggtcacacgtgtagaatatctaccaaattatcatgccattatgataagtacccttatattcacaaatatgatggtgatgagcgacaatattctattactgcagagggaaaatgctataaaggaataaaatatgaaataagtatgatcaacgatgatactctattgagaaaacatactcttaaaattggatctacttatatatttgatcgtcatggacatagtaatacatattattcaaaatatgatttttaaaaatttaaaatatattatcacttcagtgacagtagtcaaataacaaacaacaccatgagatatattataattctcgcagttttgttcattaatagtatacatgctaaaataactagttataagtttgaatccgtcaattttgattccaaaattgaatggactggggatggtctatacaatatatcccttaaaaattatggcatcaagacgtggcaaacaatgtatacaaatgtaccagaaggaacatacgacatatccgcatttccaaagaatgatttcgtatctttctgggttaaatttgaacaaggcgattataaagtggaagagtattgtacgggactatgcgtcgaagtaaaaattggaccaccgactgtaacattgactgaatacgacgaccatatcaatttgtacatcgagcatccgtatgctactagaggtagcaaaaagattcctatttacaaacgcggtgacatgtgtgatatctacttgttgtatacggctaacttcacattcggagattctaaagaaccagtaccatatgatatcgatgactacgattgcacgtctacaggttgcagcatagactttgtcacaacagaaaaagtgtgcgtgacagcacagggagccacagaagggtttctcgaaaaaattactccatggagttcgaaagtatgtctgacacctaaaaagagtgtatatacatgcgcaattagatccaaagaagatgttcccaatttcaaggacaaaatggccagagttatcaagagaaaatttaatacacagtctcaatcttatttaactaaatttctcggtagcacatcaaatgatgttaccacttttcttagcatgcttaacttgactaaatattcataactaatttttattaatgatacaaaaacgaaataaaactgcatattatacactggttaacgcccttataggctctaaccattttcaagatgaggtccctgattatagtccttctgttcccctctatcatctactccatgtctattagacgatgtgagaagactgaagaggaaacatggggattgaaaatagggttgtgtataattgccaaagatttctatcccgaaagaactgattgcagtgttcatctcccaactgcaagtgaaggattgataactgaaggcaatggattcagggatatacgaaacaccgataaattataaaaaaagcaatgtgtccgctgtttccgttaataatactattttcgtaactggcggattattcataaataactctaatagcacgatcgtggttaacaatatggaaaaacttgacatttataaagacaaacaatggtcgattatagaaatgcctatggctagggtatatcacggcatcgactcgacatttggaatgttatattttgccggaggtctatccgttaccgaacaatatggtaatttagagaaaaacaacgagatatcttgttacaatcctagaacgaataagtggtttgatatttcatatactatttataagatatccatatcatcattgtgtaaactaaataacgtcttctatgtatttagtaaggacattggatatgtggaaaagtatgatggtgcatggaagttagtacatgatcgtctccccgctataaaggcattatcaacttctccttattgattgaaaatgaaaatataaatagtttttatgtatagcagtattaccctatagttttattgcttactactaacatggatacagatgttacaaatgtagaagatatcataaatgaaatagatagagagaaagaagaaatactaaaaaatgtagaaattgaaaataataaaaacattaacaagaatcatccaagtggatatattagagaagcactcgttattaatactagtagtaatagtgattccattgataaagaagttatagaatgtatctgtcacgatgtaggaatatagatcatatctactaatttttataatcgatacaaaacataaaaaacaactcgttattacatagcaggcatggaatccttcaagtattgttttgataacgatggcaagaaatggattatcggaaatactttatattctggtaattcaatactctataaggtcagaaaaaatttcactagttcgttctacaattacgtaatgaagatagatcacaaatcacacaagccattgttgtctgaaatacgattctatatatctgtattggatcctttgactatcgacaactggacacgggaacgtggtataaagtatttggctattccagatctgtatggaattggagaaaccgatgattatatgttcttcgttataaagaattcgggaagagtattcgccccaaaggatactgaatcagtcttcgaagcatgcgtcactatgataaacacgttagagtttatacactctcaaggatttacccatggaaaaatagaaccgaggaatatactgattagaaataaacgtctttcactaattgactattctagaactaacaaactatacaagagtggaaactcacatatagattacaacgaggacatgataacttcaggaaatatcaattatatgtgtgtagacaatcatcttggagcaacagtttcaagacgaggagatttagaaatgttgggatattgcatgatagaatggttcggtggcaaacttccatggaaaaacgaaagtagtataaaagtaataaaacaaaaaaaagaatataaaaaatttatagctactttctttgaggactgttttcctgaaggaaatgaacctctggaattagttagatatatagaattagtatacacgttagattattctcaaactcctaattatgacagactacgtaaactgtttatacaagattgaaattatattcttttttttatagagtgtggtagtgttacggatatctaatattaatattagactatctctatcgcgctacacgaccaatatcgattactatggatatcttctatgaaaggagagaatgtatttatttctccagcgtcaatctcgtcagtattgacaatactgtattatggagctaatggatccactgctgaacagctatcaaaatatgtagaaacggaggagaacacggataaggttagcgctcagaatatctcattcaaatccatgaataaagtatatgggcgatattctgccgtgtttaaagattcctttttgagaaaaattggcgataagtttcaaactgttgacttcactgattgtcgcactatagatgcaatcaacaagtgtgtagatatctttactgaggggaaaatcaatccactattggatgaaccattgtctcctagcaattagtgccgtatactttaaagcaaaatggttgacgccattcgaaaaggaatttaccagtgattatcccttttacgtatctccgacggaaatggtagacgtaagtatgatgtctatgtacggcaaggcatttaatcacgcatctgtaaaagaatcattcggcaacttttcaatcatagaactgccatatgttggagatactagtatgatggtcattcttccagacaagattgatggattagaatccatagaacaaaatctaacagatacaaattttaagaaatggtgtgactttatggatgctatgtttatagatgttcacattcccaagtttaaggtaacaggctcgtataatctggtggatactctagtaaagtcaggactgacagaggtgttcggttcaactggagattatagcaatatgtgtaatttagatgtgagtgtcgacgctatgatccacaaaacgtatatagatgtcaatgaagagtatacagaagcagctgcagcaacttctgtactagtggcagactgtgcatcaacaattacaaatgagttctgtgcagatcatccgttcatctatgtgattaggcatgttgatggaaaaattcttttcgttggtagatattgctctccgacaactaattgttaaccattttttttaaaaaaaatagaaaaaacatgtggtattagtgcaggtcgttgttcttccaattgcaattggtaagatgacggccaactttagtacccacgtcttttcaccacagcactgtggatgtgacagactgaccagtattgatgacgtcaaacaatgtttgactgaatatatttattggtcgtcctatgcataccgcaacaggcaatgcgctggacaattgtattccacactcctctcttttagagatgatgcggaattagtgttcatcgacattcgcgagctggtaaaaaatatgccgtgggatgatgtcaaagattgtacagaaatcatccgttgttatataccggatgagcaaaaaaccatcagagagatttcggccatcatcggactttgtgcatatgctgctacttactggggaggtgaagaccatcccactagtaacagtctgaacgcattgtttgtgatgcttgagatgctaaattacgtggattataacatcatattccggcgtatgaattgatgagttgtacatcttgacattttctttcttctcttctccctttcttctcttctcccttcctccctcttctccctttcccagaaacaaacttttttacccactataaaataaaatgagtatactacctgttatatttctttctatatttttttattcttcattcgttcagacttttaacgcgtctgaatgtatcgacaaagggcaatattttgcatcattcatggagttagaaaacgagccagtaatcttaccatgtcctcaaataaatacgctatcatccggatataatatattagatattttatgggaaaaacgaggagcggataatgatagaattataccgatagataatggtagcaatatgctaattctgaacccgacacaatcagactctggtatttatatatgcattaccacgaacgaaacctactgtgacatgatgtcgttaaatttgacaatcgtgtctgtctcagaatcaaatatagattttatctcgtatccacaaatagtaaatgagagatctactggcgaaatggtatgtcccaatattaatgcatttattgctagtaacgtaaacgcagatattatatggagcggacatcgacgccttagaaataagagacttaaacaacggacacctggaattattaccatagaagatgttagaaaaaatgatgctggttattatacatgtgttttagaatatatatacggtggcaaaacatataacgtaaccagaattgtaaaattagaggtacgggataaaataataccttctactatgcaattaccagatggcattgtaacttcaataggtagtaatttgactattgcatcgttgagacctcccacaacggatgcagacgtcttttggataagtaatggtatgtattacgaagaagatgatggggacggaaacggtagaataagtgtagcaaataaaatctatatgaccgataagagacgtgttattacatcccggttaaacattaatcctgtcaaggaagaagatgctacaacgtttacgtgtatggcgtttactattcctagcatcagcaaaacagttactgttagtataacgtgaatgtatgttgttacatttccatgtcaattgagtttataagaatttttatacattatcttccaacaaacaattgacgaacgtattgctatgattaactcccacgatactatgcatattattaatcattaacttgcagactatacctagtgctattttgacatactcatgttcttgtgtaattgcggtatctatattattaaagtacgtaaatctagctatagttttattatttaattttagataatataccgtctccttatttttaaaaattgccacatcctttattaaatcatgaatgggaatttctatgtcatcgttagtatattgtgaacaacaagagcagatatctataggaaagggtggaatgcgatacattgatctatgtagttttaaaacacacgcgaactttgaagaatttatataaatcattccatcgatacatccttctatgttgagatgtatatatccaggaattcgtttattaatatcgggaaatgtataaactaaaacattgcccgaaagcggtgcctctatctgcgttatatccgttcttaacttacaaaatgtaaccaatacctttgcatgacttgttttgttcggcaacgttagtttaaacttgacgaatggattaattacaatagcatgatccgcgcatctattaagtttttttactttaacgcccttgtatgtttttacagagactttatctaaatttctagtgcttgtatgtgttataaatataacgggatatagaaccgaatcacctaccttagatacccaattacattttatcagatccagataataaacaaattttgtcgccctaactaattctatattgttatatattttacaattggttatgatatcatgtaataacttggagtctaacgcgcatcgtcgtacgtttatacaattgtgatttagtgtagtatatctacacatgtatttttccgcactatagtattctggactagtgataaaactatcgttatatctatcttcaatgaactcatcgagatattgctctctgtcatattcatacacctgcataaactttctagacatcttacaatccgtgttattttaggatcatatttacatatttacgggtatatcaaagatgttagattagttaatgggaatcgtctataataatgaatattaaacaattatatgaggacttttaccacaaagcatcataaaaatgagtcgtcgtctgatttatgttttaaatatcaaccgcaaatcaactcataaaatacaagagaatgaaatatatacatattttagtcattgcaatatagaccatacttctacagaacttgattttgtagttaaaaactatgatctaaacagacgacaacctgtaactgggtatactgcactacactgctatttgtataataattactttacaaacgatgtactgaagatattattaaatcatggagtggatgtaacgatgaaaaccagtagcggacgtatgcctgtttatatattgcttactagatgttgtaatatttcacatgatgtagtgatagatatgatagacaaagataaaaaccacttattacatagagactattccaacctattactagagtatataaaatctcgttacatgttattaaaggaagaggatatcgatgagaacatagtatccactttattagataagggaatcgatcctaactttaaacaagacggatatacagcgttacattattattatttgtgtctcgcacacgtttataaaccaggtgagtgtagaaaaccgataacgataaaaaaggccaagcgaattatttctttgtttatacaacatggagctaatctaaacgcgttagataattgtggtaatacaccattccatttgtatcttagtattgaaatgtgtaataatattcatatgactaaaatgctgttgacttttaatccgaatttcgaaatatgtaataatcatggattaacgcctatactatgttatataacttccgactacatacaacacgatattcttgttatgttaatacatcactatgaaacaaatgttggagaaatgccgatagatgagcgtcgtatgatcgtattcgagtttatcaaaacatattctacacgtccggcagattcgataacttatttgatgaataggtttaaaaatataaatatttatacccgctatgaaggaaagacattattacacgtagcatgtgaatataataatacacacgtaatagattatcttatacgtatcaacggagatataaatgcgttaaccgacaataacaaacacgctacacaactcattatagataacaaagaaaattccccatataccattaattgtttactgtatatacttagatatattgtagataagaatgtgataagatcgttggtggatcaacttccatctctacctatctttcgtcgcttatcatactagtcatatcctaaatgttgatcatattccaccaaatgattgtgaaagagattgagattaaatcgtctaacaaacaattagtttttatgacattaacatataataaataaattaatcattattgacttaacgatgacgaaagttatcatcatcttaggattcttgattattaatacaaattcattgtctatgaaatgtgaacaaggtgtctcatattataattcacaagaattaaagtgttgtaaactatgtaagccaggaacatattcagatcatcgatgtgataaatacagcgataccatttgtggacattgtccgagtgacacattcacgtcaatatataatcgttctccttggtgtcatagttgtagaggtccatgtggtactaatcgagtagaggtcacaccttgtacacctaccacaaatagaatctgtcattgtgactcgaatagttattgtctccttaaagcttctgatggtaactgtgttacatgtgctcctaaaacaaaatgtggtcgtgggtatggaaagaaaggagaagatgaaatgggtaataccatttgtaagaaatgtcggaagggtacttattcagatattgtatctgactctgatcaatgtaaaccaatgacaagataagacttactcgcatctactggatagacataaaatatcctcctcgtaataatgaaatataaatatacactaattattaatatcaataacaatcgagtattaatatataggtcatttttaaatcccttttgggttccgtcccaaacggcgtttcggtctgcgtcgccgccatggccatgccgagcctctccgcgtgctcctccatcgaggacgacttcaactatggcagctcggtggcgtctgccagcgtgcacatacgaatggcatttctaagaaaagtctacggtatcctttgtctacaatttcttttaacaacggcaacaactgcagtatttttatactttgactgcatgcggacatttatacaagggagtcctgttctaatattggcatcaatgttcggatctataggcttgattttcgcattgactttacacagacataaacatcccctgaatctgtacctgctttgtggatttacactgtcggaatctctaacgctggcctctgttgttactttctatgatgtgcatgtcgttatgcaagctttcatgctgactactgcagcgtttcttgctctgactacatatactctacaatcaaagagagatttcagtaaacttggagcaggattgtttgctgctttgtggattttaattttgtcaggactcttggggatatttgtgcaaaatgagacagtggagctggtcctgtctgcttttggggcccttgtattctgtggattcattatctatgacacgcactcactaatacataagctctcgcctgaagagtatgtgttagcctctatcaatctctacttggatatcatcaatctgttcttgcatctgttgcagcttttggaagtatctaataagaaataaagtttaaaatagaattaataaaaacatataggtcattttttaaacatggattggaaaccaaggtagttagttaatacacacaagatatatttttttcacatcatccacccatgggtaacaccaaggttgttagttaataatatacaagatattttttctcactctgatccatgtaaaccaaggacgagataagacactctcattcctcatccacaacccattaaaaaaatggaaattaaagccctctattagcataaacggctacaggtctaccatcaggttaaccttcgtctaccttcacaatggcctttccttgtgcccagttcagaccctgtcattgccacgctactaaggactccctgaataccgtggccgacgtcagacattgtctgactgaatacatcctgtgggtttctcatagatggacccatagagaaagcgctcatctgttctccgtgtggtctcggaacatattctcacaccgtctcttccgcagataaatgcgaacccgtacccagaaatacctttaactatatcgatgtggaaattaatctgtatcccgtcaacgacacatcgtgtactcggacgaccactaccggtctcagcgaatccatctcaacgtcggaactaactattactatgaatcataaagactgtaatcccgtctttcgtgatggatacttctccgttcttaataaggtagcgacttcaggtttctttacaggagaaaggtgtgcactctgaatttcgagattaaatgcaataacaaagattcttcctccaaacagttaacgaaagcaaagaatgatactatcatgccgcattcggagacagtaactctagtgggcgacatctatatactatatagtaataccaatactcaagactacgaaactgatacaatctcttatcatgtgggtaatgttctcgatgtcgatagccatatgcccggtagttgcgatatacataaactgatcactaattccaaacccacccactttttatagtaagtttttcacccataaataataaatacaataattaatttctcgtaaaagtagaaaatatattctaatttattgcacggtaaggaagtagaatcataaagaacagtactcaatcaatagcaattatgaaacaatatatcgtcctggcatgcatgtgcctggcggcagctgctatgcctgccagtcttcagcaatcatcctcatcctcctcctcgtgtacggaagaagaaaacaaacatcatatgggaatcgatgttattatcaaagtcacaaagcaagaccaaacaccgaccaatgataagatttgccaatccgtaacggaaattacagagtccgagtcagatccagatcccgaggtggaatcagaagatgattccacatcagtcgaggatgtagatcctcctaccacttattactccatcatcggtggaggtctgagaatgaactttggattcaccaaatgtcctcagattaaatccatctcagaatccgctgatggaaacacagtgaatgctagattgtccagcgtgtccccaggacaaggtaaggactcatgaagaagctcttgctatgatcaaagactgtgaggtgtctatcgacatcagatgtagcgaagaagagaaagacagcgacatccagtactcgggtctaacatctctcataagaaagtgagttacgaagatatcatcggttcaacgatcgtcgatacaaaatgtgtcaagaatctagagtttagcgttcgtatcggagacatgtgcaaggaatcatctgaacttgaggtcaaggatggattcaagtatgtcgacggatcggcatctgaaggtgcaaccgatgatacttcactcatcgattcaacaaaactcaaagcgtgtgtctgaatcgataactctattcatctgaaattggatgagtagggttaatcgaacgattcaggcacaccacgaattaaaaaagtgtaccggacactatattccggtttgcaaaacaaaaatgttcttaactacattcacaaaaagttacctctcgcgacttcttctttttctgtctcaatagtgtgatacgattatgacactattcctattcctattcctatttcctttcagagtatcacaaaaatattaaacctctttctgatggtctcataaaaaaagttttacaaaaatatttttattctctttctctctttgatggtctcataaaaaaagttttacaaaaatatttttattctctttctctctttgatggtctcataaaaaaagttttacaaaaatatttttattctctttctctctttgatggtctcataaaaaaagttttacaaaaatatttttattctctttctctctttgatggtctcataaaaaaagttttacaaaaatatttttattctctttctctctttgatggtctcataaaaaaagttttacaaaaatatttttattctctttctctctttgatggtctcataaaaaaagttttacaaaaatatttttattctctttctctctttgatggtctcataaaaaaagttttacaaaaatatttttattctctttctctctttgatggtctcataaaaaaagttttacaaaaatatttttattctctttctctctttgatggtctcataaaaaaagttttacaaaaatatttttattctctttctctctttgatggtctcataaaaaaa

SEQ ID NO: 56 - DNA, 193964 bp, Vaccinia virus
  LIVP 2.1.1 strain
gagatagttagtctagatatttttcttagtacaaaagtcaatgttttaaaatatatggacaagaatttgtctgtataaaaacttgtgtgaaattttgtaccaaagaaaaaatgtgagcagtatcccctacatggattttactagatcatttatataccaaaaaatattatacgatctacgttttattatatgattttaacgtgtaaattataaacattattttatgatatacaattgtctggtaacctagatgggcataggggatgttgataagctcgacgagtatatgttgttggacgttattgtttaagaaatagttgatgcatcagaaagagaataaaaaatattttagtgagaccatcgaagagagaaagagataaaacttttttacgactccatcagaaagaggtttaatatttttgtgagaccatcgaagagagaaagagaataaaaatattttatgactccattgaagagagaaaaagaaaatgagaatgagaataaaaatattttagtgacaccatcagaaagaggtttaatatttttgtgagaccatcgaagagagaaagagaataaaaatattttatgactccattgaagagagaaagagaaaatgagaatgagaataaaaatattttagtgacaccatcagaaagaggtttaatattttttatgagaccatcaaagagagaaagaaaataaaaatatttttgtaaaactttttttatgagaccatcaaagagagaaagagaataaaaatatttttgtaaaactttttttatgagaccatcaaagagagaaagagaataaaaatatttttgtaaaactttttttatgagaccatcaaagagagaaagagaataaaaatatttttgtaaaactttttttatgagaccatcaaagagagaaagagaataaaaatatttttgtaaaactttttttatgagaccatcaaagagagaaagagaataaaaatatttttgtaaaactttttttatgagaccatcaaagagagaaagagaataaaaatatttttgtaaaactttttttatgagaccatcaaagagagaaagagaataaaaatatttttgtaaaactttttttatgagaccatcaaagagagaaagagaataaaaatatttttgtaaaactttttttatgagaccatcaaagagagaaagagaataaaaatatttttgtaaaactttttttatgagaccatcaaagagagaaagagaataaaaatatttttgtaaaactttttttatgagaccatcagaaagaggtttaatatttttgtgatactctgaaaggaaataggaataggaataggaatagtgtcataatcgtatcacactattgagacagaaaaagaagaagtcgcgagaggtaactttttgtgaatgtagttaagaacatttttgttttgcaaaccggaatatagtgtccggtacacttttttaattcgtggtgtgtctgaatcgttcgattaaccctactcatccaatttcagatgaatagagttatcgattcagacacacgctttgagttttgttgaatcgatgagtgaagtatcatcggttgcaccttcagatgccgatccgtcgacatacttgaatccatccttgacctcaagttcagatgattccttgcacatgtctccgatacgaacgctaaactctagattcttgacgcattttgtatcgacgatcgttgaaccgatgatatcttcgtaactcactttcttatgagagatgttagacccgagtactggatgggtcttgatgtcgctgtctttctcttcttcgctacatctgatgtcgatagacacttcacagtctttgatcatagcaagagcttcttcatgagtgatcgcgggagagtccttaccttgtcctggggacacgctggacaatctagcattcactgtgtttccatcagcggattctgagatggatttaatctgaggacatttggtgaatccaaagttcattctcagacctccaccgatgatggagtaataagtggtaggaggatctacatcctcgactgatgtggaatcatcttctgattccacctcgggatctggatctgactcggactctgtaatttccgttacggattggcaaatcttatcattggtcggtgtttggtcttgctttgtgactttgataataacatcgattcccatatgatgtttgttttcttcttccgtacacgaggaggaggatgaggatgattgctgaagactggcaggcatagcagctgccgccaggcacatgcatgccaggacgatatattgtttcataattgctattgattgagtactgttctttatgattctacttccttaccgtgcaataaattagaatatattttctacttttacgagaaattaattattgtatttattatttatgggtgaaaaacttactataaaaagtgggtgggtttggaattagtgatcagtttatgtatatcgcaactaccgggcatatggctatcgacatcgagaacattacccacatgataagagattgtatcagtttcgtagtcttgagtattggtattactatatagtatatagatgtcgcccactagagttactgtctccgaatgcggcatgatagtatcattctttgctttcgttaactgtttggaggaagaatctttgttattgcatttaatctcgaaattcagagtgcacacctttctcctgtaaagaaacctgaagtcgctaccttattaagaacggagaagtatccatcacgaaagacgggattacagtctttatgattcatagtaatagttagttccgacgttgagatggattcgctgagaccggtagtggtcgtccgagtacacgacgtgtcgttgacgggatacaggttaatttccacatcgatatagttaaaggtattactgggtacgggttcgcatttatctgcggaagagacggtgtgagaatatgttccgagaccacacggagaacagatgacgtctccggatactccgtatcctattctacattttgtttgggaaacacatgccttgcatccggatgatcctttgagaagacaataatatccgggagagcattcacagattctattgtgagtcgtgttacacgatcgcgtcttccgttacaacttagacaagcgggtaaatgattattgcgagatgtgaaggtacccgaaccacacggcgtacattgtgtgttagtcttgctatcgcataatctggaagcgtatgttcccggacacaaattatggcgtttgtattcgttgtctttacactttccatcggatggtgcatgcggtgctatatctcttccgtttattattatacatgagagaaacaatatatacgagtataatacggacttcatgatttaataatgtagtaatcgtcgtcttgttcctgtttcctacttctccaatcatatagatattttctttctatcatggataatatttgtaatggttctttccgtacaacatactgtttagatgatattgcgcataatttccggaggcaaatacgatagtctagattgaccgatggtagactctaatttattgagtgctttgtcgacgagtttacttttacgctccatcgatagatggcactgttctatgagatcgtcgtacatgggaaatgaaatgtgactgtctgaatgtatggctttaagatagctgtgataccgtatacaggtcggtgtcggagattcgaatctctttaaggcgacttatgtcacgatgatggaatctatcttatcgaatgatatatttttcataaatacacttttatagtcctcgtttaaacagaatttactatgtagttccgcgaatgactcgtcccttaataggcagtaggctagtatcttttttacgtagtaatcgtcgtagggagagacatcttgtagaacaacgatttaatcataggtagagatactttcagtctgtggtggatgatgtcattcacaacatccgccttgtatatgatgtttctgttttcaaacaccaagtcgaataccgtctttagtcggaaggttgatgtcgtatccgatgtatgaggcaacattgttgttacaattttgaaaggcggtattatagtattcgtctttctgaatgtcgaacctatctaatagataccgtagtatattgagagtgtatccttgattatgttttatgaatagataaagtagatgttgtccttcttccttttgttcgtgccaattgagtaacattatgagaatatgacctgttgcacaatcgttccatgatgggtgtacaatcaagattattacgtatcctcgtatcggctcctcgagataaaagagcatacaccacacgaggactatgtttggtatactgttgaaggtaagtgtgtaaccgcgttaatgtttgctccataatctattatcgcgtagatgaatcgcttctcggctcgcatcttagtgtgacttaacttgtaataattgctttcgtagaacgtggatatgtgtttacagtagtaatgaagagaagtgagttcatcctcgtcggcgcaattagggtcggatcctttgtacagaacgtaatagtttaagctcccattgaatttatatctaagataacacagcaatagatcggatgatttactaaagtcatcaatggtgtccgttagtatatcaaagatcttgttatcgattgatagtggtcatccttgctatcaaagttacgcatgccgtggtgtaacaatatctttaatacagatggattaaatcgtgtattcatcgtatagcaatgtaatggagagttacctcgtttattcagatcgcagtgtttaataactagcttaaacagatgagacgatgtatccacatcaaagaacgtaaaatacatatgacagacattgttgacagaaacgtgaccttcattcttaccgtcgtccataaatacgttaggtatgtaccacatactgtcgcgaacgatgcgtacaatctcgtccatctcataatgatttactttttcataattaaagatgtgaaagaaaaccgaacaatatatttttttagtaatgtttatgcgagacatataaaataaactccgtgtttatgatgccggtaaatgtttttatcatcttggacggaatcgattttgtaatatgtcatggaaacaaatgaaacaggacattatcgctccatgataaattatttaatggagtaataaagtatctccatgggtaatttcgaaatcaagttatcgtctgtattaatgttgtccactatggagtcgatcctctcattgttctttacagtttctgtaatgatggacgttagttcttttttgtaccatttgatgtcggattctttgcgtatctcaatttgtggcgtttgcttcgtttaaataatatatcaaacatggagacgcctgatatgtagacattcttcattctattaatgtctactctatagcgctttagttccttatgacgaccggcgatatcatactttactttagaaggaaaatcatcatctaggattaaggcgtatctgatacaggcgaataatggttcaggatatagatagcgtatatctctattaaatgcgtcaatcatagtctctagagtgggatggtaactcagtaataaatcaactagcttcgttttgttttctctttggtaactgcttttctggatggccgtattgattatcgagcgtgacactcgctccatattccaataaccgctttgcaaattgtatattattgacatcgaccgcgtaatatagtagagttatcgatcatatctatatcatccatgtacttgcttagtatatcaaatacatctatcagtatggtttcataacagtgatacccgcaattattaaatctcgataatatcagaccgtacatacatagacggccattgttcgatacgtgatttacagccgcgtgtccatattttccacgataaaccttacgacgtttacatcgacgagattattattaacaaagtagtcgtgcagaggatagttgttgtccgttatctaacatgcatcgaacgaccatatcgccgtaatgtaagtagtttatcaacatggcttgtacatcctgttgtctaaatctctttagaatgttatcgatgatgtagtggttatattctctggaatcgtacgaagtaatactacgcattacgtcgacaagagtatgacgtctctcaataagaagattaacgatttccatgtctacattatatggggttactctaaatcgcttgtttagataatatagggctgacgtcgtatactctacacgtgtccacatcctttattaataataatttaacaatctctatatctatggttgagaaagaccagtagtattggatgggtaaagatcctccttcgtctctgccatggatggaaacattgttatcgatcaaacatttaattacatccttggatagagattgagattctctatgagacgatatatagtaatgaagagagttcttacacatatcactgtcgtacatacaggtacgaaatacgtaaccggtgctgtaacattctgatttaagaagccatagcaatacttctggtctcggattaggcgtcgttacgtatatatccaccaatccgagaccattgattgcataattcgtattcttggacggacgtatccgtttatccacaattaggtattttagcagacgtaagtcgatattatccgaatacagatcgaaatcatttatattcgacttgagttcgttagaggaatttgaatagctggatatcagtagatgcacaatctgagatttgacgtatctatgcttactgtatactcctagcggagttaatccttcgttgtttctacaaagtctctcgactccgcgagagaacaatcttaatgtctgtatcgcatttattggagacgtaacaatgtagcgcattgtttcctcgtctatctatatgttttgataagttgtgacacgtttcaatttctagttttatttttttgtacgtcacatcttcatccagtagacgacatagaatagtgcactctctaccacaataatccatagctattctggtgctaattattcctatttcacgaaggcaatcattcctcataagatgataaaaagtgtagtggagatttagtatttagcagtgcggatatgatccaagagggtgagatagtcgttctcgttcagaatctttcgcagcataagtagtatgtcgatatacttatcgttgaagactctttataaaagtctatttgtttatatttattgcggatagcagtatttccctataaaaagtatacgtcctgtggtgtctttaatcatgtacatgaatggatggtttatgtagaccttcgtacgatataccatcgaaaagttaatcgtaaatactcctgtaacggccgatgcttctgtatactcctcattaacatctataaacgtcgtatgtagaaatttttctacagtgatagtttcattacacatcttgctaaaatctgcataatatccgaatatattagtaagtcctaaattttctaaaatcggtaccagattatacggttctgtcatttccactttaaactttggcatatacaagtctatacttttagtagataacataccacaccattttttaaatttttcatctgttatatttttttctatgttatatataccttctatgtcgtccggtagtataattaccatactagagtttccctcgtatggaatatcgataatagagaatcctccgaataattcattaatatgtacatattgcaagttattctcggtacccaccatcatatcaacgctggtaactatattcttagaaatataaaacttgtctgtatatgtaagatgtttagaaaatggatatttccacattgctttaaaatggacggcgctaacaactgtcatacgagtattaatggatagcggactagtcaataaggaattaattttaccatttgtcattgtcttaacccattcgttgattagttcctttgtttggttagcattattaaagtttacagtttgaaaatcgtcttttattttttgtaggaaggaggcgtggaactcgatactatcgctaccgtatattttatttgcggtagctagtgtcgcacaatacggaatatctacctccatgtcatcattattgtcatcgggtgtattctcattcatattctctatatattttgatagttgttcagctgtagaaccagctgctccatgatttagaatagataaagtagataaaatggaaactggagaaatcaaaacattttcatcagggtgttttaagattagttctttaaagatatccatggtatagacctaacgataacgatatatatcataaataaataatgttaaatttcaatttatgtttgtaccccgtattcatacttaacaaattggtattgcgtacacaatcaatcatattacataccattaataatgcaagcataaaaaattgttagtagatgtttctaaatataggttccgtaagcaaagaatataagaatgaagcggtaatgataaaatcaatcgttatctaaaatgatcatactcatttattttattctattatattaacacatacatttttaacagcaacacattcaatattgtattgttatttttatattatttacacaattaacaatatattattagtttatattactgaattaataatataaaattcccaatcttgtcataaacacacactgagaaacagcataaacacagaatccatcaaaaatgttgataaattatctgatgttgttgttcgctgctatgataatcagatcattcgccgatagtggtaacgctatcgaaacgacattgccagaaattacaaacgctacaacagatattccagctatcagattatgcggtccagagggagatggatattgtttacacggtgactgtatccacgctagagatattgacggtatgtattgtagatgctctcatggttatacaggcattagatgtcagcatgtagtattagtagactatcaacgttcagaaaacccaaacactacaacgtcatatatcccatctcccggtattatgcttgtattagtaggcattattatgtgttgtctattatctgtttataggttcactcgacgaactaaactacctatacaagatatggttgtgccataatttttataaattttttttatgagtatttttacaaaaatgtataaagtgtatgtcttatgtatatttataaaaatgctaagtatgcgatgtatctatgttatttgtatttatctaaacaatacctctacctctagatattatacaaaaattttttatttcggcatattaaagtaaaatctagttaccttgaaaatgaatacagtgggtggttccgtatcaccagtaagaacataatagtcaaatacagtatccgattgagattttgcatacaatactagtctagaaagaaatttgtaatcatcttctgtgacgggagtccatatatctgtatcatcgtctagtttatcagtgtcccatgctatattcctgttatcatcattagttaatgaaaataactctcgtgcttcagaaaagtcaaatattgtatccatacatacatctccaaaactatcgcttatacgtttatctttaacgatacctatacctagatggttatttactaacagacattttccagatctattgactataactcctatagtttccacatcaaccaagtaatgatcatctattgttatataacaataacataactcttttccatttttatcagtatgtatatctatatcaacgtcgtcgttgtagtgaatagtagtcattgatctattatatgaaacggatatgtctagaacggcaattgttttacgtccagttaacactttcgttgatttaaagtctagagtctttgcaaacataatatccttatccgactttatatttcctgtagggtggtataattttattttgcctccacatatcggtgtttccaaatatattactagacaatattccatatagttattagttaagggtacccaattagaacacgtacgcttattatcatcatttggatcgtatttcataaaagttattgtgttatcgatgtcaacacattctacattttttaatcgtctatatagtatttttctgatattttctataatatcagaattgtcttccatcggaagttgtatactatcggaatcagttacatgtttaaataattctctgatgtcattccttatacaatcaaattcattattaaacagtttaatagtctgtagacctttatcgtcgtaaatatccattgtcttattagttacgcttatttttatgtgttttacgttgctttattatattttataagaatgattgtttgacgaatcacgagaactattaagacacattattaggtatatattataaaaaagtttttgattacgatgttataagaggaaagaggacacattaacatcatacatcaattaactacattcttataacatcgtaatcaaaagaattgcaattttgatgtataacaactgtcaatgggttatggaattgtatattacatattatacggtatgttggtaacgacaaataccggtcggtaattgtctgccggtgtaatagaattatatatatctatctattacaccggccttgtatacataataataagttgtggtagtatgatctccatatttataatttaggactttgtattcagtatttttggaatcataaaaaataaaaaaaagttttactaatttaaaatttaaaaagtatttacatttttttcactgtttagtcgcggatatggaattcgatcctgccaaaatcaatacatcatctatagatcatgtaacaatattacaatacatagatgaaccaaatgatataagactaacagtatgcattatccgaaatattatatcaatatcacaaaaataaatacacatttggctaatcaatttcgggcttggaaaaaacgtatcgccggaagggactatatgactaacttatctagagatacaggaatacaacaatcaaaacttactgaaactatacgtaactgtcaaaaaaatagaaacatatatggtctatatatacactacaatttagttattaattggataaccgatgtgattatcaatcaatattaagagggttggtaaattggtacatagctaataatacctatactccaaatacacccaataatacaacaaccatttctgagttggatatcatcaaaatactggataaatacgaggacgtgtatagagtaagtaaagaaaaagaatgtggaatttgctatgaagttgtttactcaaaacgatagatactttggtttattggattcgtgtactcatatattttgcataacatgcatcaatatatggcataaaacacgaagagaaaccggtgcgtcggataattgtcctatatgccgtacccgttttagaaacataacaatgagcaagttctataagctagttaactaataaataaaaagtttaatttgttgacgacgtatgtcgttattttttctcgtataaaagattaatttgattctaatataatctttagtattggataaatatcaattcaaattaattccattagattatatcataaataaaaatagtagcacgcactacttcagccaaatattcttttttgaaacgccatctatcgtagtgaggacacaagtgaacctataattatcaaatttattagtatcagtcacatgaaggactttacgtagagtgacgattccactatctgtggtacgaacggtttcatcttctttgatgccatcacccagatgttctataaacttggtatcctcgtccgatctcatatcctttgccaaccaatacatgtagctaaaattaggcataaatttcacacatcctgaacaatgaaattctccagaagatgttacaatgtctagatttggacatttggtttcaaccgcgttaacatatgagtgaacacacccatacatgaaagcgatgagaaataggattctcatcttgccaaaatatcactagaaaaaatttatttatcaattttaaaggtataaaaaatacttattgttgctcgaatattttgtatttgatggtatacggaagattagaaatgtaggtattatcatcaactgattctatggttttatgtattctatcatgtttcactattgcgttggaaataatatcatatgcttccacatatattttattttgttttaactcataatactcacgtaattctggattattggcatatctatgaataattttagctccatgatcagtaaatattaatgagaacatagtattaccacctaccattatttttttcatctcattcaattcttaattgcaaagatctatataatcattatagcgttgacttatggactctggaatcttagacgatgtacagtcatctataatcatggcatatttaatacattgttttatagcatagtcgttatctacgatgttagatatttctctcaatgaatcaatcacacaatctaatgtaggtttatgacataatagcattttcagcagttcaatgtttttagattcgttgatggcaatggctatacatgtatatccgttatttgatctaatgttgacatctgaaccggattctagcagtaaagatactagagattgtttattatatctaacagccttgtgaagaagtgtttctcctcgtttgtcaatcatgttaatgtctttaagataaggtaggcaaatgtttatagtactaagaattgggcaagcataagacatgtcacaaagaccctttttgtatgtataagtgtagaaattataacatccatagttggatttacataggtgtccaatcgggatctctccatcatcgagataattgatggcatctcccttccttttttagtagatatttcatcgtgtaagaatcaatattaatatttctaaagtatccgtgtatagcctctttatttaccacagttccatattccactagagggatatcgccgaatgtcatatactcaattagtatatgttggaggacatccgagttcattgttttcaatatcaaagagatggtttccttatcatttctccatagtggtacaatactacacattatttcgtgcggctttccattttccaaaaacaatttgaccaaatctacatctttattgtatctataatcactatttagataatcagccataattcctcgagtgcaacatgttagatcgtctatatatgaataagccgtgttatctattcctttcattaacaatttaacgatgtctatatctatatgagatgacttaatataatattgaagagctgtacaatagtttttatctataaaagacggcttgattccgtgattaattagacatttaacaacttccggacgcacatatgctctcgtatccgactctgaatacagatgagagatgatatacagatgcaatacggtaccgcaatttcgtagttgataatcatcatacgcgtatcagtactcgtcctcataaagaacactgcagccattttctatgaacaaatcaataatttcaggaacaggatcatctgtcattacataattttctataactgaacgatggttttcacatttaacactcaagtcaaatccatgttctaccaacacctttatcaagtcaacgtctacatttttggatttcatatagctgaatatattaaagttatttatgttgctaaatccagtggcttctagtagagccatcgctatatccttattaactttaacatgtctactatttgtgtattcttctaatggggtaagctgtctccaatttttgcgtaatggattagtgccactgtctagtagtagtttgacgacctcgacattattacaatgctcattaaaaaggtatgcgtgtaaagcattattcttgaattggttcctggtatcattaggatctctgtctctcaacatctgtttaagttcatcgagagccacctcctcattttccaaatagtcaaacattttgactgaatgagctactgtgaactctatacacccacacaactaatgtcattaaatatcatgtcaaaaacttgtacaattattaataaaaataatttagtgtttaaattttaccagttccagattttacacctccgttaatacctccattaaccccactggacgatcctcctccccacattccaccgccaccagatgtataagttttagatcctttattactaccatcatgtccatggataaagacactccacatgccgccactaccccctttagaagacatattaataagacttaaggacaagtttaacaataaaattaatcacgagtaccctactaccaacctacactattatatgattatagtttctatttttacagtaccttgactaaagtttctagtcacaagagcaatactaccaacctacactattatatgattatagtttctatttttataggaacgcgtacgagaaaatcaaatgtctaatttctaacggtagtgttgataaacgattatcgtcaatggatacctcctctatcatgtcgtctattttcttactttgttctattaacttattagcattatatattatttgattataaaacttatattgcttattagcccaatctgtaaatatcggattattaacatatcgtttctttgtaggtttatttaacttgtacatcactgtaagcatgtccttaccatttattttaatttgacgcatatccgcaatttctttttcgcagtcggttataaattctatatatgatggatacatgctacatgtgtacttataatcgactaatatgaagtacttgatacatatttccagtaacgatttattattaccacctatgaataagtacctgtgatcgtctaggtaatcaactgttttcttaatacattcgatggttggtaatttactcagaataatttccaatatcttaatatataattctgctatttctgggatatatttatctgccagtataacacaaatagtaatacatgtaaacccatattttgttattatattaatgtctgcgccattatctattaaccattctactaggctgacactatgcgactcaatacaatgataaagtatactacatccatgtttatctattttgtttatatcattaatatacggcttacaaagttttagtatcgataacacatccaactcacgcatagagaaggtagggaataatggcataatatttattaggttatcatcattgtcattatctacaactaagtttccattttttaaaatatactcgacaactttaggatctctattgccaaatttttgaaaatatttatttatatgcttaaatctatataatgtagctccttcatcaatcatacatttaataacattgatgtatactgtatgataagatacatattctaacaatagatcttgtatagaatctgtatatcttttaagaattgtggatattaggatattattacgtaaactattacacaattctaaaatataaaacgtatcacggtcgaataatagttgatcaactatataattatcgattttgtgatttttcttcctaaactgtttacgtaaatagttagatagaatattcattagttcatgaccactatagttactatcgaataacgcgtcaaatatttcccgtttaatatcgcatttgtcaagataataatagagtgtggtatgttcacgataagtataataacgcatctctttttcgtgtgaaattaaatagtttattacgtccaaagatgtagcataaccatcttgtgacctagtaataatataataatagagaactgttttacccattctatcatcataatcagtggtgtagtcgtaatcgtaatcgtctaattcatcatcccaattataatattcaccagcacgtctaatctgttctattttgatcttgtatccatactgtatgttgctacatgtaggtattcctttatccaataatagtttaaacacatctacattgggatttgatgttgtagcgtatttttctacaatattaataccatttttgatactatttatttctatacctttcgaaattagtaatttcaataagtctatatcgatgttatcagaacatagatattcgaatatatcaaaatcattgatatttttatagtcgactgacgacaataacaaaatcacgacatcgtttttgatattattatttttcttggtaacgtatgcctttaatggagtttcaccatcatactcatataatggatttgcaccactttctatcaatgattgtgcactgctggcatcgatgttaaatgttttacaactatcatagagtatcttatcgttaaccatgattggttgttgatgctatcgcattttttggtttctttcatttcagttatgtatggatttagcacgtttgggaagcatgagctcatatgatttcagtactgtagtgtcagtactattagtttcaataagatcaatctctagatctatagaatcaaaacacgataggtcagaagataatgaatatctgtaggcttcttgttgtactgtaacttctggttttgttagatggttgcatcgtgctttaacgtcaatggtacaaattttatcctcgctttgtgtatcatattcgtccctactataaaattgtatattcagattatcatgcgatgtgtatacgctaacggtatcaataaacggagcacaccatttagtcataaccgtaatccaaaaatttttaaagtatatcttaacgaaagaagttgtgtcattgtctacggtgtatggtactagatcctcataagtgtatatatctagagtaatgtttaatttattaaatggttgataatatggatcctcgtgacaatttccgaagatggaaataagacataaacacgcaataaatctaattgcggacatggttactccttaaaaaaatacgaataatcaccttggctatttagtaagtgtcatttaacactatactcatattaatccatggactcataatctctatacgggattaacggatgttctatatacggggatgagtagttctcttctttaactttatactttttactaatcatatttagactgatgtatgggtaatagtgtttgaagagctcgttctcatcatcagaataaatcaatatctctgtttttttgttatacagatgtattacagcctcatatattacgtaatagaacgtgtcatctaccttattaactttcaccgcatagttgtttgcaaatacggttaatcctttgacctcgtcgatttccgaccaatctgggcgtataatgaatctaaactttaattgcttgtaatcattcgaaataatttttagtttgcatccgtagttatcccctttatgtaactgtaaatttctcaacgcgatatctccattaataatgatgtcgaattcgtgctgtatacccatactgaatggatgaacgaataccgacggcgttaatagtaatttactttttcatctttacatattgggtactagttttactatcataagtttataaattccacaagctactatggaataagccaaccatcttagtataacacacatgtcttaaagtttattaattaattacatgttgttttatatatcgctacgaatttaaacagagaaatcagtttaggaaaaaaaattatctatctacatcatcacgtctctgtattctacgatagagtgctactttaagatgcgacagatctgtgtcatcaaatatatactccattaaaatgattattccggcagcgaacttgatattggatatatcacaacctttgttaatatctacgacaatagacagcagtcccatggttccataaacagtgagtttatctttctttgaagagatattttgtagagatcttataaaactgtcgaatgacatcgcatttatatttttagctaaatcgtatatgttaccatcgtaatatctaaccgcgtctatcttaaacgtttccatcgctttaaagacgtttccgatagatggtctcatttcatcagtcatactgagccaacaaatataatcgtgtataacatctttgatagaatcagactctaaagaaaacgaatcggctttattatacgcattcatgataaacttaatgaaaaatgtttttcgttgtttaagttggatgaatagtatgtcttaataattgttattatttcattaattaatatttagtaacgagtacactctataaaaacgagaatgacataactaatcataactagttatcaaagtgtctaggacgcgtaattttcatatggtatagatcctgtaagcattgtctgtattctggagctattttctctatcgcattagtgagttcagaatatgttataaatttaaatcgaataacgaacataactttagtaaagtcgtctatattaactcttttattttctagccatcgtaataccatgtttaagatagtatattctctagttactacgatctcatcgttgtctagaatatcacatactgaatctacatccaattttagaaattggtctgtgttacatatctcttctatattattgttgatgtattgtcgtagaaaactattacgtagaccattttctttataaaacgaatatatagtactccaattatctttaccgatatatttgcacacataatccattctctcaatcactacatctttaagattttcgttgttaagatatttggctaaactatataattctattagatcatcaacagaatcagtatatatttttctagatccaaagacgaactctttggcgtcctctataatattcccagaaaagatattttcgtgttttagtttatcgagatctgatctgttcatatacgccatgattgtacggtacgttatgataaccgcataaaataaaaatccattttcatttttaaccaatactattcataattgagattgatgtaatactttgttactttgaacgtaaagacagtacacggatccgtatctccaacaagcacgtagtaatcaaatttggtgttgttaaacttcgcaatattcatcaatttagatagaaacttatactcatcatctgttttaggaatccatgtattattaccactttccaacttatcattatcccaggctatgtttcgtccatcatcgttgcgcagagtgaataattcttttgtattcggtagttcaaatatatgatccatgcatagatcggcaaagctattgtagatgtgatttttcctaaatctaatataaaactcgtttactagcaaacactttcctgatttatcgaccaagacacatatggtttctaaatctatcaagtggtggggatccatagttatgacgcagtaacatatattattacattcttgactgtcgctaatatctaaatatttattgttatcgtattggattctgcatatagatggcttgtatgtcaaagatatagaacacataaccaatttatagtcgcgctttacattctcgaatctaaagttaagagatttagaaaacattatatcctcggatgatgttatcactgtttctggagtaggatatattaaagtctttacagatttcgtccgattcaaataaatcactaaataatatcccacattatcatctgttagagtagtatcattaaatctattatattttatgaaagatatatcactgctcacctctatatttcgtacatttttaaactgtttgtataatatctctctgatacaatcagatatatctattgtgtcggtagacgataccgttacatttgaattaatggtgttccattttacaacttttaacaagttgaccaattcatttctaatagtatcaaactctccatgattaaatattttaatagtatccattttatatcactacggacacaaagtagctgacataaaccattgtataatttttatgttttatgtttattagcgtacacattttggaagttccggcttccatgtatttcctggagagcaagtagatgatgaggaaccagatagtttatatccgtacttgcacttaaagtctacattgtcgttgtatgagtatgatcttttaaacccgctagacaagtatccgtttgatattgtaggatgtggacatttaacaatctgacacgtgggtggatcggaccattctcctcctgaacacaggacactagagttaccaatcaacgaatatccactattgcaactataagttacaacgctcccatcggtataaaaatcctcgtatccgttatgtcttccgttggatatagatggaggggattggcatttaacagattcacaaataggtgcctcgggattccataccatagatccagtagatcctaattcacaatacgatttagattcaccgatcaactgatatccgctattacaagagtacgttatactagagccaaagtctactccaccaatatcaagttggccattatcgatatctcgaggcgatgggcatctccgtttaatacattgattaaagagtgtccatccagtacctgtacatttagcatatataggtcccattttttgctttctgtatccaggtagacatagatattctatagtgtctcctatgttgtaattagcattagcatcagtctccacactattcttaaatttcatattaatgggtcgtgacggaatagtacagcatgatagaacgcatcctattcccaacaatgtcaggaacgtcacgctctccaccttcatatttatttatccgtaaaaatgttatcctggacatcgtacaaataataaaaagcccatatatgttcgctattgtagaaattgtttttcacagttgctcaaaaacgatggcagtgacttatgagttacgttacactttggagtctcatctttagtaaacatatcataatattcgatattacgagttgacatatcgaacaaattccaagtatttgattttggataatattcgtattttgcatctgctataattaagatataatcaccgcaagaacacacgaacatctttcctacatggttaaagtacatgtacaattctatccatttgtcttccttaactatatatttgtatagataattacgagtctcgtgagtaattccagtaattacatagatgtcgccgtcgtactctacagcataaactatactatgatgtctaggcatgggagacttttttatccaacgatttttagtgaaacattccacatcgtttaatactacatatttctcatacgtggtataaactccacccattacatatatatcatcgtttacgaataccgacgcgcctgaatatctaggagtaattaagtttggaagtcttatccatttcgaagtgccgtgtttcaaatattctgccacacccgttgaaatagaaaattctaatcctcctattacatataactttccatcgttaacacaagtactaacttctgattttaacgacgacatattagtaaccgttttccattttttcgtttcaagatctacccgcgatacggaataaacatgtctattgttaatcatgccgccaataatgtatagacaattatgtaaaacatttgcattatagaattgtctatctgtattaccgactatcgtccaatattctgttctaggagagtaatgggttattgtggatatataatcagagtttttaatgactactatattatgttttataccatttcgtgtcactggctttgtagatttggatatagttaatcccaacaatgatatagcattgcgcatagtattagtcataaacttgggatgtaaaatgttgatgatatctacatcgtttggatttttatgtatccactttaataatatcatagctgtaacatcctcatgatttacgttaacgtcttcgtgggataagatagttgtcagttcatcctttgataattttccaaattctggatcggatgtcaccgcagtaatattgttgattatttctgacatcgacgcattatatagttttttaattccatatcttttagaaaagttaaacatccttatacaatttgtgaaattaatattatgaatcatagtttttacacatagatctactacaggcggaacatcaattattatggcagcaactagtatcatttctacattgtttatggtgatgtttatcttcttccagcgcatatagtctaatagcgattcaaacgcgtgatagtttataccattcaatataatcgcttcatcctttagatggtgatcctgaatgcgtttaaaaaaattatacggagacgccgtaataatttccttattcacttgtataatttccccattgatagaaaatattacgctttccattcttaaagtactataagtaattatagtataatgtaaacgtttatatattcaatatttttataaaaatcattttgacattaattcctttttaaatttccgtctatcatctatagaaacgtattctatgaatttataaaatgcttttacgtgtcctatcgtaggcgatagaaccgctaaaaagcctatcgaatttctacaaaagaatctgttatatggtatagggagagtataaaacattaaatgtccgtacttattaaagtattcagtagccaatcctaactctttcgaatacttattaatggctcttgttctgtacgaatctatttttttgaacaacggacctagtggtatatcttgttctatgtatctaaaataatgtctgactagatccgttagtttaatatccgcagtcatcttgtctagaatggcaaatctaactgcgggtttaggctttagtttagtttctatatctacatctatgtctttatctaacaccaaaaatataatagctaatattttattacaatcatccggatattcttctacgatctcactaactaatgtttctttggttatactagtatagtcactatcggacaaataaagaaaatcagatgatcgatgaataatacatttaaattcatcatctgtaagatttttgagatgtctcattagaatattattagggttagtactcattatcattcggcagctattacttattttattatttttcaccatatagatcaatcattagatcatcaaaatatgtttcaatcatcctaaagagtatggtgaatgactcttcccatctaatttctgaacgttcaccaatgtctctagccactttggcactaatagcgatcattcgcttagcgtcttctatattattaactggttgattcaatctatctagcaatggaccgtcggacagcgtcattctcatgttcttaatcaatgtacatacatcgccgtcatctaccaattcatccaacaacataagctttttaaaatcatcattataataggtttgatcgttgtcatttctccaaagaatatatctaataagtagagtcctcatgattagttaacaactattttttatgttaaatcaattagtacaccgctatgtttaatacttattcatattttagtttttaggattgagaatcaatacaaaaattaatgcatcattaattttagaaatacttagtttccacgtagtcaatgaaacatttgaactcatcgtacaggacgttctcgtacaggacgtaactataaaccggtttatatttgttcaagatagatacaaatccgataactttttttacgaattctacgggatccactttaaaagtgtcataccgggttctttttatttttttaaacagatcaatggtgtgatgttgattaggtcttttacgaatttgatatagaatagcgtttacatatcctccataatggtcaatcgccatttgttcgtatgtcataaattctttaattatatgacactgtgtattatttagttcatccttgttcattgttaggaatctatccaaaatggcaattatactagaactataggtgcgttgtatacacatattgatgtgtctgtttatacaatcaatgctactaccttcgggtaaaattgtagcatcatataccatttctagtactttaggttcattattatccattgcagaggacgtcatgatcgaatcataaaaaaatatattatttttatgttattttgttaaaaataatcatcgaatacttcgtaagatactccttcatgaacataatcagttacaaaacgtttatatgaagtaaagtatctacgatttttacaaaagtccggatgcataagtacaaagtacgcgataaacggaataataatagatttatctagtctatctttttctatagctttcatagttagatacatggtctcagaagtaggattatgtaacatcagcttcgataaaatgactgggttatttagtcttacacattcgctcatacatgtatgaccgttaactacagagtctacactaaaatgattgaacaatagatagtctaccattgtttcgtattcagatagtacagcgtagtacatggcatcttcacaaattatatcattgtctaatagatatttgacgcatcttatggatcccacttcaacagccatcttaaaatcggtagaatcatattgctttcctttatcattaataatttctagaacatcatctctatcataaaagatacaaatattaactgtttgatccgtaataacattgctagtcgatagcaatttgttaataagatgcgctgggctcaatgtcttaataagaagtgtaagaggactatctccgaatttgttttgtttattaacatccgttgatggaagtaaaagatctataatgtctacattcttgactgttttagagcatacaatatggagaggtgtatttccatcatgatctggttttgagggactaattcctagtttcatcatccatgagattgtagaagcttttggattgtctgacataagatgtctatgaatatgatttttgccaaatttatccactatcctggcttcgaatccgatggacattatttttttaaacactctttctgaaggatctgtacacgccaacaacggaccacatccttcttcatcaaccgagttgttaatcttggctccatactgtaccaataaatttattctctctatgacttcatcatctgttcccgagagataatatagaggcgttttatgctgtttatcacacgcgtttggatctgcgccgtgcgtcagcagcatcgcgactattctattattattaattttagaagctatatgcaatggataatttccatcatcatccgtctcatttggagagtatcctctatgaagaagttcttcgacaaatcgttcatctagtcctttaattccacaatacgcatgtagaatgtgataattatttccagaaggttcgatagcttgtagcatattcctaaatacatctaaatttttactattatatttggcataaagagatagataatactcggccgacataatgttgtccattgtagtataaaaattaatatttctatttctgtatatttgcaacaatttactctctataacaaatatcataacttagttcttttatgtcaagaaggcactggtttagttcatctataaatgtcacgccataactaccacgcatgccatactcagaattatgataaagatatttatccttggggtgtaggtaatggggattaatctttgttggatcagtctctaagttaacacatgtcacacatgatccatttatagttatatcacacgatgatgatttatgaattgattccggaagatcgctatcgtattttgtggttccacaattcatttccatacatgttattgtcacactaatattatgatgaactttatctagccgctgagtggtaaacaacagaacagatagtttattatctttaccaacaccctcagccgctgccacaaatctctgatccgtatccatgatggtcatgtttatttctagtccgtatccagtcaacactatgttagcatttctgtcgatatagctttcactcatatgacactcaccaataatagtagaattaatgtcgtaatttacaccaatagtgagttcggcggcaaagtaccaataccggtaatcttgtcgaggaggacatatagtattcttgtattctaccgaatacccgagagatgcgatacaaaagagcaagactaatttgtaaaccatcttactcaaaatatgtaacaatagtacgatgcaatgagtaagacaataggaaatctatcttatatacacataattattctatcaattttaccaattagttagtgtaatgttaacaaaaatgtgggagaatctaattagtttttctttacacaattgacgtacatgagtctgagttccttgtttttgctaattatttcatccaatttattattcttgacgatatcgagatcttttgtataggagtcaaacttgtattcaacatgcttttctataatcattttagctatttcggcatcatccaatagtacattttccagattagcagaatagatattaatgtcgtatttgaacagagcctgtaacatctcaatgtctttattatctatagccaatttaatgtccggaatgaagagaagggaattattggtgtttgtcgacgtcatatagtcgagcaagagaatcatcatatccacgtgtccattttttatagtgatgtgaatacaactaaggagaatagccagatcaaaagtagatggtatctctgaaagaaagtaggaaacaatacttacatcattaagcatgacggcatgataaaatgaagttttccatccagttttcccatagaacatcagtctccaatttttcttaacaaacagttttaccgtttgcatgttaccactatcaaccgcataatacaatgcggtgtttcccttgtcatcaaattgtgaatcatccagtccactgaatagcaaaatctttactattttggtatcttccaatgtggctgcctgatgtaatggaaattcattctctagaagatttttcaatgctccagcgttcaacaacgtacatactagacgcacgttattatcagctattgcataatacaaggcactatgtccatggacatccgccttaaatgtatctttactagagagaaagcttttcagctgcttagacttccaagtattaattcgtgacagatccatgtctgaaacgagacgctaattagtgtatattttttcattttttataattttgtcatattgcaccagaattaataatatctttaatagatctgattagtagatacatggctatcgcaaaacaacatatacacatttaataaaaataatatttattaagaaaattcagatttcacgtacccatcaatataaataaaataatgattccttacaccgtacccatattaaggagattccaccttacccataaacaatataaatccagtaatatcatgtctgatgatgaacacaaatggtgtattaaattccagtttttcaggagatgatctcgccgtagctaccataatagtagatgcctctgctacagttccttgttcgtcgacatctatctttgcattctgaaacattttataaatatataatgggtccctagtcatatgtttaaacgacgcattatctggattaaacatactaggagccatcatttcggctatcgacttaatatccctcttattttcgatagaaaatttagggagtttaagattgtacactttattccctaattgagacgaccaatagtctaattttgcagccgtgatagaatctgtgaaatgggtcatattatcacctattgccaggtacatactaatattagcatccttatacggaaggcgtaccatgtcatattctttgtcatcgattgtgattgtatttccttgcaatttagtaactacgttcatcatgggaaccgttttcgtaccgtacttattagtaaaactagcattgcgtgttttagtgatatcaaacggatattgccatatacctttaaaatatatagtattaatgattgcccatagagtattattgtcgagcatattagaatctactacattagacataccggatctacgttctactatagaattaattttattaaccgcatctcgtctaaagtttaatctatataggccgaatctatgatattgttgataatacgacggtttaatgcacacagtattatctacgaaactttgataagttagatcagtgtacgtatatttagatgttttcagcttagctaatcctgatattaattctgtaaatgctggacccagatctctttttctcaaatccatagtcttcaataattctattctagtattacctgatgcaggcaatagcgacataaacatagaaaacgaataaccaaacggtgagaagacaatattatcatcttgaatatttttatacgctactataccggcattggtaaatccttgtagacgataggcggacgctgaacacgctaacgatagtatcaataacgcaatcatgattttatggtattaataattaaccttatttttatgttcggtataaaaaaattattgatgtctacacatccttttgtaattgacatctatatatccttttgtataatcaactctaatcactttaacttttacagttttccctaccagtttatccctatattcaacatatctatccatatgcatcttaacactctctgccaagatagcttcagagtgaggatagtcaaaaagataaatatatagagcataatcattctcgtatactctgccctttattacatcacccgcattgggcaacgaataacaaaatgcaagcatcttgttaacgggctcgtaaattgggataaaaattatgtttttattgtcttatatctattttattcaagagaatattcaggaatttctttttccggttgtatctcgtcgcagtatatatcatttgtacattgtttcatattttttaatagtttacaccttttagtaggactagtatcgtacaattcatagctgtattttgaattccaatcacgcataaaaatatcttccaattgttgacgaagacctaatccatcatccggtgtaatattaatagatgctccacatgtatccgtaaagtaatttcctgtccaatttgaggtacctatataggccgttttatcggttaccatatatttggcatggtttaccctagaatacggaatgggaggatcagcatctggtacaataaatagctttacttctatatttatgtttttagattttagcatagcgatagatcttaaaaagtttctcatgataaacgaagatcgttgccagcaactaatcaatagcttaacggatacttgtctgtctatagcggatcttcttaattcatcttctatataaggccaaaacaaaattttacccgccttcgaataaataatagggataaagttcataacagatacataaacgaatttactcgcatttctaatacatgacaataaagcggttaaatcattggttctttccatagtacatagttgttgcggtgcagaagcaataaatacagagtgtggaacgccgcttacgttaatactaagaggatgatctgtattataatacgacggataaaagtttttccaattatatggtagattgttaactccaagataccagtatacctcaaaaatttgagtgagatccgctgccaagttcctattattgaagatcgcaatacccaattccttgacctgagttagtgatctccaatccatgttagcgcttcctaaataaatatgtgtattatcagatatccaaaattttgtatgaagaactcctcctaggatatttgtaatatctatgtatcgtacttcaactccggccatttgtagtctttcaacatcctttaatggtttgttagatttattaacggctactctaactcgtactcctcttttgggtaattgtacaatctcgtttaatattatcgtgccgaaattcgtacccacttcatccgataaactccaataaaaagatgatatatctagtgtttttgtggtattggatagaatttccctccacatgttaaatgtagacaaatatactttatcaaattgcatacctataggaatagtttctgtaatcactgcgattgtattatccggattcattttatttgttaaaagaataatcctatatcacttcactctattaaaaatccaagtttctatttctttcatgactgattttttaacttcatccgtttccttatgaagatgatgtttggcaccttcataaatttttatttctctattacaatttgcatgttgcatgaaataatatgcacctaaaacatcgctaatcttattgtttgttccctggagtatgagagtcgggggggtgttaatcttggaaattatttttctaaccttgttggtagccttcaagacctgactagcaaatccagccttaattttttcatgattgactaatgggtcgtattggtatttataaactttatccatatctctagatactgattctggacatagctttccgactggcgcatttggtgtgatggttcccataagtttggcagctagcagattcagtcttgaaacagcatctgcattaactagaggagacattagaatcattgctgtaaacaagtttggattatcgtaagaggctagctcccatggaatgacccaataagtagatttaatagttaccacgtgctgtaccaaagtcatcaatcatcattttttcaccattacttcttccatgtccaatatgatcatgtgagaatactaaaattcctaacgatgatatgttttcagctagttcgtcataacgtccagaatgtttaccagctccatgacttatgaatactaatgccttaggatatgtaataggtttccaatatttacaatatatgtaatcattgtccagattgaacatacagtttgcactcatgattcacgttatataactatcaatattaacagttcgtttgatgatcatattatttttatgttttattgataattgtaaaaacatacaattaaatcaatatagaggaaggagacggctactgtcttttgtaagatagtcatggcgactaaattagattatgaggatgctgttttttactttgtggatgatgataaaatatgtagtcgcgactccatcatcgatctaatagatgaatatattacgtggagaaatcatgttatagtgtttaacaaagatattaccagttgtggaagactgtacaaggaattgatgaagttcgatgatgtcgctatacggtactatggtattgataaaattaatgagattgtcgaagctatgagcgaaggagaccactacatcaattttacaaaagtccatgatcaggaaagtttattcgctaccataggaatatgtgctaaaatcactgaacattggggatacaaaaagatttcagaatctagattccaatcattgggaaacattacagatttgatgaccgacgataatataaacatcttgatactttttctagaaaaaaaattgaattgatgatataggggtcttcataacgcataattattacgttagcattctatatccgtgttaaaaaaaattatcctatcatgtatttgagagttttatatgtagcaaacatgatagctgtgatgccaataagctttagatattcacgcgtgctagtgttagggatggtattatctggtggtgaaatgtccgttatataatctacaaaacaatcatcgcatatagtatgcgatagtagagtaaacatttttatagtttttactggattcatacatcgtctacccaattcggttataaatgaaattgtcgccaatcttacacccaaccccttgttatccattagcatagtattaacttcgttatttatgtcataaactgtaaatgattttgtagatgccatatcatacatgatattcatgtccctattataatcattactaactttatcacaatatatgttgataatatctatatatgatctagtctttgtgggcaactgtctatacaagtcgtctaaacgttgtttactcatatagtatctaacagccatcattacatggtcccgttccgttgatagataatcgagtatgttagtggacttgtcaaatctatataccatattttctggaagtggatatacatagtcgtgatcaacattattgctagcctcatcttctatatcctgtactataccattatctatatcatctacataatctatgatattattacacataaacatcgacaacatactattgtttattatctaagtcctgttgatccaaacccttgatctcctctatttgtactatctagagattgtacttcttccagttctggataatatatacgttgatagattagctgagctattctatctccagtatttacattaaacgtacattttccattattaataagaatgactcctatgtttcccctataatcttcgtctattacaccacctcctatatcaatgccttttagtgacagaccagacctaggagctattctaccatagcagaacttaggcatggacatactaatatctgtcttaattaactgtctttctcctggagggatagtataatcgtaagcgctatacaaatcatatccggcagcacccggcgattgcctagtaggagatttagctctgttagtttccttaacaaatctaactggtgagttaatattcatgttgaacataaaactaatattttatttcaaaattatttaccatcccatatattccatgaataagtgtgatgattgtacacttctatagtatctatatacgatccacgataaaatcctcctatcaatagcagtttattatccactatgatcaattctggattatccctcggataaataggatcatctatcagagtccatgtattgctggattcacaataaaattccgcatttctaccaaccaagaataaccttctaccgaacactaacgcgcatgatttataatgaggataataagtggatggtccaaactgccactgatcatgattgggtagcaaatattctgtagttgtatcagtttcagaatgtcctcccattacgtatataacattgtttatggatgccactgctggattacatctaggtttcagaagactcggcatattaacccaagcagcatccccgtggaaccaacgctcaacagatgtgggatttggtagacctcctactacgtataatttattgttagcgggtatcccgctagcatacagtctggggctattcatcggaggaattggaatccaattgtttgatatataatttaccgctatagcattgttatgtatttcattgttcatccatccaccgatgagatatactacttctccaacatgagtacttgtacacatatggaatatatctataatttgatccatgttcataggatactctatgaatggatacttgtatgatttgcgtggttgtttatcacaatgaaatattttggtacagtctagtatccattttacattatttatacctctgggagaaagataatttgacctgattacatttttgataaggagtagcagatttcctaatttatttcttcgctttatataccacttaatgacaaaatcaactacataatcctcatctggaacatttagttcatcgctttctagaataagtttcatagatagataatcaaaattgtctatgatgtcatcttccagttccaaaaagtgtttggcaataaagtttttagtatgacataagagattggatagtccgtattctatacccatcatgtaacactcgacacaatattcctttctaaaatctcgtaagataaagtttatacaagtgtagatgataaattctacagaggttaatatagaagcacgtaataaattgacgacgttatgactatctatatatacctttccagtatacgagtaaataactatagaagttaaactgtgaatgtcaaggtctagacaaaccctcgtaactggatctttatttttcgtgtatttttgacgtaaatgtgtgcgaaagtaaggagataactttttcaatatcgtagaattgactattatattgcctcctatggcatcaataattgttttgaatttcttagtcatagacaatgctaatatattcttacagtacacagtattgacaaatatcggcatttatgtttctttaaaagtcaacatctagagaaaaatgattatctttttgagacataactcccattttttggtattcacccacacgtttttcgaaaaaattagtttttccttccaatgatatattttccatgaaatcaaacggattggtaacattataaatttttttaaatcccaattcagaaatcaatctatccgcgacgaattctatatatgttttcatcatttcacaattcattcctataagtttaactggaagagccgcagtaagaaattcttgttcaatggatactgcatctgttataatagatctaacggtttcttcactcggtggatgcaataaatgtttaaacatcaaacatgcgaaatcgcagtgcagaccctcgtctctactaattagttcgttggaaaacgtgagtccgggcattaggccacgctttttaagccaaaatatggaagcgaatgatccggaaaagaagattccttctactgcagcaaaggcaataagtctctctccataaccggcgctgtcatgtatccacttttgagcccaatcggccttcttttttacacaaggcatcgtttctatggcattaaagagatagtttttttcattactatctttaacataagtatcgatcaaaagactatacatttccgaatgaatgttttcaatggccatctgaaatccgtagaaacatctagcctcggtaatctgtacttctgtacaaaatcgttccgccaaattttcattcactattccgtcactggctgcaaaaaacgccaatacatgttttataaaatatttttcgtctggtgttagtttattccaatcattgatatctttagatatatctacttcttccactgtccaaaatgatgcctctgcctttttatacatgttccagatgtcatgatattggattgggaaaataacaaatctatttggatttggtgcaaggatgggttccataactaaattaacaataacaataaattttttttcagttatctatatgcctgtacttggattttttgtacatcgatatcgccgcaatcactacaataattacaagtattattgatagcattgttattagtactatcataattaaattatctacattcatgggtgctgaataatcgttattatcatcattatcattttgtaattgtgacatcatactagataaatcgtttgcgagattgttgtgggaagcgggcatggaggatgcattatcattattatttaacgccttccatttggattcacaaatgttacgcacattcaacattttatggaaactataattttgtgaaaacaaataacaagaaaactcgtcatcgttcaaatttttaacgatagtaaaccgattaaacgtcgagctaatttctaacgctagcgactctgttggatatgggtttccagatatatatcttttcagttcccctacgtatctataatcatctgtaggaaatggaagatatttccatttatctactgttcctaatatcatatgtggtggtgtagtagaaccattaagcgcgaaagatgttatttcgcatcgtattttaacttcgcaataatttctggttagataacgcactctaccagtcaagtcaatgatattagcctttacagatatattcatagtagtcgtaacgatgactccatcttttagatgcgatactcctttgtatgtaccagaatcttcgtacctcaaactcgatatatttaaacaagttaatgagatattaacgcgttttatgaatgatgatatataaccagaagttttatcctcggtggctagcgctataaccttatcattataataccaactagtgtgattaatatgtgacacgtcagtgtgggtacaaatatgtacattatcgtctacgtcgtattcgatacatccgcatacagccaacaaatataaaatgacaaatactctaacgacgttcgtacccatcttgatgcggtttaataaatgttttgatttcaatttattgtaaaaaaagattcggttttatactgttcgatattctcattgcttatattttcatctatcatctccacacagtcaaatccgtggttagcatgcacctcatcaaccggtaaaagactatcggactcttctatcattataactctagaatatttaatttggtcattattaatcaagtcaattatcttatttttaacaaacgtgagtattttactcatttttataaaaacttttagaaatatacagactctatcgtgtgtctatatcttctttttatatccaatgtatttatgtctgatttttcttcatttatcatatataatggtccaaattctacacgtgcttcggattcatccagatcattaaggttcttataattgtaacatccttctcttccctcttctacatcttccttcttattcttattcttagcgtcacagaatctaccacagcaggatcccatgacgagcgtcatattaaactaatccattttcaattataatatatgattagtaatgaccattaaaataaaaaatattcttcataaccggcaagaaagtgaaaagttcacattgaaactatgtcagtagtatacatcatgaaatgatgatatatatactctattttggtggaggattatatgatataattcgtggataatcatttttaagacacatttctttattcgtaaatcttttcacgttaaatgagtgtccatattttgcaatttcttcatatgatggcggtgtacgtggacgaggctgctcctgttcttgttgtagtcgccgactgtcgtgtctgcgtttagatccctccattatcgcgattgcgtagatggagtactattttataccttgtaattaaatttttttattaattaaacgtataaaaacgttccgtatctgtatttaagagccagatttcgtctaatagaacaaatagctacagtaaaaataactagaataattgctacacccactagaaaccacggatcgtaatacggcaatcggttttcgataataggtggaacgtatattttatttaaggacttaacaattgtctgtaaaccacaatttgcttccgcggatcctgtattaactatctgtaaaagcatatgttgaccgggcggagccgaacattctccgatatctaatttctgtatatctataatattattaacctccgcatacgcattacagttcttttctagcttggataccgcactaggtacatcgtctagatctattcctatttcctcagcgatagctcttctatccttttccggaagcaatgaaatcacttcaataaatgattcaaccatgagtgtgaaactaagtcgagaattactcatgcatttgttagttattcggagcgcgcaatttttaaactgtcctataacctctcctatatgaatagcacaagtgacattagtagggatagaatgttgagctaatttttgtaaataactatctataaaaagattatacaaagttttaaactctttagtttccgccatttatccagtctgagaaaatgtctctcataataaatttttccaagaaactaattgggtgaagaatggaaacctttaatctatatttatcacagtctgttttggtacacatgatgaattcttccaatgccgtactaaattcgatatctttttcgatttctggatatgtttttaataaagtatgaacaaagaaatggaaatcgtaataccagttatgtttaactttgaaattgttttttattttcttgttaatgattccagccacttgggaaaagtcaaagtcgtttaatgccgatttaatacgttcattaaaaacaaactttttatcctttagatgaattattattggttcattggaatcaaaaagtaagatattatcgggtttaagatctgcgtgtaaaaagttgtcgcaacagggtagttcgtagattttaatgtataacagagccatctgtaaaaagataaactttatgtattgtaccaaagatttaaatcctaatttgatagctaactcggtatctactttatctgccgaatacagtgctaggggaaaaattataatgtttcctctttcatattcgtagttagttctcttttcatgttcgaaaaagtgaaacatgcggttaaaatagtttataacattaatattactgttaataactgccggataaaagtgggatagtaatttcacgaatttgatactgtcctttctctcgttaaacgcctttaaaaaaactttagaagaatatctcaatgagagttcctgaccatccatagtttgtatcaataatagcaacatatgaagaacacgtttatacagagtatgtaaaaatgttaatttatagtttaatcccatggcccacgcacacacgattaattttttttcatctccctttagattgttgtatagaaatttgggtactgtgaactccgccgtagtttccatgggactatataattttgtggcctcgaatacaaattttactacatagttatctatcttaaagactataccatatcctcctgtagatatgtgataaaaatcgtcgtttataggataaaatcgtttatccttttgttggaaaaaggatgaattaatgtaatcattctcttctatctttagtagtgtttccttattaaaattcttaaaataatttaacaatctaactgacggagcccaattttggtgtaaatctaattgggacattatattgttaaaatacaaacagtctcctaatataacagtatctgataatctatggggagacatccattgatattcaggggatgaatcattggcaacacccatttattgtacaaaaagccccaatttacaaacgaaagtccaggtttgatagagacaaacaattaactattttgtctctgtttttaacacctccacagtttttaatttctttagtaatgaaattattcacaatatcagtatcttctttatctaccagagattttactaacttgataaccttggctgtctcattcaatagggtagtaatatttgtatgtgtgatattgatatctttttgaattgtttcttttagaagtgattctttgatggtgccagcatacgaattacaataatgcagaaactcggttaacatgcaggaattatagtaagccaattccaattgttgcctgtgttgtattagagtgtcaatatgagcaatggtgtccttgcgtttctctgatagaatgcgagcagcgattttggcgttatcatttgacgatatttctggaatgacgaatcctgtttctactaactttttggtaggacaaagtgaaacaatcaagaagatagcttctcctcctatttgtggaagaaattgaactcctctagatgatctactgacgatagtatctccttgacagatattggaccgaattacagaagtacctggaatgtaaagccctgaaaccccctcattttttaagcagattgttgccgtaaatcctgcactatgcccaagatagagagctcctttggtgaatccatctctatgtttcagtttaaccaagaaacagtcagctggtctaaaatttccatctctatctaatacagcatctaacttgatgtcaggaactatgaccggtttaatgttatatgtaacattgagtaaatccttaagttcataatcatcactgtcatcagttatgtacgatccaaacaatgtttctaccggcatagtggatacgaagatgctatccatcagaatgtttccctgattagtattttctatatagctattcttctttaaacgattttccaaatcagtaactatgttcatttttttaggagtaggacgcctagccagtatggaagaggattttctagatcctctcttcaacatctttgatctcgatggaatgcaaaaccccatagtgaaacaaccaacgataaaaataatattgtttttcactttttataattttaccatctgactcatggattcattaatatctttataagagctactaacgtataattctttataactgaactgagatatatacaccggatctatggtttccataattgagtaaatgaatgctcggcaataactaatggcaaatgtatagaacaacgaaattatactagagttgttaaagttaatattttctatgagctgttccaataaattatttgttgtgactgcgttcaagtcataaatcatcttgatactatccagtaaaccgtttttaagttctggaatattatcatcccattgtaaagcccctaattcgactatcgaatatcctgctctgatagcagtttcaatatcgacggacgtcaatactgtaataaaggtggtagtattgtcatcatcgtgataaactacgggaatatggtcgttagtaggtacggtaactttacacaacgcgatatataactttccttttgtaccatttttaacgtagttgggacgtcctgcagggtattgttttgaagaaatgatatcgagaacagatttgatacgatatttgttggattcctgattattcactataatataatctagacagatagatgattcgataaatagagaaggtatatcgttggtaggataatacatccccattccagtattctcggatactctattgatgacactagttaagaacatgtcttctattctagaaaacgaaaacatcctacatggactcattaaaacttctaacgctcctgattgtgtctcgaatgcctcgtacaaggatttcaaggatgccatagattctttgaccaacgatttagaattgcgtttagcatctgatttttttattaaatcgaatggtcggctctctggtttgctaccccaatgataacaatagtcttgtaaagataaaccgcaagaaaatttatacgcatccatccaaataaccctagcaccatcggatgatattaatgtattattatagattttccatccacagttattgggccagtatactgttagcaacggtatatcgaatagattactcatgtaacctactagaatgatagttcgtgtactagtcataatatctttaatccaatctaagaaatttaaaattagattttttacactgttaaagttaacaaaagtattacccgggtacgtggatatcatatatggcattggtccattatcagtaatagctccataaactgatacggcgatggtttttatatgtgtttgatctaacgaggaagaaattcgcgcccacaattcatctctagatatgtatttaatatcaaacggtaacacatcaatttcgggacgcgtatatgtttctaaatttttaatccaaatataatgatgacctatatgccctattatcatactgtcaactatagtacacctagggaacttacgatacatctgtttcctataatcgttaaattttacaaatctataacatgctaaaccttttgacgacaaccattcattaatttctgatatggaatctgtattctcgataccgtatcgttctaaagccagtgctatatctccctgttcgtgggaacgctttcgtataatatcgatcaacggataatctgaagtttttggagaataatatgactcatgatctatttcgtccataaacaatctagacataggaattggaggcgatgatcttaattttgtgcaatgagtcgtcaatcctataacttctaatcttgtaatattcatcatcgacataatactatctatgttatcatcgtatattagtataccatgaccttcttcatttcgtgccaaaatgatatacagtcttaaataattacgcaatatctcaatagtttcataattgttagctgttttcatcaaggtttgtatcctgtttaacatgatggcgttctataacgtctctattttctatttttaattttttaaatttttaacgatttactgtggctagatacccaatctctctcaaatatttttttagcctcgcttacaagctgtttatctatactattaaaactgacgaatccgtgattttggtaatgggttccgtcgaaatttgccgaagtgatatgaacatattcgtcgtcgactatcaacaattttgtattattctgaatagtgaaaaccttcacagatagatcattttgaacacacaacgcatctagacttttggcggttgccatagaatatacgtcgttcttatcccaattaccaactagaagtctgatcttaactcctctattaatggctgcttctataatggagttgtaaatgtcgggccaatagtagctattaccgtcgacacgtgtagtgggaactatggccaaatgttcaatatctatactagtcttagctgacctgagtttatcaataactacatcggtatctagatctctagaatatcccaataggtgttccggagaatcagtaaagaacactccacctataggattcttaatatgatacgcagtgctaactggcaaacaacaagccgcagagcataaattcaaccatgaattttttgcgctattaaaggctttaaaagtatcaaatcttctacgaagatctgtggccagcgggggataatcagaatatacacctaacgttttaatcgtatgtatagatcctccagtaaatgacgcgtttcctacataacatctttcatcatctgacacccaaaaacaaccgagtagtagtcccacattattttttttatctatattaacggttataaaatttatatccgggcagtgactttgtagctctcccagatttcttttccctcgttcatctagcaaaactattattttaatccctttttcagatgcctcttttagtttatcaaaaataagcgctcccctagtcgtactcagaggattacaacaaaaagatgctatgtatatatatttcttagctagagtgataatttcgttaaaacattcaaatgttgttaaatgatcggatctaaaatccatattttctggtagtgtttctaccagcctacattttgctcccgcaggtaccgatgcaaatggccacatttagttaacataaaaacttatacatcctgttctatcaacgattctagaatatcatcggctatatcgctaaaattttcatcaaagtcgacatcacaacctaactcagtcaatatattaagaagttccatgatgtcatcttcgtctatttctatatccgtatccattgtagattgttgaccgattatcgagtttaaatcattactaatactcaatccttcagaatacaatctgtgtttcattgtaaatttataggcggtgtatttaagttggtagattttcaattatgtattaatatagcaacagtagttcttgctcctccttgattctagcatcctcttcattattttcttctacgtacataaacatgtccaatacgttagacaacacaccgacgatggcggccgctacagacacgaatatgactaaaccgatgaccatttaaaaacccctctctagctttcacttaaactgtatcgatcattcttttagcacatgtataatataaaaacattattctatttcgaatttaggcttccaaaaatttttcatccgtaaaccgataataatatatatagacttgttaatagtcggaataaatagattaatgcttaaactatcatcatctccacgattagagatacaatatttacattctttttgctgtttcgaaactttatcaatacacgttaatacaaacccaggaaggagatattgaaactgaggctgttgaaaatgaaacggtgaatacaataattcagataatgtaaaatcatgattccgtattctgatgatattagaactgctaatggatgtcgatggtatgtatctaggagtatctattttaacaaagcatcgatttgctaatatacaattatccttttgattaattgttattttattcatattcttaaaaggtttcatatttatcaattcttctacattaaaaatttccatttttaatttatgtagccccgcaatactcctcattacgtttcattttttgtctataatatccattttgttcatctcggtacatagattatccaattgagaagcgcatttagtagttttgtacattttaagtttattgacgaatcgtcgaaaactagttatagttaacattttattatttgataccctgatattaatacccctgccgttactattatttataactgatgtaatccacgtaacattggaattaactatcgatagtaatgcatcgacgcttccaaaattgtctattataaactcaccgataatttttttattgcatgttttcatattcattaggattatcaaatctttaatcttattacgattgtatgcgttgatattacaagacgtcattctaaaagacggaggatctccatcaaatgccagacaatcacgtacaaagtacatggaaataggttttgttctattgcgcatcatagatttatatagaacacccgtagaaatactaatttgttttactctataaaatactaatgcatctatttcatcgttttgtataacgtctttccaagtgtcaaattccaaatttttttcattgatagtaccaaattcttctatctctttaactacttgcatagataggtaattacagtgatgcctacatgccgttttttgaaactgaatagatgcgtctagaagcgatgctacgctagtcacaatcaccactttcatatttagaatatatatatgtaaaaatatagtagaatttcattttgtttttttctatgctataaatgaattctcattttgcatctgctcatactccgttttatattaataccaaagaaggaagatatctggttctaaaagccgttaaagtatgcgatgttagaactgtagaatgcgaaggaagtaaagcttcctgcgtactcaaagtagataaaccctcatcgcccgcgtgtgagagaagaccttcgtccccgtccagatgcgagagaatgaataaccctggaaaacaagttccgtttatgaggacggacatgctacaaaatatgttcgcggctaatcgcgataatgtagcttctagacttttgtcctaaaatactattatatccttttcgatattaataaatccgtgtcgtccaggttttttatctctttcagtatgtgaatagataggtattttatctctattcatcatcgaatttaagagatccgataaacattgtttgtattctccagatgtcagcatctgatacaacaatatatgtgcacataaacctctggcacttatttcatgtaccttccccttatcactaaggagaatagtatttgagaaatatgtatacatgatattatcatgaattagatatacagaatttgtaacactctcgaaatcacacgatgtgtcggcgttaagatctaatatatcactcgataacacattttcatctagatacactagacattttttaaagctaaaatagtctttagtagtaacagtaactatgcgattattttcatcgatgatacatttcatcggcatattattacgcttaccatcaaagactataccatgtgtatatctaacgtattctagcatggttgccatacgcgcattaaacttttcaggatctttggatagatcttccaatctatctatttgagaaaacatttttatcatgttcaatagttgaaacgtcggatccactatatagatattatctataaagattttaggaactacgttcatggtatcctggcgaatattaaaactatcaatgatatgattatcgttttcatcttttatcaccatatagtttctaagatatgggattttacttaatataatattatttcccgtgataaattttattagaaaggccaaatctataagaaaagtcctagaattagtctgaagaatatctatatcgccgtatagtatatttggattaattagatatagagaatatgatccgtaacatatacaacttttattatggcgtctaagatattcttccatcaacttattaacatttttgactagggaagatacattatgacgtcccattacttttgccttgtctattactgcgacgttcatagaatttagcatatctcttgccaattcttccattgatgttacattataagaaattttagatgaaattacatttggagctttaatagtaagaactcctaatatgtccgtgtatgtggtcactaatacagattgtagttctataatcgtaaataatttacctatattatatgtttgagtctgtttagaaaagtagctaagtatacgatcttttatttctgatgcagatgtatcaacatcggaaaaaaatctttttttattcttttttactaaagatacaaatatgtctttgttaaaaacagttattttctgaatatttctagcttgtaattttaacatatgatattcgttcacactaggtactctgcctaaataggtttctataatctttaatgtaatattaggaagagtattctgatcaggattcctattcattttgaggatttaaaactctgattattgtctaatatggtctctacgcaaactttttcacagagcgatagagtttttgataactcgtttttcttaagaaatataaaactactgtctccagagctcgctctatcttttattttatctaattcgatacaaactcctgatactggttcagaaagtaattcattaattttcagtcctttatagaagatatttaatatagataatacaaaatcttcagtttttgatatcgatctgattgatcctagaactagatatattaataacgtgctcattaggcagtttatggcagcttgataattagatatagtatattccagttcatatttattagataccgcattgcccagattttgatattctatgaattcctctgaaaataaatccaaaataactagacattctattttttgtggattagtgtactctcttccctctatcatgttcactactggtgtccacgatgataaatatctagagggaatataatatagtccataggatgccaatctagcaatgtcgaataactgtaattttattcttcgctcttcattatgaattgattcttgaggtataaacctaacacaaattatattattagacttttcgtatgtaatgtctttcatgttataagtttttaatcctggaatagaatctattttaatgaggcttttaaacgcagagttctccaacgagtcaaagcataatactctgttgtttttcttatatacgatgttacgattttcttctttgaatggaataggtttttgaattagtttataattacaacataatagataaggaagtgtgcaaatagtacgcggaaaaaacataatagctcccctgttttcatccatggttttaagtaaatgatcactggcttctttagtcaatggatattcgaacattaaccgtttcatcatcattggacagaatccatatttcttaatgtaaagagtgatcaaatcattgtgtttattgtaccatcttgttgtaaatgtgtattcggttatcggatctgctcctttttctattaaagtatcgatgtcaatctcgtctaagaattcaactatatcgacatatttcatttgtatacacataaccattactaacgtagaatgtataggaagagatgtaacgggaacagggtttgttgattcgcaaactattctaatacataattcttctgttaatacgtcttgcacgtaatctattatagatgccaagatatctatataattattttgtaagatgatgttaactatgtgatctatataagtagtgtaataattcatgtattttgatatatgttccaactctgtctttgtgatgtctagtttcgtaatatctatagcatcctcaaaaaatatattcgcatatattcccaagtcttcagttctatcttctaaaaaatcttcaacgtatggaatataataatctattttacctcttctgatatcattaatgatatagtttttgacactatcttctgtcaattgattcttattcactatatctaagaaacggatagcgtccctaggacgaactactgccattaatatctctattatagcttctggacataattcatctattataccagaattaatgggaactattccgtatctatctaacatagttttaagaaagtcagaatctaagacttgatgttcatatattggttcatacatgaaatgatctctattgatgatagtgactatttcattctctgaaaattggtaactcattctatatatgctttccttgttgatgaaggatagaatatactcaatagaatttgtaccaacaaactgttctcttatgaatcgtatatcatcatctgaaataatcatgtaaggcatacatttaacaattagagacttgtctcctgttatcaatatactattcttgtgataatttatgtgtgaggcaaatttgtccacgttctttaattttgttatagtagatatcaaatccaatggagctacagttcttggcttaaacagatatagtttttctggaacaaattctacaacattattataaaggactttgggtaaataagtgggatgaaatcctattttaattaatgcgatagccttgtcctcgtgcagatatccaaacgcttttgtgatagtatggcattcattgtctagaaacgctctacgaatatctgtgacagatatcatctttagagaatatactagtcgcgttaatagtactacaatttgtattttttaatctatctcaataaaaaaattaatatgtatgattcaatgtataactaaactactaactgttattgataactagaatcagaatctaatgatgacgtacccaagaagtttatctactgccaatttagctgcattatttttagcatctcgtttagattttccatctgccttatcgaatactcttccgtcgatatctacacaggcataaaatgtaggagagttactaggcccaactgattcaatacgaaaagaccaatctctcttagttatttggcagtactcattaataacggtgacagggttagcatctttccaatcaataatttttttagccggaataacatcatcaaaagacttatgatcctctctcattgatttttcgcgggatacatcatctattatgacgtcagccataacatcagcatccggcttatccgcctccgttgtcataaaccaacgaggaggaatatcgtcggagctgtacaccatagcactacgttgaagatcgtacagagctttattaacttctcgcttctccatattaagttgtctagttagttgtgcagcagtagctccttcgattccaatggttttaatagcctcacacacaatctctgcgttagaacgttcgtcgatatagattttagacatttttagagagaactaacacaaccagcaataaaactgaacctactttatcatttttttattcatcatcctctggtggttcgtcgttcctatcaaatgtagctctgattaacccgtcatctataggtgatgctggttctggagattctggaggagatggattattatctggaagaatctctgttatttccttgttttcatgtatcgattgcgttgtaacattaagattgcgaaatgctctaaatttgggaggcttaaagtgttgtttgcaatctctacacgcgtgtctaactagtggaggttcgtcagctgctctagtttgaatcatcatcggcgtagtattcctacttttacagttaggacacggtgtattgtatttctcgtcgagaacgttaaaataatcgttgtaactcacatcctttattttatctatattgtattctactcctttcttaatgcattttataccgaataagagatagcgaaggaattctttttcggtgccgctagtacccttaatcatatcacatagtgttttatattccaaatttgtggcaatagacggtttatttctatacgatagtttgtttctggaatcctttgagtattctataccaatattattctttgattcgaatttagtttcttcgatattagattttgtattacctatattcttgatgtagtactttgatgatttttccatggcccattctattaagtcttccaagttggcatcatccacatattgtgatagtaattctcggatatcagtagcggctaccgccattgatgtttgttcattggatgagtaactactaatgtatacattttccatttataacacttatgtattaactttgttcatttatattttttcattattatgttgatattaacaaaagtgaatatatatatatgttaataattgtattgtggttatacggctacaattttataatgagtgaaagtcagtgtccgatgatcaatgacgatagctttactctgaaaagaaagtatcaaatcgatagtgcggagtcaacaataaaaatggataagaagaggataaagtttcagaatagagccaaaatggtaaaagaaataaatcagacaataagagcagcacaaactcattacgagacattgaaactaggatacataaaatttaagagaatgattaggactactactctagaagatatagcaccatctattccaaataatcagaaaacttataaactattctcggacatttcagccatcggcaaagcatcacagaatccgagtaagatggtatatgctctgctgctttacatgtttcccaatttgtttggagatgatcatagattcattcgttatagaatgcatccaatgagtaaaatcaaacacaagatcttctctcctttcaaacttaatcttattagaatattagtggaagaaagattctataataatgaatgcagatctaataaatggaaaataattggaacacaagttgataaaatgttgatagctgaatctgataaatatacaatagatgcaaggtataacctaaaacccatgtatagaatcaagggagaatctgaagaagataccctcttcatcaaacagatggtagaacaatgtgtgacatcccaggaattggtggaaaaagtgttgaagatactgtttagagatttgttcaagagtggagaatacaaagcgtacagatacgatgatgatgtagaaaatggattcattggattggatacactaaaattaaacattgttcatgatatagttgaaccatgtatgcctgttcgtaggccagtggctaagatactgtgtaaagaaatggtaaataaatactttgagaatccgctacatattattggtaaaaatcttcaagagtgcattgactttgttagtgaataggcatttcatctttctccaatactaattcaaattgttaaattaataatggatagtataaatagttattagttataagatagtaaaaataattattagaataagagtgtagtatcatagataactctcttctataaaaatggattttattcgtagaaagtatcttatatacacagtagaaaataatatagattttttaaaggatgatacattaagtaaagtaaacaattttaccctcaatcatgtactagctctcaagtatctagttagcaattttcctcaacatgttattactaaggatgtattagctaataccaatttttttgttttcatacatatggtacgatgttgtaaagtgtacgaagcggttttacgacacgcatttgatgcacccacgttgtacgttaaagcattgactaagaattatttatcgtttagtaacgcaatacaatcgtacaaggaaaccgtgcataaactaacacaagatgaaaaatttttagaggttgccgaatacatggacgaattaggagaacttataggcgtaaattatgacttagttcttaatccattatttcacggaggggaacccatcaaagatatggaaatcatttttttaaaactgtttaagaaaacagacttcaaagttgttaaaaaattaagtgttataagattacttatttgggcatacctaagcaagaaagatacaggcatagagtttgcggataatgatagacaagatatatatactctatttcaacaaactggtagaatcgtccatagcaatctaacagaaacgtttagagattatatctttcccggagataagactagctattgggtgtggttaaacgaaagtatagctaatgatgcggatatcgttcttaatagacccgccattaccatgtatgataaaattcttagttatatatactctgagataaaacaaggacgcgttaataaaaacatgcttaagttagtttatatctttgagcctgaaaaagatatcagagaacttctgctagaaatcatatatgatattcctggagatatcctatctattattgatgcaaaaaacgacgattggaaaaaatattttattagtttttataaagctaattttattaacggtaatacatttattagtgatagaacgtttaacgaggacttattcagagttgttgttcaaatagatcccgaatatttcgataatgaacgaattatgtctttattctctacgagtgctgcggacattaaacgatttgatgagttagatattaataacagttatatatctaatataatttatgaggtgaacgatatcacattagatacaatggatgatatgaagaagtgtcaaatctttaacgaggatacgtcgtattatgttaaggaatacaatacatacctgtttttgcacgagtcggatcccatggtcatagagaacggaatactaaagaaactgtcatctataaaatccaagagtagacggctgaacttgtttagcaaaaacattttaaaatattatttagacggacaattggctcgtctaggtcttgtgttagatgattataaaggagacttgttagttaaaatgataaaccatcttaagtctgtggaggatgtatccgcattcgttcgattttctacagataaaaaccctagtattcttccatcgctaatcaaaactattttagctagttataatatttccatcatcgtcttatttcaaaggtttttgagagataatctatatcatgtagaagaattcttggataaaagcatccatctaaccaagacggataagaaatatatacttcaattgataagacacggtagatcatagaacagaccaaatatattattaataatttgtatatacatagatataattatcacacatttttgataaatgggaactgctgcaacaattcagactcccaccaaattaatgaataaagaaaatgcagaaatgattttggaaaaaattgttgatcatatagttatgtatattagtgacgaatcaagtgattcagaaaataatcctgaatatattgattttcgtaacagatacgaagactatagatctctcattataaaaagtgatcacgagtttgtaaagctatgtaaaaatcatgcggagaaaagttctccagaaacgcaacaaatgattatcaaacacatatacgaacaatatcttattccagtatctgaagtactattaaaacctataatgtccatgggtgacataattacatataacggatgtaaagacaatgaatggatgctagaacaactctctaccctaaactttaacaatctccgcacatggaactcatgtagcataggcaatgtaacgcgtctgttttatacattttttagttatctgatgaaagataaactaaatatataagtataatcccattctaatactttaacctgatgtattacctgcatcttattagaatattaacctaactaaaagacataacataaaaactcattacatagttgataaaaagcggtaggatataaatattatggctgccaccgttccgcgttttgacgacgtgtacaaaaatgcacaaagaagaattctagatcaagaaacattttttagtagaggtctaagtagaccgttaatgaaaaacacatatctatttgataattacgcgtatggatggataccagaaactgcaatttggagtagtagatacgcaaacttagatgcaagtgactattatcccatttcgttgggattacttaaaaagttcgagtttctcatgtctctatataaaggtcctattccagtatacgaagaaaaagtaaatactgaattcattgctaatggatctttctccggtagatacgtatcatatcttagaaagttttctgctcttccaacaaacgagtttattagttttttgttactgacttccattccaatctataatatcttgttctggtttaaaaatactcagtttgatattactaaacacacattattcagatacgtctatacagataatgccaaacacctggcgttggctaggtatatgtatcaaacaggagactataagcctttgtttagtcgtctcaaagagaattatatatttaccggtcccgttccaatatgtatcaaagatatagatcaccctaatcttagtagagcaagaagtccatccgattatgagacattagctaatattagtactatattgtactttaccaagtatgatccggtattaatgtttttattgttttacgtacctgggtattcaattactacaaaaattactccagccgtagaatatctaatggataaactgaatctaacaaagagcgacgtacaactgttgtaaattattttatgcttcgtaaaatgtaggttttgaaccaaacattctttcaaagaatgagatgcataaaactttattatccaatagattgactatttcggacgtcaatcgtttaaagtaaacttcgtaaaatattctttgatcactgccgagtttaaaacttctatcgataattgtttcatatgttttaatatttacaagttttttggtccatggtccattaggacaaatatatgcaaaataatatcgttctccaagttctatagtctctggattatttttattatattcagtaaccaaatacatattagggttatctgcggatttataatttgagtgatgcattcgactcaacataaataattctagaggagacgatctactatcaaattcggatcgtaaatctgtttctaaagaacggagaatatctatacatacctgattagaattcatccgtccttcagacaacatctcagacagtctggttttgtacatcttaatcatattcttatgaaacttggaaacatctcttctagtttcactagtacctttattaattctctcaggtacagattttgaattcgacgatgccgagtatttcatcgttgtatatttcttcttcgattgcataatcagattcttatataccgcctcaaactctattttaaaattattaaacaatactctattattaatcagtcgttctaactctttcgctatttctatagacttatctacatcttgactgtctatctctgtaaacacggagtcggtatctccatacacgctacgaaaacgaaatctgtaatctataggcaacgatgttttcacaatcggattaatatctctatcgtccatataaaatggattacttaatggattggcaaaccgtaacataccgttagataactctgctccatttagtaccgattctagatacaagatcattctacgtcctatggatgtgcaactcttagccgaagcgtatgagtatagagcactatttctaaatcccatcagaccatatactgagttggctactatcttgtacgtatattgcatggaatcatagatggccttttcagttgaactggtagcctgttttagcatctttttatatctggctctctctgccaaaaatgttcttaatagtctaggaatggttccttctatcgatctatcgaaaattgctatttcagagatgaggttcggtagtctaggttcacaatgaaccgtaatatatctaggaggtggatatttctgaagcaatagctgattatttatttcttcttccaatctattggtactaacaacgacaccgactaatgtttccggagatagatttccaaagatacacacattaggatacagactgttataatcaaagattaatacattattactaaacattttttgttttggagcaaataccttaccgccttcataaggaaacttttgttttgtttctgatctaactaagatagttttagtttccaacaatagctttaacagtggacccttgatgactgtactcgctctatattcgaataccatggattgaggaagcacatatgttgacgcacccgcgtctgtttttgtttctactccataatactcccacaaatactgacacaaacaagcatcatgaatacagtatctagccatatctaaagctatgtttagattataatccttatacatctgagctaaatcaacgtcatcctttccgaaagataatttatatgtatcattaggtaaagtaggacataatagtacgactttaaatccattttcccaaatatctttacgaattactttacatataatatcctcatcaacagtcacataattacctgtggttaaaacctttgcaaatgcagcggctttgcctttcgcgtctgtagtatcgtcaccgatgaacgtcatttctctaactcctctatttaatactttacccatgcaactgaacgcgttcttggatatagaatccaatttgtacgaatccaatttttcaaatttttgaatgaatgaatatagatcgaaaaatatagttccattattgttattaacgtgaaacgtagtattggccatgccgcctactcccttatgactagactgatttctctcataaatacagagatgtacagcttcctttttgtccggagatctaaagataattttctctcctgttaataactctagacgattagtaatatatctcagatcaaagttatgtccgttaaaggtaacgacgtagtcgaacgttagttccaacaattgtttagctattcgtaacaaaactatttcagaacatagaactagttctcgttcgtaatccatttccattagtgactgtatcctcaaacatcctctatcgacggcttcttgtatttcctgttccgttaacatctcttcattaatgagcgtaaacaataatcgtttaccacttaaatcgatataacagtaacttgtatgcgagattgggttaataaatacagaaggaaacttcttatcgaagtgacactctatatctagaaataagtacgatcttgggatatcgaatctaggtatttttttagcgaaacagttacgtggatcgtcacaatgataacatccattgttaatctttgtcaaatattgctcgtccaacgagtaacatccgtctggagatatcccgttagaaatataaaaccaactaatattgagaaattcatccatggtggcattttgtatgctgcgtttctttggctcttctatcaaccacatatctgcgacggagcattttctatctttaatatctagattataacttattgtctcgtcaatgtctatagttctcatctttcccaacggcctcgcattaaatggaggaggagacaatgactgatatatttcgtccgtcactacgtaataaaagtaatgaggaaatcgtataaatacggtctcaccatttcgacatctggatttcagatataaaaatctgttttcaccgtgactttcaaaccaattaatgcaccgaacatccatttatagaatttagaaatatattttcatttaaatgaatcccaaacattggggaagagccgtatggaccattatttttatagtactttcgcaagcgggtttagacggcaacatagaagcgtgtaaacgaaaactatatactatagttagcactcttccatgtcctgcatgtagacggcacgcgactatcgctatagaggacaataatgtcatgtctagcgatgatctgaattatatttattattttttcatcagattatttaacaatttggcatctgatcccaaatacgcgatcgatgtgacaaaggttaaccctttataaacttaacccattataaaacttatgattagtcacaactgaaataaccgcgtgattattttttggtataattctacacggcatggtttctgtgactatgaattcaacccccgttacattagtgaaatctttaacaaacagcaagggttcgtcaaagacataaaactcattgtttacaatcgaaatagaccccctatcacacttaaaataaaaaatatccttatcctttaccaccaaataaaattctgattggtcaatgtgaatgtattcacttaacagttccacaaatttatttattaactccgaggcacatacatcgtcggtattttttatggcaaactttactcttccagcatccgtttctaaaaaaatattaacgagttccatttatatcatccaatattattgaaatgacgttgatggacagatgatacaaataagaaggtacggtacctttgtccaccatctcctccaattcatgctctattttgtcattaactttaatgtatgaaaacagtacgccacatgcttccatgacagtgtgtaacactttggatacaaaatgtttgacattagtataattgttcaagactgtcaatctataatagatagtagctataatatattctatgatggtattgaagaagatgacaaccttggcatattgatcatttaacacagacatggtatcaacagatagcttgaatgaaagagaatcagtaattggaataagcgtcttctcgatagagtgtccgtataccaacatgtctgatattttgatgtattccattaaattatttagttttttctttttattctcgttaaacagcatttctgtcaacggaccccaacatcgttgaccgattaagttttgattgatttttccgtgtaaggcgtatctagtcagatcgtatagcctatccaataatccatcatctgtgcgtagatcacatcgtacactttttaattctctatagaagagcgacagacatctggagcaattacagacagcaatttctttattctctacagatgtaagatacttgaagacattcctatgatgatgcagaattttggataacacggtattgatggtatctgttaccataattcctttgatggctgatagtgtcagagcacaagatttccaatctttgacaatttttagcaccattatctttgttttgatatctatatcagacagcatggtgcgtctgacaacacagggattaagacggaaagatgaaatgattctctcaacatcttcaatagataccttgctattttttctggcattatctatatgtgcgagaatatcctctagagaatcagtatcctttttgatgatagtggatctcaatgacatgggacgtctaaaccttcttattctatcaccagattgcatggtgatttgtcttctttcttttatcataatgtaatctctaaattcatcggcaaattgtctatatctaaaatcataatatgagatgtttacctctacaaatatctgttcgtccaatgttaaagtatttacatcagttttgtattccaaattaaacatggcaacggatttaattttatattcctctattaagtcctcgtcgataataacagaatgtagataatcatttaatccatcgtacatggttggaagatgcttgttgacaaaatctttaattgtcttgatgaaggtgggactatatctaacatcttgattaataaaatttataacattgtccataggatactttgtaactagttttatacacatctcttcatcggtaagtttagacagaatatcgtgaacaggtggtatattatattcatcagatatacgaagaacaatgtccaaatctatattgtttaatatattatatagatgtagcgtagctcctacaggaatatctttaactaagtcaatgatttcatcaaccgttagatctattttaaagttaatcatataggcattgatttttaaaaggtatgtagccttgactacattctcattaattaaccattccaagtcactgtgtgtaagaagattatattctatcataagcttgactacatttggtcccgataccattaaagaattcttatgatataaggaaacagattttaggtactcatctactctacaagaattttggagagccttaacgatatcagtgacgtttattatttcaggaggaaaaaacctaacattgagaatatcggaattaatagcttccagatacagtgattttggcaatagtccgtgtaatccataatccagtaacacgagctggtgcttgctagacaccttttcaatgtttaatttttttgaaataagctttgataaagccttcctcgcaaattccggatacatgaacatgttggcgacatgattaagtattgttttttcattatttttatattttctcaacaagttctcaataccccaatagatgatagaatatcacccaatgcgtccatgttgtctatttccaacaggtcgctatatccaccaatagaagtttttccaaaaaagattctaggaacagttctaccaccagtaatttgttcaaaatagtcacgcaattcattttcgggtttaaattctttaatatcgacaatttcatacgctcctcttttgaaactaaacttatttagaatatccagtgcatttctacaaaaaggacatgtatacttgacaaaaattgtcactttgttattggccaacctttgttgtacaaattcctcggccattttaatatttaagtgatataaaactatctcgacttatttaactctttagtcgagatatatggacgcagatagctatatgatagccaactacagaaggcaaacgctataaaaaacataattacgacgagcatatttataaatatttttattcagcattacttgatatagtaatattaggcacagtcaaacattcaaccactctcgatacattaactctctcattttctttaacaaattctgcaatatcttcgtaaaaagattcttgaaactttttagaatatctatcgactctagatgaaatagcgttcgtcaacatactatgttttgtatacataaaggcgcccattttaacagtttctagtgacaaaatgctagcgatcctaggatcctttagaatcacatagattgacgattcgtctctcttagtaactctagtaaaataatcatacaatctagtacgcgaaataatattatccttgacttgaggagatctaaacaatctagttttgagaacatcgataagttcatcgggaatgacatacatactatctttaatagaactcttttcatccagttgaatggattcgtccttaaccaactgattaatgagatcttctattttatcattttccagatgatatgtatgtccattaaagttaaattgtgtagcgcttctttttagtctagcagccaatactttaacatcactaatatcgatatacaaaggagatgatttatctatggtattaagaattcgtttttcgacatccgtcaaaaccaattcctttttgcctgtatcatccagttttccatcctttgtaaagaaattattttctactagactattaataagactgataaggattcctccataattgcacaatccaaactttttcacaaaactagactttacaagatctacaggaatgcgtacttcaggttttttagcttgtgattttttcttttgcggacattttcttgtgaccaactcatctaccatttcattgattttagcagtgaaataagctttcaatgcacgggcactgatactattgaaaacgagttgatcttcaaattccgccatttaagttcaccaaacaacttttaaatacaaatatatcaatagtagtagaataagaactataaaaaaataataattaaccaataccaaccccaacaaccggtattattagttgatgtgactgttttctcatcacttagaacagatttaacaatttctataaagtctgtcaaatcatcttccggagaccccataaatacaccaaatatagcggcgtacaacttatccatttatacattgaatattggcttttctttatcgctatcttcatcatattcatcatcaatatcaacaagtcccagattacgagccagatcttcttctacattttcagtcattgatacacgttcactatctccagagagtccgataacgttagccaccacttctctatcaatgattagtttcttgagcgcgaaagtaatttttgtttccgttccggatctatagaagacgataggtgtgataattgccttggccaattgtctttctcttttactgagtgattctagttcaccttctatagatctgagaatggatgattctccagtcgaaacatattctaccatggatccgtttaatttgttgatgaagatggattcatccttaaatgttttctctgtaatagtttccaccgaaagactatgcaaagaatttggaatgcgttccttgtgcttaatgtttccatagacggcttctagaagttgatacaacataggactagccgcggtaacttttatttttagaaagtatccatcgcttctatcttgtttagatttatttttataaagtttagtctctccttccaacataataaaagtggaagtcatttgactagataaactatcagtaagttttatagagatagacgaacaattagcgtattgagaagcatttagtgtaacgtattcgatacattttgcattagatttactaatcgattttgcatactctataacacccgcacaagtctgtagagaatcgctagatgcagtaggtcttggtgaagtttcaactctcttcttgattaccttactcatgattaaacctaaataattgtactttgtaatataatgatatatattttcactttatctcatttgagaataaaaatgtttttgtttaaccactgcatgatgtacagatttcggaatcgcaaaccaccagtggttttattttatccttgtccaatgtgaattgaatgggagcggatgcgggtttcgtacgtagatagtacattcccgtttttagaccgagactccatccgtaaaaatgcatactcgttagtttggaataactcggatctgctatatggatattcatagattgactttgatcgatgaaggctcccctgtctgcagccatttttatgatcgtcttttgtggaatttcccaaatagttttataaactcgcttaatatcttctggaaggtttgtattctgaatggatccaccatctgccataatcctattcttgatctcatcattccataattttctctcggttaaaactctaaggagatgcggattaactacttgaaattctccagacaatactctccgagtgtaaatattactggtatacggttccaccgactcattatttcccaaaatttgagcagttgatgcagtcggcataggtgccaccaataaactatttctaagaccgtatgttctgattttatcttttagaggttcccaattccaaagatccgacggtacaacattccaaagatcatattgtagaataccgttactggcgtacgatcctacatatgtatcgtatggtccttccttctcagctagttcacaactcgcctctaatgcaccgtaataaatggtttcgaagatcttcttatttagatcttgtgcttccaggctatcaaatggataatttaagagaataaacgcgtccgctaatccttgaacaccaataccgataggtctatgtctcttattagagatttcagcttctggaataggataataattaatatctataattttattgagatttctgacaattactttgaccacatccttcagtttgagaaaatcaaatcgcccatctattacaaacatgttcaaggcaacagatgccagattacaaacggctacctcattagcatccgcatattgtattatctcagtgcaaagattactacacttgatagttcctaaattttgttgattactctttttgttacacgcatccttataaagaatgaatggagtaccagtttcaatctgagattctataatcgctttccagacgactcgagcctttattatagatttgtatctcctttctctttcgtatagtgtatacaatcgttcgaactcgtctccccaaacattgtccaatccaggacattcatccggacacatcaacgaccactctccgtcatccttcactcgtttcataaagagatcaggaatccaaagagctataaatagatctctggttctatgttcctcgtttcctgtattctttttaagatcgaggaacgccataatatcagaatgccacggttccaagtatatggccataactccaggccgtttgtttcctccctgatctatgtatctagcggtgttattataaactctcaacattggaataataccgtttgatataccattggtaccggagatatagcttccactggcacgaatattactaattgatagacctattccccctgccattttagagattaatgcgcatcgttttaacgtgtcatagataccctctatgctatcatcgatcatgttaagtagaaaacagctagacatttggtgacgactagttcccgcattaaataaggtaggagaagcgtgcgtaaaccatttttcagaaagtagattgtacgtctcaatagctgagtctatatcccattgatgaattcctactgcgacacgcattaacatgtgctgaggtctttcaacgatcttgttgtttattttcaacaagtaggatttttccaaagttttaaaaccaaaatagttgtatgaaaagtctcgttcgtaaataataaccgagttgagtttatccttatatttgttaactatatccatggtgatacttgaaataatcggagaatgtttcccatttttaggattaacatagttgaataaatcctccatcacttcactaaatagtttttttgtttccttgtgtagatttgatacggctattctggcggctagaatggcataatccggatgttgtgtagtacaagtggctgctatttcggctgccagagtgtccaattctaccgttgttactccattatatattccttgaataaccttcatagctattttaataggatctatatgatccgtgtttaagccataacataattttctaatacgagacgtgattttatcaaacatgacattttccttgtatccatttcgtttaatgacaaacatttttgttggtgtaataaaaaaattatttaacttttcattaatagggatttgacgtatgtagcgtacaaaatgatcgttcctggtatatagataaagagtcctatatatttgaaaatcgttacggctcgattaaactttaatgattgcatagtgaatatatcattaggatttaactccttgactatcatggcggcgccagaaattaccatcaaaagcattaatacagttatgccgatcgcagttaaaacggttatagcatccaccatttatatctaaaaattagatcaaagaatatgtgacaaagtcctagttgtatactgagaattgacgaaacaatgtttcttacatatttttttcttattagtaactgacttaatagtaggaactggaaagctagacttgattattctataagtatagatacccttccagataatgttctctttgataaaagttccagaaaatgtagaattttttaaaaagttatcttttgctattaccaagattgtgtttagacgcttattattaatatgagtgatgaaatccacaccgcctctagatatcgcctttatttccacattagatggtaaatccaatagtgaaactatctttttaggaatgtatggactcgcgtttagaggagtgaacgtcttgggcgtcggaaaggatgattcgtcaaacgaataaacaatttcacaaatggatgttaatgtattagtaggaaattttttgacgctagtggaattgaagattctaatggatgatgttctacctatttcatccgataacatgttaatttccgacaccaacggttttaatatttcgatgatatacggtagtctctctttcggacttatatagcttattccacaatacgagtcattatatactccaaaaaacaaaataactagtataaaatctgtatcgaatgggaaaaacgaaattatcgacataggtatagaatccggaacattgaacgtattaatacttaattctttttctgtggtaagtaccgataggttattgacattgtatggttttaaatattctataacttgagacttgatagatattagtgatgaattgaaaattatttttatcaccacgtgtgtttcaggatcatcgtcgacgcccgtcaaccaaccgaatggagtaaaataaatatcattaatatatgctctagatattagtatttttattaatcctttgattatcatcttctcgtaggcgaatgattccatgatcaagagtgatttgagaacatcctccggagtattaatgggcttagtaaacagtccatcgttgcaataataaaagttatccaagttaaaggatattatgcattcgtttaaagatatcacctcatctgacggagacaattttttggtaggttttagagactttgaagctacttgtttaacaaagttattcatcgtcgtctactattctatttaattttgtagttaatttatcacatatcacattaattgactttttggtccatttttccatacgtttatattcttttaatcctgcgttatccgtttccgttatatccagggatagatcttgcaagttaaatagaatgctcttaaataatgtcattttcttatccgctaaaaatttaaagaatgtataaacctttttcagagatttgaaactcttaggtggtgtcctagtacacaatatcataaacaaactaataaacattccacattcagattccaacagctgattaacttccacattaatacagcctattttcgctccaaatgtacattcgaaaaatctgaataaaacatcgatgtcacaatttgtattatccaatacagaatgtttgtgattcgtgttaaaaccatcggagaaggaatagaaataaaaattattatagtggtggaattcagttggaatattgcctccggagtcataaaaggatactaaacattgttttttatcataaattacacatttccaatgagacaaataacaaaatccaaacattacaaatctagaggtagaacttttaattttgtctttaagtatatacgataagatatgtttattcataaacgcgtcaaatttttcatgaatcgctaaggagtttaagaatctcatgtcaaattgtcctatataatccacttcggatccataagcaaactgagagactaagttcttaatacttcgattgctcatccaggctcctctctcaggctctattttcatcttgacgacctttggattttcaccagtatgtattcctttacgtgataaatcatcgattttcaaatccatttgtgagaagtctatcgccttagatactttttcccgtagtcgaggtttaaaaaaatacgctaacggtatactagtaggtaactcaaagacatcatatatagaatggtaacgcgtctttaactcgtcggttaactctttcttttgatcgagttcgtcgctactattgggtctgctcaggtgccccgactctactagttccaacatcataccgataggaatacaagacactttgccggcggttgtagatttatcatatttttccactacatatccgttacaatttgttaaaaatttagatacatctatattgctacataatccagctagtgaatatatatgacataataaattggtaaatcctagttctggtattttactaattactaaatctgtatatctttccatttatcatggaaaagaatttaccagatatcttcttttttccaaactgcgttaatgtattctcttacaaatattcacaagatgaattcagtaatatgagtaaaacggaacgtgatagtttctcattggccgtgtttccagttataaaacatagatggcataacgcacacgttgtaaaacataaaggaatatacaaagttagtacagaagcacgtggaaaaaaagtatctcctccatcactaggaaaacccgcacacataaacctaaccgcgaagcaatatatatacagtgaacacacaataagctttgaatgttatagttttctaaaatgtataacaaatacagaaatcaattcgttcgatgagtatatattaagaggactattagaagctggtaatagtttacagatattttccaattccgtaggtaaacgaacagatactataggtgtactagggaataagtatccatttagcaaaattccattggcctcattaactcctaaagcacaacgagagatattttcagcgtggatttctcatagacctgtagttttaactggaggaactggagtgggtaagacgtcacaggtacccaagttattgctttggtttaattatttatttggtggattctctactctagataaaatcactgactttcacgaaagaccagtcattctatctcttcctaggatagctttagttagattgcatagcaataccattttaaaatcattgggatttaaggtactagatggatctcctatttctttacggtacggatctataccggaagaattaataaacaaacaaccaaaaaaatatggaattgtattttctacccataagttatctctaacaaaactatttagttatggcactcttattatagacgaagttcatgagcatgatcaaataggagatattattatagcagtagcgagaaagcatcatacgaaaatagattctatgtttttaatgactgccacgttagaggatgacagggaacggctaaaagtatttttacctaatcccgcatttatacatattcctggagatacactgtttaaaattagcgaggtatttattcataataagataaatccatcttccagaatggcatacatagaagaagaaaagagaaatttagttactgctatacagatgtatactcctcctgatggatcatccggtatagtctttgtggcatccgttgcacagtgtcacgaatataaatcatatttagaaaaaagattaccgtatgatatgtatattattcatggtaaggtcttagatatagacgaaatattagaaaaagtgtattcatcacctaatgtatcgataattatttctactccttatttggaatccagcgttactatacgcaatgttacacacatttatgatatgggtagagtttttgtccccgctccttttggaggatcgcaacaatttatttctaaatctatgagagatcaacgaaaaggaagagtaggaagagttaatcctggtacatacgtctatttctatgatctgtcttatatgaagtctatacagcgaatagattcagaatttctacataattatatattgtacgctaataagtttaatctaacactccccgaagatttgtttataatccctacaaatttggatattctatggcgtacaaaggaatatatagactcgttcgatattagtacagaaacatggaataaattattatccaattattatatgaagatgatagagtatgctaaactttatgtactaagtcctattctcgctgaggagttggataactttgagaggacgggagaattaactagtattgtacgagaagccattttatctctaaatttacaaattaagattttaaattttaaacataaagatgatgatacgtatatacacttttgtaaaatattattcggtgtctataacggaacaaacgctactatatattatcatagacctctaacgggatatatgaatatgatttcagatactatatttgttcctgtagataataactaaaaattaaactctaatgaccacatctttttttagagatgaaaaattttccacatctccttttgtagacacgactaaacattttgcagaaaaaagtttattagtgtttagataatcgtatacttcatcagtgtagatagtaaatgtgaacagataaaaggtattcttgctcaatagattggtaaattccatagaatatattaatcctttcttcttgagatcccacatcatttcaaccagagacgttttatccaatgatttacctcgtactataccacatacaaaactagattttgcagtgacgtcgtacctggtattcctaccaaacaaaattttacttttagttcttttagaaaattctaaggtagaatctctatttgccaatatgtcatctatggaattaccactagcaaaaaatgatagaaatatatattgatacatcgcagctggttttgatctactatactttaaaaacgaatcagattccataattgcctgtatatcatcagctgaaaaactatgttttacacgtattccttcggcatttctttttaatgatatatcttgtttagacaatgataaagttatcatgtccatgagagacgcgtctccgtatcgtataaatatttcattagatgttagacgcttcattaggggtatacttctataaggtttcttaatcagtccatcattggttgcgtcaagaactactatcggatgttgttgggtatctctagtgttacacatggccttactaaagtttgggtaaataactatgatatctctattaattatagatgcatatatttcattcgtcaaggatattagtatcgacttgctatcgtcattaatacgtgtaatgtaatcatataaatcatgcgatagccaaggaaaatttaaatagatgttcatcatataatcgtcgctataattcatattaatacgttgacattgactaatttgtaatatagcctcgccacgaagaaagctctcgtattcagtttcatcgataaaggataccgttaaatataactggttgccgatagtctcatagtctattaagtggtaagtttcgtacaaatacagaatccctaaaatattatctaatgttggattaatctttaccataactgtataaaatggagacggagtcataactattttaccgtttgtacttactggaatagatgaaggaataatctccggacatgctggtaaagacccaaatgtctgtttgaagaaatccaatgttccaggtcctaatctcttaacaaaaattacgatattcgatcccgatatcctttgcattctatttaccagcatatcacgaactatattaagattatctatcatgtctattctcccaccgttatataaatcgcctccgctaagaaacgttagtatatccatacaatggaatacttcatttctaaaatagtattcgttttctaattctttaatgtgaaatcgtatactagaaagggaaaaattatctttgagttttccgttagaaaagaaccacgaaactaatgttctgattgcgtccgattccgttgctgaattaatggatttacaccaaaaactcatataacttctagatgtagaagcattcgctaaaaaattagtagaatcaaaggatataagtagatgttccaacaagtgagcaattcccaagatttcatctatatcattctcgaatccgaaattagaaattcccaagtagatatcctttttcatccgatcgttgatgaaaatacgaactttattcggtaagacaatcatttactaaggagtaaaataggaagtaatgttcgtatgtcgttatcatcgtataaattaaaggtgtgttttttaccattaagtgacattataattttaccaatattggaattataatataggtgtatttgcgcactcgcgacggttgatgcatcggtaaatatagctgtatctaatgttctagtcggtatttcatcatttcgctgtctaataatagcgttttctctatctgtttccattacagctgcctgaagtttattggtcggataatatgtaaaataataagaaatacatacgaataacaaaaataaaataagatataataaagatgccatttagagatctaattttgtttaacttgtccaaattcctacttacagaagatgaggaatcgttggagatagtgtcttccttatgtagaggatttgaaatatcttataatgacttgataacttactttccagataggaaataccataaatatatttataaagtatttgaacatgtagatttatcggaggaattaagtatggaattccatgatacaactctgagagatttagtctatcttagattgtacaagtattccaagtgtatacggccgtgttataaattaggagataatctaaaaggcatagttgttataaaggacaggaatatttatattagggaagcaaatgatgacttgatagaatatctcctcaaggaatacactcctcagatttatacatattctaatgagcgcgtccccataactggttcaaaattaattctttgtggattttctcaagttacatttatggcgtatacaacgtcgcatataacaacaaataaaaaggtagatgttctcgtttccaaaaaatgtatagatgaactagtcgatccaataaattatcaaatacttcaaaatttatttgataaaggaagcggaacaataaacaaaatactcaggaagatattttattcggtaacaggtggccaaactccataggtagctttttctatttcggattttagaatttccaaattcaccagcgatttatcggttttggtgaaatccaaggatttattaatgtccacaaatgccatttgttttgtctgtggattgtatttgaaaatggaaacgatgtagttagatagatgcgctgcgaagtttcctattagggttccgcgcttcacgtcacccagcatacttgaatcaccatcctttaaaaaaaatgataagatatcaacatggagtatatcatactcggattttaattcttctactgcatcactgacattttcacaaatactacaatacggtttaccgaaaataatcagtacgttcttcatttatgggtatcaaaaacttaaaatcgttactgctggaaaataaatcactgacgatattagatgataatttatacaaagtatacaatggaatatttgtggatacaatgagtatttatatagccgtcgccaattgtgtcagaaacttagaagagttaactacggtattcataaaatacgtaaacggatgggtaaaaaagggagggcatgtaaccctttttatcgatagaggaagtataaaaattaaacaagacgttagagacaagagacgtaaatattctaaattaaccaaggacagaaaaatgttagaattagaaaagtgtacatccgaaatacaaaatgttaccggatttatggaagaagaaataaaggcagaaatgcaattaaaaatcgataaactcacatttcaaatatatttatctgattctgataacataaaaatatcattgaatgagatactaacacatttcaacaataatgagaatgttacattattttattgtgatgaacgagacgcagaattcgttatgtgtctcgaggctaaaacacatttctctaccacaggagaatggccgttgataataagtaccgatcaggatactatgctatttgcatctgctgataatcatcctaagatgataaaaaacttaactcaactgtttaaatttgttccctcggcagaggataactatttagcaaaattaacggcgttagtgaatggatgtgatttctttcctggactctatggggcatctataacacccaccaacttaaacaaaatacaattgtttagtgattttacaatcgataatatagtcactagtttggcaattaaaaattattatagaaagactaactctaccgtagacgtgcgtaatattgttacgtttataaacgattacgctaatttagacgatgtctactcgtatgttcctccttgtcaatgcactgttcaagaatttatattttccgcattagatgaaaaatggaatgaatttaaatcatcttatttagaaagcgttccgttaccctgccaattaatgtacgcgttagaaccacgtaaggagattgatgtttcagaagttaaaactttatcatcttatatagatttcgaaaatactaaatcagatatcgatgttataaaatctatatcctcgatcttcggatattctaacgaaaactgtaacacgatagtattcggcatctataaggataatttactactgagtataaataattcattttactttaacgatagtctgttaataaccaatactaaaagtgataatataataaatataggttactagattaaaaatggtgttccaactcgtgtgctctacgtgcggcaaagatatttctcacgaacgatataaattgattatacgaaaaaaatcattaaaggatgtactcgtcagtgtaaagaacgaatgttgtaggttaaaattatctacacaaatagaacctcaacgtaacttaacagtgcaacctctattggatataaactaatatggatccggttaattttatcaagacatatgcgcctagaggttctattatttttattaattataccatgtcattaacaagtcatttgaatccatcgatagaaaaacatgtgggtatttattatggtacgttattatcggaacacttggtagttgaatctacctatagaaaaggagttcgaatagtcccattggatagtttttttgaaggatatcttagtgcaaaagtatacatgttagagaatattcaagttatgaaaatagcagctgatacgtcattaactttattgggtattccgtatggatttggtcataatagaatgtattgttttaaattggtagctgaatgttataaaaatgccggtattgatacatcgtctaaacgaatattaggtaaagatatttttctgagccaaaacttcacagacgataatagatggataaagatatatgattctaataatttaacattttggcaaattgattaccttaaagggtgagttaatatgcataactactcctccgttgttttttccctcgttctttttcttaacgttgtttgccatcactctcataatgtaaagatattctaaaatggtaaacttttgcatatcggacgcagaaattggtataaatgttgtaattgtattatttcccgtcaatggactagtcacagctccatcagttttatatcctttagagtatttctcactcgtgtctaacattctagagcattccatgatctgtttatcgttgatattggccggaaagatagattttttattttttattatattactattggcaattgtagatataacttctggtaaatatttttctaccttttcaatctcttctattttcaagccggctatatattctgctatattgttgctagtatcaataccttttctggctaagaagtcatatgtggtattcactatatcagttttaactggtagttccattagcctttccacttctgcagaataatcagaaattggttctttaccagaaaatccagctactataataggctcaccgatgatcattggcaaaatcctatattgtaccagattaatgagagcatatttcatttccaataattctgctagttcttgagacattgatttatttgatgaatctagttggttctctagatactctaccatttctgccgcatacaataacttgttagataaaatcagggttatcaaagtgtttagcgtggctagaatagtgggcttgcatgtattaaagaatgcggtagtatgagtaaaccgttttaacgaattatatagtctccagaaatctgtggcgttacatacatgagccgaatgacatcgaagattgtccaatatttttaatagctgctctttgtccattatttctatatttgactcgcaacaattgtagataccattaatcaccgattcctttttcgatgccggacaatagcacaattgtttagctttggactctatgtattcagaattaatagatatatctctcaatacagattgcactatacattttgaaactatgtcaaaaattgtagaacgacgctgttctgcagccatttaactttaaataatttacaaaaatttaaaatgagcatccgtataaaaatcgataaactgcgccaaattgtggcatatttttcagagttcagtgaagaagtgtctataaatgtagactcgacggatgagttaatgtatatttttgccgccttgggcggatctgtaaacatttgggcaattatacctctaagtgcatcagtgttttaccgaggagccgaaaatattgtgtttaatcttcctgtgtccaaggtaaaatcgtgtttgtgtagttttcacaatgatgccatcatagatatagaacctgatctggaaaataatctagtaaaactttctagttatcatgtagtaagtgtcgattgtaacaaggaactgatgcctattaggacagatactactatttgtctaagtatagatcaaaagaaatcttacgtgtttaattttcacaagtatgaagaaaaatgttgtggtagaaccgtcattcatctagaatggttgttgggctttatcaagtgtattagtcagcatcagcatctggctattatgtttaaagatgacaatattattatgaagactcctggtaatactgatgcgttttccagggaatattctatgactgaatgttctcaagaactacaaaagttttctttcaaaatagctatctcgtctctcaacaaactacgaggattcaaaaagagagtcaatgtttttgaaactagaatcgtaatggataatgacgataacattttaggaatgttgttttcggatagagttcaatcctttaagatcaacatctttatggcgtttttagattaatactttcaatgagataaatatgggtggcggagtaagtgttgagctccctaaacgggatccgcctccgggagtacccactgatgagatgttattaaacgtggataaaatgcatgacgtgatagctcccgctaagcttttagaatatgtgcatataggaccactagcaaaagataaagaggataaagtaaagaaaagatatccagagtttagattagtcaacacaggacccggtggtctttcggcattgttaagacaatcgtataatggaaccgcacccaattgctgtcgcacttttaatcgtactcattattggaagaaggatggaaagatatcagataagtatgaagagggtgcagtattagaatcgtgttggccagacgttcacgacactggaaaatgcgatgttgatttattcgactggtgtcagggggatacgttcgatagaaacatatgccatcagtggatcggttcagcctttaataggagtaatagaactgtagagggtcaacaatcgttaataaatctgtataataagatgcaaacattatgtagtaaagatgctagtgtaccaatatgcgaatcatttttgcattatttacgcgcacacaatacagaagatagcaaagagatgatcgattatattctaagacaacagtctgcggactttaaacagaaatatatgagatgtagttatcccactagagataagttagaagagtcattaaaatatgcggaacctcgagaatgttgggatccagagtgttcgaatgccaatgttaatttcttactaacacgtaattataataatttaggactttgcaatattgtacgatgtaataccagcgtgaacaacttacagatggataaaacttcctcattaagattgtcatgtggattaagcaatagtgatagattttctactgttcccgtcaatagagcaaaagtagttcaacataatattaaacactcgttcgacctaaaattgcatttgatcagtttattatctctcttggtaatatggatactaattgtagctatttaaatgggtgccgcggcaagcatacagacgacggtgaatacactcagcgaacgtatctcgtctaaattagaacaagaagcgaacgctagtgctcaaacaaaatgtgatatagaaatcggaaatttttatatccgacaaaaccatggatgtaacctcactgttaaaaatatgtgctctgcggacgcggatgctcagttggatgctgtgttatcagccgctacagaaacatatagtggattaacaccggaacaaaaagcatacgtgccagctatgtttactgctgcgttaaacattcagacgagtgtaaacactgttgttagagattttgaaaattatgtgaaacagacttgtaattctagcgcggtcgtcgataacaaattaaagatacaaaacgtaatcatagatgaatgttacggagccccaggatctccaacaaatttggaatttattaatacaggatctagcaaaggaaattgtgccattaaagcgttgatgcaattgacgactaaggccactactcaaatagcacctagacaagttgctggtacaggagttcagttttatatgattgttatcggtgttataatattggcagcgttgtttatgtactatgccaagcgtatgttgttcacatccaccaatgataaaatcaaacttattttagccaataaggaaaacgtccattggactacttacatggacacattctttagaacttctccgatggttattgctaccacggatatgcaaaactgaaaatatattgataatattttaatagattaacatggaagttatcgctgatcgtctagacgatatagtgaaacaaaatatagcggatgaaaaatttgtagattttgttatacacggtctagagcatcaatgtcctgctatacttcgaccattaattaggttgtttattgatatactattatttgttatagtaatttatatttttacggtacgtctagtaagtagaaattatcaaatgttgttggtggtgctagtcatcacattaactattttttattactttatactataatagtactagactgacttctaacaaacatctcacctgccataaataaatgcttgatattaaagtcttctatttctaacactattccatctgtggaaaataatactctgacattatcgctaattgacacatcggtgagtgatatgcctataaagtaataatcttctttgggcacatataccagtgtaccaggttctaacaacctatttactggtgctcctgtagcatactttttctttaccttgagaatatccatcgtttgcttggtcaatagcgatatgtgattttttatcaaccactcgaaaaagtaattggagtgttcatatcctctacgggctattgtctcatggccgtgtatgaaatttaagtaacacgactgtggtagatttgttctatagagccgattgccgcaaatagatagaactaccaatatgtctgtacaaatgttaaacattaattgattaacagaaaaaacaatgttcgttctgggaatagaaaccagatcaaaacaaaattcgttagaatatatgccacgtttatacatggaatataaaataactacagtttgaaaaataacagtatcatttaaacatttaacttgcggggttaatttcacaactttactgtttttgaactgttcaaaatatagcatcgatccgtgagaaatacgtttagccgcctttaatagaggaaatcccaccgcctttctggatctcaccaacgacgatagttctgaccagcaactcatttcttcatcatccacctgttttaacatataataggcaggagatagatatccgtcattgcaatattccttctcgtaggcacacaatctaatattgataaaatctccattctcttctctgcatttattatcttgtttcggtggctgattaggctgtagtcttggtttaggccttggtctatcgttgttgaatctattttggtcattaaatctttcatttcttcctggtatatttctatcacctcgtttggttggatttttgtctatattatcgtttgtaacatcggtacgggtattcatttatcacaaaaaaaacttctctaaatgagtctactgctagaaaacctcatcgaagaagataccatattttttgcaggaagtatatctgagtatgatgatttacaaatggttattgccggcgcaaaatccaaatttccaagatctatgctttctatttttaatatagtacctagaacgatgtcaaaatatgagttggagttgattcataacgaaaatatcacaggagcaatgtttaccacaatgtataatataagaaacaatttgggtctaggagatgataaactaactattgaagccattgaaaactatttcttggatcctaacaatgaagttatgcctcttattattaataatacggatatgactgccgtcattcctaaaaaaagtggtaggagaaagaataagaacatggttatcttccgtcaaggatcatcacctatcttgtgcattttcgaaactcgtaaaaagattaatatttataaagaaaatatggaatccgcgtcgactgagtatacacctatcggagacaacaaggctttgatatctaaatatgcgggaattaatgtcctgaatgtgtattctccttccacatccataagattgaatgccatttacggattcaccaataaaaataaactagagaaacttagtactaataaggaactagaatcgtatagttctagccctcttcaagaacccattaggttaaatgattttctgggactattggaatgtgttaaaaagaatattcctctaacagatattccgacaaaggattgattactataaatggagaatgttcctaatgtatactttaatcctgtgtttatagagcccacgtttaaacattctttattaagtgtttataaacacagattaatagttttatttgaagtattcgttgtattcattctaatatatgtattttttagatctgaattaaatatgttctttatgcctaaacgaaaaatacccgatcctattgatagattacgacgtgctaatctagcgtgtgaagacgataaattaatgatctatggattaccatggatgacaactcaaacatctgcgttatcaataaatagtaaaccgatagtgtataaagattgtgcaaagcttttgcgatcaataaatggatcacaaccagtatctcttaacgatgttcttcgcagatgatgattcattttttaagtatttggctagtcaagatgatgaatcttcattatctgatatattgcaaatcactcaatatctagactttctgttattattattgatccaatcaaaaaataaattagaagctgtgggtcattgttatgaatctctttcagaggaatacagacaattgacaaaattcacagactttcaagattttaaaaaactgtttaacaaggtccctattgttacagatggaagggtcaaacttaataaaggatatttgttcgactttgtgattagtttgatgcgattcaaaaaagaatcctctctagctaccaccgcaatagatcctgttagatacatagatcctcgtcgtgatatcgcattttctaacgtgatggatatattaaagtcgaataaagtgaacaataattaattctttattgtcatcatgaacggcggacatattcagttgataatcggccccatgttttcaggtaaaagtacagaattaattagacgagttagacgttatcaaatagctcaatataaatgcgtgactataaaatattctaacgataatagatacggaacgggactatggacgcatgataagaataattttgaagcattggaagcaactaaactatgtgatgtcttggaatcaattacagatttctccgtgataggtatcgatgaaggacagttctttccagacattgtttaattctgtgagcgtatggcaaacgaaggaaaaatagttatagtagccgcactcgatgggacatttcaacgtaaaccgtttaataatattttgaatcttattccattatctgaaatggtggtaaaactaactgctgtgtgtatgaaatgctttaaggaggcttccttttctaaacgattgggtgaggaaaccgagatagagataataggaggtaatgatatgtatcaatcggtgtgtagaaagtgttacatcgactcataatattatattttttatctaaaaaactaaaaataaacattgattaaattttaatataatacttaaaaatggatgttgtgtcgttagataaaccgtttatgtattttgaggaaattgataatgagttagattacgaaccagaaagtgcaaatgaggtcgcaaaaaaactgccgtatcaaggacagttaaaactattactaggagaattattttttcttagtaagttacagcgacacggtatattagatggtgccaccgtagtgtatataggatctgctcccggtacacatatacgttatttgagagatcatttctataatttaggagtgatcatcaaatggatgctaattgacggccgccatcatgatcctattttaaatggattgcgtgatgtaactctagtgactcggttcgttgatgaggaatatctacgatccatcaaaaaacaactgcatccttctaagattattttaatttctgatgtaagatccaaacgaggaggaaatgaacctagtacggcggatttactaagtaattacgctctacaaaatgtcatgattagtattttaaaccccgtggcatctagtcttaaatggagatgcccgtttccagatcaatggatcaaggacttttatatcccacacggtaataaaatgttacaaccttttgctccttcatattcagctgaaatgagattattaagtatttataccggtgagaacatgagactgactcgagttaccaaattagacgctgtaaattatgaaaaaaagatgtactaccttaataagatcgtccgtaacaaagtagttgttaactttgattatcctaatcaggaatatgactattttcacatgtactttatgctgaggaccgtgtactgcaataaaacatttcctactactaaagcaaaggtactatttctacaacaatctatatttcgtttcttaaatattccaacaacatcaactgaaaaagttagtcatgaaccaatacaacgtaaaatatctagcaaaaattctatgtctaaaaacagaaatagcaagagatccgtacgcggtaataaatagaaacgtactactgagatatactaccgatatagagtataatgatttagttactttaataaccgttagacataaaattgattctatgaaaactgtgtttcaggtatttaacgaatcatccataaattatactccggttgatgatgattatggagaaccaatcattataacatcgtatcttcaaaaaggtcataacaagtttcctgtaaattttctatacatagatgtggtaatatctgacttatttcctagctttgttagactagatactacagaaactaatatagttaatagtgtactacaaacaggcgatggtaaaaagactcttcgtcttcccaaaatgttagagacggaaatagttgtcaagattctctatcgccctaatataccattaaaaattgttagatttttccgcaataacatggtaactggagtagagatagccgatagatctgttatttcagtcgctgattaatcaattagtagagatgagataagaacattataataattaataatattatcttatatcttatcttatatcttatatcttgtttagaaaaatgctaatattaaaatagctaacgctagtaatccaatcggaagccatttgatatctataatagggtatctaatttcctgatttaaatagcggacagctatattctcggtagctactcgtttggaatcacaaacattatttacatctaatttactatctgtaatggaaacgtttcccaatgaaatggtacaatccgatacattgcattttgttatatttttttttaaagaggctggtaacaacgcatcgcttcgtttacatggctcgtaccaacaataatagggtaatcttgtatctattcctatccgtactatgcttttatcaggataaatacatttacatcgtatatcgtctttgttagcatcacagaatgcataaatttgttcgtccgtcatgataaaaatttaaagtgtaaatataactattatttttatagttgtaataaaaagggaaatttgattgtatactttcggttctttaaaagaaactgacttgataaaaatggctgtaatctctaaggttacgtatagtctatatgatcaaaaagagattaatgctacagatattatcattagtcatgttaaaaatgacgacgatatcggtaccgttaaagatggtagactaggtgctatggatggggcattatgtaaaacttgtgggaaaacggaattggaatgtttcggtcactggggtaaagtaagtatttataaaactcatatagttaagcctgaatttatttcagaaattattcgtttactgaatcatatatgtattcactgcggattattgcgttcacgagaaccgtattccgacgatattaacctaaaagagttatcgggacacgctcttaggagattaaaggataaaatattatccaagaaaaagtcatgttggaacagcgaatgtatgcaaccgtatcaaaaaattactttttcaaagaaaaaggtttgtttcgtcaacaagttggatgatattaacgttcctaattctctcatctatcaaaagttaatttctattcatgaaaagttttggccattattagaaattcatcaatatccagctaacttattttatacagactactttcccatccctccgctgattattagaccggctattagtttttggatagatagtatacccaaagaaaccaatgaattaacttacttattaggtatgatcgttaagaattgtaacttgaatgctgatgaacaggttatccagaaggcggtaatagaatacgatgatattaaaattatttctaataacactaccagtatcaatttatcatatattacatccggcaaaaataatatgattagaagttatatcgtcgcccgacgaaaagatcagaccgctagatctgtaattggtcccagtacatctatcaccgttaatgaggtaggaatgcccgcatatattagaaatacacttacagaaaagatatttgttaatgcctttacagtggataaagttaaacaactattagcgtcaaaccaagttaaattttactttaataaacgattaaaccaattaacaagaatacgccaaggaaagtttattaaaaataaaatacatttattgcctggtgattgggtagaagtagctgttcaagaatatacaagtattatttttggaagacagccgtctctacatagatacaacgtcatcgcttcatctatcagagctaccgaaggagatactatcaaaatatctcccggaattgccaactctcaaaatgctgatttcgacggggatgaggaatggatgatattagaacaaaatcctaaagctgtaattgaacaaagtattcttatgtatccgacgacgttactcaaacacgatattcatggagcccccgtttatggatctattcaagatgaaatcgtagcagcgtattcattgtttaggatacaagatctttgtttagatgaagtattgaacatcttggggaaatatggaagagagttcgatcctaaaggtaaatgtaaattcagcggtaaagatatctatacttacttgataggtgaaaagattaattatccgggtctcttaaaggatggtgaaattattgcaaacgacgtagatagtaattttgttgtggctatgaggcatctgtcattggctggactcttatccgatcataagtcgaacgtggaaggtatcaactttattatcaagtcatcttatgtttttaagagatatctatctatttacggttttggggtgacattcaaagatctgagaccaaattcgacgttcactaataaattggaggccatcaacgtagaaaaaatagaacttatcaaagaagcatacgccaaatatctcaacgatgtaagagacgggaaaatagttccattatctaaagctttagaggcggactatgtggaatccatgttatccaacttgacaaatcttaatatccgagagatagaagaacatatgagacaaacgctgatagataatccagataataacctcctgaaaatggccaaagcgggttataaagtaaatcccacagaactaatgtatattctaggtacgtatggacaacaaaggattgatggtgaaccagcagagactcgagtattgggtagagttttaccttactatcttccagactctaaggatccagaaggaagaggttatattcttaattctttaacaaaaggattaacgggttctcaatattacttttcgatgctggttgcaagatctcaatctactgatatcgtctgtgaaacatcacgtaccggaacactggctagaaaaatcattaaaaagatggaggatatggtggtcgacggatacggacaagtagttataggtaatacgctcatcaagtacgccgccaattataccaaaattctaggctcagtatgtaaacctgtagatcttatctatccagatgagtccatgacttggtatttggaaattagtgctctgtggaataaaataaaacagggattcgtttactctcagaaacagaaacttgcaaagaagacattggcgccgtttaatttcctagtattcgtcaaacccaccactgaggataatgctattaaggttaaggatctgtacgatatgattcataacgtcattgatgatgtgagagagaaatacttctttacggtatctaatatagattttatggagtatatattcttgacgcatcttaatccttctagaattagaattacaaaagaaacggctatcactatctttgaaaagttctatgaaaaactcaattatactctaggtggtggaactcctattggaattatttctgcacaggtattgtctgagaagtttacacaacaagccctgtccagttttcacactactgaaaaaagtggtgccgtcaaacaaaaacttggtttcaacgagtttaataacttgactaatttgagtaagaataagaccgaaattatcactctggtatccgatgatatctctaaacttcaatctgttaagattaatttcgaatttgtatgtttgggagaattaaatccagacatcactcttcgaaaagaaacagataggtatgtagtagatataatagtcaatagattatacatcaagagagcagaaataaccgaattagtcgtcgaatatatgattgaacgatttatctcctttagcgtcattgtaaaggaatggggtatggagacattcattgaggacgaggataatattagatttactgtctatctaaatttcgttgaaccggaagaattgaatcttagtaagtttataatggttcttccgggggcagccaacaagggcaagattagtaaattcaagattcctatctctgactatacgggttatgacgacttcaatcaaacaaaaaagctcaataagatgactgtagaactcatgaatctaaaagaattgggttctttcgatttggaaaacgtcaacgtgtatcctggagtatggaatacatacgatatcttcggtatcgaggccgctcgtgaatacttgtgcgaagccatgttaaacacctatggagaagggttcgattatctgtatcagccttgtgatcttctcgctagtttactatgtgctagttacgaaccagaatcagtgaataaattcaagttcggcgcagctagtactcttaagagagctacgttcggagacaataaagcattgttaaacgcggctcttcataaaaagtcagaacctattaacgataatagtagctgccacttttttagcaaggtccctaatataggaactggatattacaaatactttatcgacttgggtcttctcatgagaatggaaaggaaactatctgataagatatcttctcaaaagatcaaggaaatggaagaaacagaagacttttaattcttatcaataacatatttttctatgatctgtcttttaaacgatggattttccacaaatgcgcctctcaagtccctcatagaatgatacacgtataaaaaatatagcataggcaatgactccttatttttagacattagatatgccaaaatcatagccccgcttctatttactcccgcagcacaatgaaccaacacgggctcgtttcgttgatcacatttagataaaaaggcggttacgtcgtcaaaatatttactaatatcggtagttgtatcatctaccaacggtatatgaataatattaatattagagttaggtaatgtatatttatccatcgtcaaatttaaaacatatttgaacttaacttcagatgatggtgcatccatagcatttttataatttcccaaatacacattattggttacccttgtcattatagtgggagatttggctctgtgcatatctccagttgaacgtagtagtaagtatttatacaaacttttcttatccatttataacgtacaaatggataaaactactttatcggtaaacgcgtgtaatttagaatacgttagagaaaaggctatagtaggcgtacaagcagccaaaacatcaacacttatattctttgttattatattggcaattagtgcgctattactctggtttcagacgtctgataatccagtctttaatgaattaacgagatatatgcgaattaaaaatacggttaacgattggaaatcattaacggatagcaaaacaaaattagaaagtgatagaggtagacttctagccgctggtaaggatgatatattcgacttcaaatgtgtggatttcggcgcctattttatagctatgcgattggataagaaaacatatctgccgcaagctattaggcgaggtactggagacgcgtggatggttaaaaaggcggcaaaggtcgatccatctgctcaacaattttgtcagtatttgataaaacacaagtctaataatgttattacttgtggtaatgagatgttaaatgaattaggttatagcggttattttatgtcaccgcattggtgttccgattttagtaatatggaatagtgttagataaatgcggtaacgaatgttcctgtaaggaaccataacagcttagatttaacgttaaagatgagcataaacataataaacaaaattacaatcaaacttataacattaatatcaaacaatccaaaaaatgaaatcagtggagtagtaaacgcgtacataactcctggataacgtttagcagctgccgttcctattctagaccaaaaatttggtttcatgttttcgaaacggtattctgcaacaagtcggggatcgtgttctacatatttggcggcattatccagtatctgcctattgatcttcatttcgttttcgattctggctatttcaaaataaaatcccgatgatagacctccagactttataatttcatctacgatgttcagcgccgtagtaactctaataatataggctgataagctaacatcataccctcctgtatatgtgaatatggcatgatttttgtccattacaagctcggttttaactttattgcctgtaataatttctctcatctgtaggatatctatttttttgtcatgcattgccttcaagacgggacgaagaaacgtaatatcctcaataacgttatcgttttctacaataactacatattctacctttttattttctaactcggtaaaaaaattagaatcccatagggctaaatgtctagcgatatttcttttcgtttcttctgtacacatagtgttacaaaaccctgaaaagaagtgagtatacttgtcatcatttctaatgtttcctccagtccactgtataaacgcataatccttgtaatgatctggatcatccttgactaccacaacatttcttttttctggcataacttcgttgtcctttacatcatcgaacttctgatcattaatatgctcatgaacattaggaaatgtttctgatggaggtctatcaataactggcacaacaataacaggagttttcaccgccgccatttagttattgaaattaatcatatacaactctttaatacgagttatattttcgtctatccattgtttcacattgacatatttcgacaaaaagatataaaatgcgtattccaatgcttctctgtttaatgaattactaaaatatacaaacacgtcactgtctggcaataaatgatatcttagaatattgtaacaatttattttgtattgcacatgttcgtgatctatgagttcttcttcgaatggcataggatctccgaatctgaaaacgtataaataggagttagaataataatatttgagagtattggtaatatataaactctttagcggtataattagtttttttctctcaatttctatttttagatgtgatggaaaaatgactaattttgtagcattagtatcatgaactctaatcaaaatcttaatatcttcgtcacacgttagctctttgaagtttttaagagatgcatcagttggttctacagatggagtaggtgcaacaattttttgttctacacatgtatgtactggagccattgttttaactataatggtgcttgtatcgaaaaactttaatgcagatagcggaagctcttcgccgcgactttctacatcgtaattgggttctaacgccgatctctgaatggatactagttttctaagttctaatgtgattctctgaaaatgtaaatccaattcctccggcattatagatgtgtatacatcggtaaataaaactatagtatccaacgatcccttctcgcaaattctagtcttaaccaaaaaatcgtatataaccacggagatggcgtatttaagagtggattcttctaccgttttgttcttggatgtcatataagaaactataaagtccgcactactgttaagaatgattactaacgcaactatatagttcaaattaagcattttggaaacataaaataactctgtagacgatacttgactttcgaataagtttgcagacaaacgaagaaagaacagacctctcttaatttcagaagaaaactttttttcgtattcctgacgtctagagtttatatcaataagaaagttaagaattagtcggttaatgttgtatttcattacccaagtttgagatttcataatattatcaaaagacatgataatattaaagataaagcgctgactatgaacgaaatagctatatggttcgctcaaaaatatagtcttgttaaacgtggaaacgataactgtatttttaatcacgtcagcggcatctaaattaaatataggtatatttattccacacactctacaatatgccacaccatcttcataataaataaattcgttagcaaaattattaattttagtgaaatagttagcgtcaactttcatagcttccttcaatctaatttgatgctcacacggtgcgaattccactctaacatcccttttccatgcctcaggttcatcgatctctataatatctagttttttgcgtttcacaaacacaggctcgtctctcgcgatgagatctgtatagtaactatgtaaatgataactagatagaaagatgtagctatatagatgacgatcctttaagagaggtataataactttaccccaatcagatagactgttgttatggtcttcggaaaaagaatttttataaatttttccagtattttccaaatatacgtacttaacatctaaaaaatccttaatgataataggaatggataatccgtctattttataaagaaatacatatcgcacattatacttttttttggaaatgggaataccgatgtgtctacataaatatgcaaagtctaaatattttttagagaatcttagttggtccaaattcttttccaagtacggtaatagatttttcatattgaacggtatcttcttaatctctggttctagttccgcattaaatgatgaaactaagtcactatttttataactaacgattacatcacctctaacatcatcatttaccagaatactgatcttcttttgtcgtaaatacatgtctaatgtgttaaaaaaaagatcatacaagttatacgtcatttcatctgtggtattcttgtcattgaaggataaactcgtactaatctcttctttaacagcctgttcaaatttatatcctatatacgaaaaaatagcaaccagtgtttgatcatccgcgtcaatattctgttctatcgtagtgtataacaatcgtatatcttcttctgtgatagtcgatacgttataaaggttgataacgaaaatatttttatttcgtgaaataaagtcatcgtaggattttggacttatattcgcgtctagtaaatatgcttttatttttggaatgatctcaattagaatagtctctttagagtccatttaaagttacaaacaactaggaaattggtttatgatgtataatttttttagtttttatagattctttattctatacttaaaaaatgaaaataaatacaaaggttcttgagggttgtgttaaattgaaagcgagaaataatcataaattatttcattatcgcgatatccgttaagtttgtatcgtaatggcgtggtcaattacaaataaagcggatactagtagcttcacaaagatggctgaaatcagagctcatctaaaaaatagcgctgaaaataaagataaaaacgaggatattttcccggaagatgtaataattccatctactaagcccaaaaccaaacgagccactactcctcgtaaaccagcggctactaaaagatcaaccaaaaaggaggaagtggaagaagaagtagttatagaggaatatcatcaaacaactgaaaaaaattctccatctcctggagtcagcgacattgtagaaagcgtggctgctgtagagctcgatgatagcgacggggatgatgaacctatggtacaagttgaagctggtaaagtaaatcatagtgctagaagcgatctttctgacctaaaggtggctaccgacaatatcgttaaagatcttaagaaaattattactagaatctctgcagtatcgactgttctagaggatgttcaagcagctggtatctctagacaatttacttctatgactaaagctattacaacactatctgatctagtcaccgagggaaaatctaaagttgttcgtaaaaaagttaaaacttgtaagaagtaaatgcgtgcacttttttataaagatggtaaactctttaccgataataattttttaaatcctgtatcagacgataatccagcgtatgaggttttgcaacatgttaaaattcctactcatttaacagatgtagtagtatatgaacaaacgtgggaggaggcgttaactagattaatttttgtgggaagcgattcaaaaggacgtagacaatacttttacggaaaaatgcatgtacagaatcgcaacgctaaaagagatcgtatttttgttagagtatataacgttatgaaacgaattaattgttttataaacaaaaatataaagaaatcgtccacagattccaattatcagttggcggtttttatgttaatggaaactatgttttttattagatttggtaaaatgaaatatcttaaggagaatgaaacagtagggttattaacactaaaaaataaacacatagaaataagtcccgatgaaatagttatcaagtttgtaggaaaggacaaagtttcacatgaatttgttgttcataagtctaatagactatataaaccgctattgaaactgacggatgattctagtcccgaagaatttctgttcaacaaactaagtgaacgaaaggtatacgaatgtatcaaacagtttggtattagaatcaaggatctccgaacgtatggagtcaattatacgtttttatataatttttggacaaatgtaaagtccatatctcctcttccatcaccaaaaaagttaatagcgttaactatcaaacaaactgctgaagtggtaggtcatactccatcaatttcaaaaagagcttacatggcaacgactattttagaaatggtaaaggataaaaattttttagatgtagtatctaaaactacgttcgatgaattcctatctatagtcgtagatcacgttaaatcatctacggatggatgatatagatctttacacaaataattacaagaccgataaatggaaatggataagcgtatgaaatctctcgcaatgacagctttcttcggagagctaaacacattagatattatggcattgataatgtctatatttaaacgccatccaaacaataccattttttcagtggataaggatggtcagtttatgattgatttcgaatacgataattataaggcttctcaatatttggatctgaccctcactccgatatttggagatgaatgcaagactcacgcatcgagtatagccgaacaattggcgtgtgcggatattattaaagaggatattagcgaatatatcaaaactactccccgtcttaaacgatttataaaaaaataccgcaatagatcagatactcgtatcagtcgagatacagaaaagcttaaaatagctctagctaaaggcatagattacgaatatataaaagacgcttgttaataagtaaatgaaaaaaaactagtcgtttataataaaacacgatatggatgccaacgtagtatcatcttctactattgcaacgtatatagacgctttagcgaagaatgcttcagaattagaacagaggtctaccgcatacgaaataaataatgaattggaactagtatttattaagccgccattgattactttgacaaatgtagtgaatatctctacgattcaggaatcgtttattcgatttaccgttactaataaggaaggtgttaaaattagaactaagattccattatctaaggtacatggtctagatgtaaaaaatgtacagttagtagatgctatagataacatagtttgggaaaagaaatcattagtgacggaaaatcgtcttcacaaagaatgcttgttgagactatcgacagaggaacgtcatatatttttggattacaagaaatatggatcctctatccgactagaattagtcaatcttattcaagcaaaaacaaaaaactttacgatagactttaagctaaaatattttctaggatccggtgcccaatctaaaagttctttgttgcacgctattaatcatccaaagtcaaggcctaatacatctctggaaatagaattcacacctagagacaatgaaacagttccatatgatgaactaataaaggaattgacgactctatcacgtcatatatttatggcttctccagagaatgtaattctttctccgcctattaacgcgcctataaaaacctttatgttgcctaaacaagatatagtaggtctggatctggaaaatctatatgccgtaactaagactgacggcattcctataactatcagagttacatcaaacgggttgtattgttattttacacatcttggttatattattagatatcctgttaagagaataatagattccgaagtagtagtctttggtgaggcagttaaggataagaactggaccgtatatctcattaagctaatagagcccgtgaatgcaatcaatgatagactagaagaaagtaagtatgttgaatctaaactagtggatatttgtgatcggatagtattcaagtcaaagaaatacgaaggtccgtttactacaactagtgaagtcgtcgatatgttatctacatatttaccaaagcaaccagaaggtgttattctgttctattcaaagggacctaaatctaacattgattttaaaattaaaaaggaaaatactatagaccaaactgcaaatgtagtatttaggtacatgtccagtgaaccaattatctttggagaatcgtctatctttgtagagtataagaaatttagcaacgataaaggctttcctaaagaatatggttctggtaagattgtgttatataacggcgttaattatctaaataatatctattgtttggaatatattaatacacataatgaagtgggtattaagtccgtggttgtacctattaagtttatagcagaattcttagttaatggagaaatacttaaacctagaattgataaaaccatgaaatatattaactcagaagattattatggaaatcaacataatatcatagtcgaacatttaagagatcaaagcatcaaaataggagatatctttaacgaggataaactatcggatgtgggacatcaatacgccaataatgataaatttagattaaatccagaagttagttattttacgaataaacgaactagaggaccgttgggaattttatcaaactacgtcaagactcttcttatttctatgtattgttccaaaacatttttagacgattccaacaaacgaaaggtattggcgattgattttggaaacggtgctgacctggaaaaatacttttatggagagattgcgttattggtagcgacggatccggatgctgatgctatagctagaggaaatgaaagatacaacaaattaaactctggaattaaaaccaagtactacaaatttgactacattcaggaaactattcgatccgatacatttgtctctagtgtcagagaagtattctattttggaaagtttaatatcatcgactggcagtttgctatccattattcttttcatccgagacattatgctaccgtcatgaataacttatccgaactaactgcttctggaggcaaggtattaatcactaccatggacggagacaaattatcaaaattaacagataaaaagacttttataattcataagaatttacctagtagcgaaaactatatgtctgtagaaaaaatagctgatgatagaatagtggtatataatccatcaacaatgtctactccaatgactgaatacattatcaaaaagaacgatatagtcagagtgtttaacgaatacggatttgttcttgtagataacgttgatttcgctacaattatagaacgaagtaaaaagtttattaatggcgcatctacaatggaagatagaccgtctacaaaaaactttttcgaactaaatagaggagccattaaatgtgaaggtttagatgtcgaagacttacttagttactatgttgtttatgtcttttctaagcggtaaataataatatggtatgggttctgatatccccgttctaaatgcattaaataattccaatagagcgatttttgttcctataggaccttccaactgtggatactctgtattgttaatagatatattaatacttttgtcgggtaacagaggttctacgtcttctaaaaataaaagttttataacatctggcctgttcataaataaaaacttggcgattctatatatactcttattatcaaatctagccattgtcttatagatgtgagctactgtaggtgtaccatttgattttctttctaatactatatatttctctcgaagaagttcttgcacatcatctgggaataaaatactactgttgagtaaatcagttattttttttatatcgatattgatggacatttttatagttaaggataataagtatcccaaagtcgataacgacgataacgaagtatttatacttttaggaaatcacaatgactttatcagattaaaattaacaaaattaaaggagcatgtatttttttctgaatatattgtgactccagatacatatggatctttatgcgtcgaattaaatgggtctagttttcagcacggtggtagatatatagaggtggaggaatttatagatgctggaagacaagttagatggtgttctacatccaatcatatatctaaagatatacccgaagatatgcacactgataaatttgtcatttatgatatatacacttttgacgctttcaagaataaacgattggtattcgtacaggtacctccgtcgttaggagatgatagtcatttgactaatccgttattgtctccgtattatcgtaattcagtagccagacaaatggtcaataatatgatttttaatcaagattcatttttaaaatatttattagaacatctgattagaagccactatagagtttctaaacatataacaatagttagatacaaggataccgaagaattaaatctaacgagaatatgttataatagagataagtttaaggcgtttgtattcgcttggtttaacggcgtttcggaaaatgaaaaggtactagatacgtataaaaaggtatctaatttgatataatgaattcagtgactgtatcacacgcgccatatactattacttatcacgatgattgggaaccagtaatgagtcaattggtagagttttataacgaagtagccagttggctgctacgagacgagacgtcgcctattcctgataagttctttatacagttgaaacaaccgcttagaaataaacgagtatgtgtgtgcggtatagatccgtatccgaaagatggaactggtgtaccgttcgaatcaccaaattttacaaaaaaatcaattaaggagatagcttcatctatatctagattaaccggagtaattgattataaaggttataaccttaatataatagacggggttataccctggaattattacttaagttgtaaattaggagaaacaaaaagtcacgcgatctactgggataagatttccaagttactgctgcagcatataactaaacacgttagtgttctttattgtttgggtaaaacagatttctcgaatatacgggcaaagttagaatccccggtaactaccatagtcggatatcatccagcggctagagaccgccaattcgagaaagatagatcatttgaaattatcaacgttttactggaattagacaacaaggcacctataaattgggctcaagggtttatttattaatgctttagtgaaattttaacttgtgttctaaatggatgcggctattagaggtaatgatgttatctttgttcttaagactataggtgtcccgtcagcgtgcagacaaaatgaagatccaagatttgtagaagcatttaaatgcgacgagttagaaagatatattgagaataatccagaatgtacactattcgaaagtcttagggatgaggaagcatactctatagtcagaattttcatggatgtagatttagacgcgtgtctagacgaaatagattatttaacggctattcaagattttattatcgaggtgtcaaactgtgtagctagattcgcgtttacagaatgcggtgccattcatgaaaatgtaataaaatccatgagatctaatttttcattgactaagtctacaaatagagataaaacaagttttcatattatctttttagacacgtataccactatggatacattgatagctatgaaacgaacactattagaattaagtagatcatctgaaaatccactaacaagatcgatagacactgccgtatataggagaaaaacaactcttcgggttgtaggtactaggaaaaatccaaattgcgacactattcatgtaatgcaaccaccgcatgataatatagaagattacctattcacttacgtggatatgaacaacaatagttattacttttctctacaacaacgattggaggatttagttcctgataagttatgggaaccagggtttatttcattcgaagacgctataaaaagagtttcaaaaatattcattaattctataataaactttaatgatctcgatgaaaataattttacaacggtaccactggtcatagattacgtaacaccttgtgcattatgtaaaaaacgatcgcataaacatccgcatcaactatcgttggaaaatggtgctattagaatttacaaaactggtaatccacatagttgtaaagttaaaattgttccgttggatggtaataaactgtttaatattgcacaaagaattttagacactaactctgttttattaaccgaacgaggagaccatatagtttggattaataattcatggaaatttaacagcgaagaacccttgataacaaaactaattttgtcaataagacatcaactacctaaggaatattcaagcgaattactctgtccgaggaaacgaaagactgtagaagctaacatacgagacatgttagtagattcagtggagaccgatacctatccggataaacttccgtttaaaaatggtgtattggacctggtagacggaatgttttactctggagatgatgctaaaaaatatacgtgtactgtatcaaccggatttaaatttgacgatacaaagttcgtcgaagacagtccagaaatggaagagttaatgaatatcattaacgatatccaaccattaacggatgaaaataagaaaaatagagagctatatgaaaaaacattatctagttgtttatgcggtgctaccaaaggatgtttaacattcttttttggagaaactgcaactggaaagtcgacaaccaaacgtttgttaaagtctgctatcggtgacctgtttgttgagacgggtcaaacaattttaacagatgtattggataaaggacctaatccatttatcgctaacatgcatttgaaaagatctgtattctgtagcgaactacctgattttgcatgtagtgggtcaaagaaaatcagatctgataatattaaaaagttgacagaaccttgtgtcattggaagaccgtgtttctccaataaaattaataatagaaaccatgcgacaatcattatcgatactaattacaaacctgtttttgataggatagataacgcattaatgagaagaattgccgtcgtgcgattcagaacacacttttctcaaccttctggtagagaggctgctgaaaataatgacgcgtacgataaagtcaaactattagacgaggggttagatggtaaaatacaaaataatagatatagattcgcatttctatacttgttggtgaaatggtacaaaaaatatcatgttcctattatgaaactatatcctacaccggaagagattcctgactttgcattctatctcaaaataggtactctgttagtatctagctctgtaaagcatattccattaatgacggacctctccaaaaagggatatatattgtacgataatgtggttactcttccgttgactactttccaacagaaaatatccaagtattttaattctagactatttggacacgatatagagagcttcatcaatagacataagaaatttgccaatgttagtgatgaatatctgcaatatatattcatagaggatatttcatctccgtaaatatatgctcatatatttatagaagatatcacatatctaaatgaataccggaatcatagatttatttgataatcatgttgatagtataccaactatattacctcatcagttagctactctagattatctagttagaactatcatagatgagaacagaagcgtgttattgttccatattatgggatcaggtaaaacaataatcgctttgttgttcgccttggtagcttccagatttaaaaaggtttacattctagtgccgaacatcaacatcttaaaaattttcaattataatatgggtgtagctatgaacttgtttaatgacgaattcatagctgagaatatctttattcattccacaacaagtttttattctcttaattataacgataacgtcattaattataacggattatctcgctacaataactctatttttatcgttgatgaggcacataatatctttgggaataatactggagaacttatgaccgtgataaaaaataaaaacaagattccttttctactattgtctggatctcccattactaacacacctaatactctgggtcatattatagatttaatgtccgaagagacgatagattttggtgaaattattagtcgtggtaagaaagtaattcagacacttcttaacgaacgaggtgtgaatgtacttaaggatttgcttaaaggaagaatatcatattacgaaatgcctgataaagatctaccaacgataagatatcacggacgtaagtttctagatactagagtagtatattgtcacatgtctaaacttcaagagagagattatatgattactagacgacagctatgttatcatgaaatgtttgataaaaatatgtataacgtgtcaatggcagtattgggacaacttaatctgatgaataatttagatactttatttcaggaacaggataaggaattgtacccaaatctgaaaataaataatggcgtgttatacggagaagaattggtaacgttaaacattagttccaaatttaaatactttattaatcggatacagacactcaacggaaaacattttatatacttttctaattctacatatggcggattggtaattaaatatatcatgctcagtaatggatattctgaatataatggttctcagggaactaatccacatatgataaacggcaaaccaaaaacatttgctatcgttactagtaaaatgaaatcgtctttagaggatctattagatgtgtataattctcctgaaaacgatgatggtagtcaattgatgtttttgttttcatcaaacattatgtccgaatcctatactctaaaagaggtaaggcatatttggtttatgactatcccagatactttttctcaatacaaccaaattcttggacgatctattagaaaattctcttacgccgatatttctgaaccagttaatgtatatcttttagccgccgtatattccgatttcaatgacgaagtgacgtcattaaacgattacacacaggatgaattaattaatgttttaccatttgacatcaaaaagctgttgtatctaaaatttaagacgaaagaaacgaatagaatatactctattcttcaagagatgtctgaaacgtattctcttccaccacatccatcaattgtaaaagttttattgggagaattggtcagacaatttttttataataattctcgtattaagtataacgataccaagttacttaaaatggttacatcagttataaaaaataaagaagacgctaggaattacatagatgatattgtaaacggtcacttctttgtatcgaataaagtatttgataaatctcttttatacaaatacgaaaacgatattattacagtaccgtttagactttcctacgaaccatttgtttggggagttaactttcgtaaagaatataacgtggtatcttctccataaaactgatgagatatataaagaaataaatgtcgagctttgttaccaatggatacctttccgttacattggaaccacacgagctgacgttagacataaaaactaatattaggaatgccgtatataagacgtatctccatagagaaattagtggtaaaatggccaagaaaatagaaattcgtgaagacgtggaattacctctcggcgaaatagttaataattctgtagttataaacgttccgtgtgtaataacctacgcgtattatcacgttggggatatagtcagaggaacattaaacatcgaagatgaatcaaatgtaactattcaatgtggagatttaatctgtaaactaagtagagattcgggtactgtatcatttagcgattcaaagtactgcttttttcgaaatggtaatgcgtatgacaatggcagcgaagtcactgccgttctaatggaggctcaacaaggtatcgaatctagttttgtttttctcgcgaatatcgtcgactcataaaaaagagaatagcggtaagtataaacacgaatactatggcaataattgcgaatgttttattctcttcgatatatttttgataatatgaaaaacatgtctctctcaaatcggacaaccatctcataaaatagttctcgcgcgctggagaggtagttgccgctcgtataatctctccagaataatatacttgcgtgtcgtcgttcaatttatacggatttctatagttctctgttatataatgcggtttgccctcatgattagacgacgacaatagtgttctaaatttagatagttgatcagaatgaatgtttattggcgttggaaaaattatccatgcagcgtctgcagagtggttgatagttgttcctagatatgtaaaataatccaacttactaggcagcaaattgtctagataaaatactgaatcaaacggtgcagacgtattggcggatctaatggaatccaattgattaactatcttttgaaaatatacatttttatgatccaatacttgtaagaatatagaaataatgataagtccatcatcgtgtttttttgcctcttcataagaactatattttttcttattccaatgaacaagattaatctctccagagtatttgtacacatctatcaagtgattggatccataatcgtcttcctttccccaatatatatgtagtgatgataacacatattcattggggagaaaccctccacttatatatcctcctttaaaattaatccttactagttttccagtgttctggatagtggttggtttcgactcattataatgtatgtctaacggcttcaatcgcgcgttagaaattgcttttttagtttctatattaataggagatagttgttgcggcatagtaaaaatgaaatgataactgtttaaaaatagctcttagtatgggaattacaatggatgaggaagtgatatttgaaactcctagagaattaatatctattaaacgaataaaagatattccaagatcaaaagacacgcatgtgtttgctgcgtgtataacaagtgacggatatccgttaataggagctagaagaacttcattcgcgttccaggcgatattatctcaacaaaattcagattctatctttagagtatccactaaactattacggtttatgtactacaatgaactaagagaaatctttagacggttgagaaaaggttctatcaacaatatcgatcctcactttgaagagttaatattattgggtggtaaactagataaaaaggaatctattaaagattgtttaagaagagaattaaaagaggaaagtgatgaacgtataacagtaaaagaatttggaaatgtaattctaaaacttacaacacgggataaattatttaataaagtatatataagttattgcatggcgtgttttattaatcaatcgttggaggatttatcgcatactagtatttacaatgtagaaattagaaagattaaatcattaaatgattgtattaacgacgataaatacgaatatctgtcttatatttataatatgctagttaatagtaaatgaacttttacagatctagtataattagtcagattattaagtataatagacgactagctaagtctattatttgcgaggatgactctcaaattattacactcacggcattcgttaaccaatgcctatggtgtcataaacgagtatccgtgtccgctattttattaactactgataacaaaatattagtatgtaacagacgagatagttttctctattctgaaataattagaactagaaacatgtttagaaaaaaacgattatttctgaattattccaattatttgaacaaacaggaaagaagtatactatcgtcatttttttctctagatccagctactactgataatgatagaatagacgctatttatccgggtggcatacccaaaaggggtgagaatgttccagagtgtttatccagggaaattaaagaagaagttaatatagacaattcttttgtattcatagacactcggttttttattcatggcatcatagaagataccattattaataaattttttgaggtaatcttctttgtcggaagaatatctctaacgagtgatcaaatcattgatacatttaaaagtaatcatgaaatcaaggatctaatatttttagatccgaattcaggtaatggactccaatacgaaattgcaaaatatgctctagatactgcaaaacttaaatgttacggccatagaggatgttattatgaatcattaaaaaaattaactgaggatgattgattagaaaatataaattaatttaccatcgtgtatttttataacgggattgtccggcatatcatgtagatagttaccgtctacatcgtatactcgaccatctacgcctttaaatcctctatttattgacattaatctattagaattggaataccaaatattagtaccctcaattagtttattggtaatattttttttagacgatagatcgatggctcttgaaaccaaggttttccaaccggactcattgtcgatcggtgaaaagtctttttcattagcatgaatccattctaatgatgtatgtttaaacactctaaacaattggacaaattcttttgatttgctttgaatgatttcaaataggtcttcgtctacagtaggcataccattagataatctagccattataaagtgcacgtttacatatctacgttctggaggagtaagaacgtgactattgagacgaatggctcttcctactatctgacgaagagacgcctcgttccatgtcatatctaaaatgaagatatcattaattgagaaaaaactaataccctcgcctccactagaagagaatacgcatgttttaatgcattctccgttagtgtttgattcttggttaaactcagccaccgccttgattctagtatcttttgttctagatgagaactctatattagagataccaaagactttgaaatatagtaataagatttctattcctgactgattaacaaatggttcaaagactagacatttaccatgggatgctaatattcccaaacatacatctataaatttgacgcttttctcttttaattcagtaaatagagagatatcagccgcactagcatcccctttcaatagttctccctttttaaaggtatctaatgcggatttagaaaactctctatctcttaatgaatttttaaaatcattatatagtgttgctatctcttgcgcgtattcgcccggatcacgattttgtctttcaggaaagctatcgaacgtaaacgtagtagccatacgtctcagaattctaaatgatgatatacctgtttttatttcagcgagtttagccttttgataaatttcttcttgctttttcgacatattaacgtatcgcattaatactgttttcttagcgaatgatgcagacccttctacgtcatcaaaaatagaaaactcgttattaactatatacgaacatagtcctcctagtttggagactaattctttttcatcgactagacgtttattctcaaatagtgattggtgttgtaaggatcctggtcgtagtaagttaaccaacatggtgaattcttgcacactattgacgataggtgtagccgataaacaaatcatcttatggttttttaacgcaatggtcttagataaaaaattatatactgaacgagtaggacggatcttaccatcttctttgattaatgatttagaaatgaagttatgacattcatcaatgatgacgcatattctactcttggaattaatagttttgatattagtaaaaaatttatttctaaaattttgatcatcgtaattaataaaaatacaatccttcgttatctctggagcgtatctgagtatagtgttcatccaaggatcttctatcaaagcctttttcaccaataagataatagcccaattcgtataaatatccttaagatgtttgagaatatatacagtagtcattgttttaccgacacccgtttcatggaacaataaaagagaatgcatactgtctaatcctaagaaaactcttgctacaaaatgttgataatccttgaggcgtactacgtccgaccccatcatttcaacgggcatattagtagttctgcgtaaggcataatcgatataggccgcgtgtgatttactcatttatgagtgataagtaataactatgttttaaaaatcacagcagtagtttaactagtcttctctgatgtttgttttcgatactttttgaatcagaagtcatactagaataaagcaacgagtgaacgtaatagagagcttcgtatactctattcgaaaactctaagaacttattaatgaattccgtatccactggattgtttaaaatactaaattgaacactgttcacatccttccaagaagaagacttagtgacggacttaacatgagacataaataaatccaaattttttttacaaacatcactagccaccataatggcgctatctttcaaccagctatcgcttacgcattttagcagtctaacatttttaaagagactacaatatattctcatagtatcgattacacctctaccgaataaagttggaagtttaataatacaatatttttcgtttacaaaatcaaataatggtcgaaacacgtcgaaggttaacatcttataatcgctaatgtatagattgttttcagtgagatgattattagatttaatagcatctcgttcacgtttgaacagtttattgcgtgcgctgaggtcggcaactacggcgtccgctttagtactcctcccataatactttacgctattaatctttaaaatttcatagactttatctagatcgctttctggtaacatgatatcatgtgtaaaaagttttaacatgtcggtcggcattctatttagatcattaactctagaaatctgaagaaagtaattagctccgtattccagactaggtaatgggcttttacctagagacagattaagttctggcaatgtttcataaaatggaagaaggacatgcgttccctcccggatattttttacaatttcatccatttacaactctatagtttgttttcattattattagttattatctcccataatcttggtaatacttaccccttgatcgtaagataccttatacaggtcattacatacaactaccaattgtttttgtacataatagattggatggttgacatccatggtggaataaactactcgaacagatagtttatctttccccctagatacattagccgtaatagttgtcggcctaaagaatatctttggtgtaaagttaaaagttagggttcttgttccattattgctttttgtcagtagttcattataaattctcgagatgggtccgttctctgaatatagaacatcatttccaaatctaacttctagtctagaaataatatcggtcttattcttaaaatctattcccttgatgaagggatcgttaatgaacaaatccttggcctttgattcggctgatctattatctccgttatagacgttacgttgactagtccaaagacttacaggaatagatgtatcgatgatgttgatactatgtgatatgtgagcaaaaattgttctcttagtggcatcgctatatgttccagtaatggcggaaaactttttagaaatgttatatataaaagaattttttcgtgttccaaacattagcagattagtatgaagataaacactcatattatcaggaacattatcaatttttacatacacatcagcatcttgaatagaaacgataccatcttctggaacctctacgatctcggcagactccggataaccagtcggtgggccatcactaacaataactagatcatccaacaatctactcacatatgcatctatataatctttttcatcttgtgagtaccctggatacgaaataaatttattatccgtatttccataataaggtttagtataaacagagagcgatgttgccgcatgaacttcagttacagtcgccgttggttggtttatttgacctattactctcctaggtttctctataaatgatggtttaatttgtacattcttaaccatatatccaataaagctcaattcaggaacataaacaaattctttgttgaacgtttcaaagtcgaacgaagagtcacgaataacgatatcggatactggattgaaggttaccgttacggtaatttttgaatcggatagtttaagactgctgaatgtatcttccacatcaaacggagttttaatataaacgtatactgtagatggttctttaatagtgtcattaggagttaggccaatagaaatatcattaagttcactagaatatccagaatgtttcaaagcaattgtattattgatacaattattatataattcttcgccctcaatttcccaaataacaccgttacacgaagagatagatacgtgattaatacatttatatccaacatatggtacgtaactgaatcttcccatacctttaacttctggaagttccaaactcagaaccaaatgattaagcgcagtaatatactgatccctaatttcgaagctagcgatagcctgattgtctggaccatcgtttgtcataactccggatagagaaatatattgcggcatatataaagttggaatttgactatcgactgcgaagacattagaccgtttaatagagtcatccccaccgatcaaagaattaatgatagtattattcattttctatttaaaatggaaaaagcttacaataaactccgtagagaaatatctataatttgtgagttttccttaaagtaacagcttccgtaaacgccgtctttatctcttagtaggtttattgtatttatgaccttttccttatcttcatagaatactaaaggcaacaaagaaatttttggttcttctctaagagctacgtgagacttaaccatagacgccaacgaatccctacatattttagaacagaaataccctacttcaccacccttgtatgtctcaatactaataggtctaaaaaccaaatcttgattacaaaaccaacacttatcaattacactatttgtcttaatagacacatctgccatagatttataatactttggtagtatacaagcgagtgcttcttctttagcgggcttaaagactgctttaggtgctgaaataaccacatctggaaggcttactcgcttagccatttaattacggaactatttttttatacttctaatgagcaagtagaaaacctctcatctacaaaaacgtactcgtgtccataatcctctaccatagttacacgttttttagatctcatatgtgctaaaaagttttcccatactaattggttactattatttttcgtataatttttaacagtttgaggttttagatttttagttacagaagtgatatcgaatattttatccaaaaagaatgaataattaattgtcttagaaggagtgttttcttggcaaaagaataccaagtgcttaaatatttctactacttcattaatcttttctgtactcagattcagtttctcatcttttacttgattgattatttcaaagactaacttataatcctttttatttattctctcgttagccttaagaaaactagatacaaaatttgcatctacatcatccgtggatatttgatttttttccatgatatccaagagttccgagataatttctccagaacattgatgagacaataatctccgcaatacatttctcaaatgaataagtttattagacacatggaagtttgactttttttgtacctttgtacatttttgaaatacagactcgcaaaaaatacaatattcatatccttgttcagatactataccgttgtgtctacaaccgctacataatcgtagattcatgttaacactctacgtatctcgtcgtccaatattttatataaaaacattttatttctagacgttgccagaaaatcctgtaatatttttagttttttgggctgtgaataaagtatcgccctaatatggttaccgtcttccgccaatatagtagttaaattatccgcacatgcagaagaacaccgcttaggcggattcagtacaatgttatatttttcgtaccaactcatttaaatatcataatctaaaatagttctgtaatatgtctagcgctaatatattgatcataatcctgtgcataaattaagatacaacaatgtctcgaaatcatcgacatggcttcttccatagttagaagatcgtcgtcaaagttagcaacgtgattcatcaacatttgctgttttgaggcagcaaatactgaaccgtcgccattcaaccattcataaaaaccatcgtctgaatccattgataatttcttgtactggtttttgagagctcgcatcaatctagcatttctagctcccggattgaaaacagaaagaggatcgtacatccagggtccattttctgtaaatagaatcgtataatgtcccttcaagaagatatcagacgatccacaatcaaagaattggtctccgagtttgtaacaaacagcggactttaacctatacatgataccgtttagcataatttctggtgatacgtcaatcggagtatcatctattagagatctaaagccggtgtaacattctccaccaaacatattcttattctgacgtcgttctacataaaacatcattgctccattaacgataacaggggaatgaacagcactacccatcacattagttcccaatggatcaatgtgtgtaactccagaacatcttccatatcctatgttaggaggagcgaacaccactcttccactattgccatcgaatgccatagaataaatatccttggaattgatagaaatcggactgtcggatgttgtgatcatcttcataggattaacaactatgtatggtgccgcctgaagtttcatatcgtaactgatgccgtttataggtctagccacagaaaccaacgtaggtctaaatccaactatagacaaaatagaagccaatatctgttcctcatctgtcataacttgagagcatccagtatgaataatcttcattagatggggatctaccgcatcatcatcgttacaataaaaaattcccattctaatgttcataattgcttttctaatcatggtatgcatgtttgctctctgaatctctgtggaaattagatctgatacacctgtaatcactatcggattatcctccgtaagacgattaaccaacaacatataattataagactttacttttctaaattcataaagttgctggattaggctataggtgtctccatgtacatacgcgttctcgagcgcaggaagtttaataccgaatagtgccatcagaataggatgaatatagtaattagtttctggttttctataaataaaagacaaatcttgtgaactagacatatcggtaaaatgcatggattggaatcgtgtagtcgacagaagaatatgatgattagatggagagtatattttatctaactctttgagttggtcaccgattctaggactagctcgagaatgaataagtactaaaggatgagtacatttcacagaaacactagcattgttcaatgtgctctttacatgggtaaggagttgaaatagctcgtttctatttgttctgacaatatttagtttattcataatgttaagcatatcctgaatagtaaagttagatgtgtcatacttgttagtagttagatatttagcaattgcattcccatcatttctcaatctcgtactccaatcatgtgtagatgctacttcgtcgatggaaaccatacaatcctttttgataggctgttgagattgatcatttcctgcacgtttaggtttggtacgttgatttctagcccctgcggatataaagtcatcgtctacaatttgggacaatgaattgcatacactacaagacaaagatttatcagaagtgtgaatatgatcttcatctaccaaagaaagagtttgattagtataactagattttagtcctgcgttagatgttaaaaaaacatcgctattgaccacggcttccattatttatattcgtagtttttactcgaaagcgtgattttaatatccaatcttattacttttggaatcgttcaaaacctttgactagttgtagaatttgatctattgccctacgcgtatactcccttgcatcatatacgttcgtcaccagatcgtttgtttcggcctgaagttggtgcatatctctttcaacattcgacatgagatccttaagggccatatcgtctagattttgttgagatgctgctcctggatttggattttgttgtgctgttgtacatactgtaccaccagtaggtgtaggagtacatacagtggccacaataggaggttgagaaagtgtaaccgttggagtagtacaagaaatacttccatccgattgttgtgtacatgtagttgttggtaacgtctgagaaggttgggtagatggcggcgtcgtcgttttttgatctttattaaatttagagataatatcctgaacagcattgctcggcgtcaacgctggaaggagtgaactcgccggcgcatcagtatcttcagacagccaatcaaaaagattagacatatcagatgatgtattagtttgttgtcgtggttttggtgtaggagcagtactactaggtagaagaataggagccgatgtagctgttggaaccggctgtggagttatatgaatagttggttgtagcggttggataggctgtctgctggcggccatcatattatctctagctagttgttctcgcaactgtctttgataatacgactcttgagactttagtcctatttcaatcgcttcatcctttttcgtatccggatccttttcttcagaataatagattgacgactttggtgtagaggattctgccagcctctgtgagaacttgttaaagaagtccatttaaggctttaaaattgaattgcgattataagattaaatggcagacacagacgatattatcgactatgaatccgatgatctcaccgaatacgaggatgatgaagaagaggaagaagatggagagtcactagaaactagtgatatagatcccaaatcttcttataagattgtagaatcagcatccactcatatagaagatgcgcattccaatcttaaacatatagggaatcatatatctgctcttaaacgacgctatactagacgtataagtctatttgaaatagcgggtataatagcagaaagctataacttgcttcaacgaggaagattacctctagtttcagaattttctgacgaaacgatgaagcaaaatatgctacatgtaattatacaagagatagaggagggttcttgtcctatagtcatcgaaaagaacggagaattgttgtcggtaaacgattttgacaaagatggtctaaaattccatctagactatattatcaaaatttggaaacttcaaaaacgatattagaatttatacgaatatcgttctctaaatgtcacaatcaagtctcgcatgttcagcaatttattgtcgtactttatatcgtgttcattaacgatatcttgcaaaatagtaatgattctatcttccttcgatagatattcttcagagattattgtcttatattctttcttgttatcagatatgaatttgataagactttgaacattattgatacccgtctgtttaattttttctacagatattttagttttggcagattctatcgtatctgtcaatagacatccaacatcgacattcgacgtcaattgtctataaatcaacgtataaattttagaaataacattagcgaattgttgtgcgttgatgtcgttattctgaaacagtatgattttaggtagcattttcttaacaaagagaacgtatttattgttactcagttgaacagatgatatatccagattactaacgcatctgattccgtataccaaactttcagaagaaatggtatacaattgtttgtattcattcaatgtctctttttcagaaattagtttagagtcgaatactgcaataattttcaagagatagttttcatcagataagattttatttagtgtagatatgataaaactattgttttgttggagaacttgatacgccgcgttctctgtagtcgacgctctcaaatgggaaacaatctccattatttttttggaatcggatactatatcttcggtatcttgacgcagtctagtatacatagagttaagagagattagagtttgtacattaagcaacatgtctctaaatgtggctacaaacttttcctttttcacatcatctagtttattatataccgatttcacaacggcaccagatttaaggaaccagaatgaaaaactctgataactacaatatttcatcatagttacgattttatcatcttctatagttggtgtaatagcgcatacctttttctccaagactggaaccaacgtcataaaaatgtttaaatcaaaatccatatcaacatctgatgcgctaagaccagtctcgcgttcaagattatctttactaatggtgacgaactcatcgtataaaactctaagtttgtccattatttatttacagatttagttgtttaatttatttgtgctcttccagagttgggatagtatttttctaacgtcggtattatattattaggatctacgttcatatgtatcataatattaatcatccacgttttgataaatctatctttagcttctgaaataacgtatttaaacaaaggagaaaaatatttagctacggcatcagacgcaataacattttttgtaaatgtaacgtatttagacgacagatcttcgttaaaaagttttccatctatgtagaatccatcggttgttaacaccattcccgcgtcagattgaataggagtttgaatagtttgttttggaaatagatccttcaataacttatagttgggtgggaaaaaatcgattttatcactagactctttcttttttactatcattacctcatgaactatttcttgaatgagtatatgtattttctttcctatatcggacgcgttcattggaaaatataccatgtcgttaactataagaatatttttatcctcgtttacaaactgaataatatcagatgtagttcgtaaacgaactatatcatcaccagcacaacatctaactatatgatatccactagtttcctttagccgtttattatcttgttccatattagcagtcattccatcatttaagaaggcgtcaaagataatagggagaaatgacattttggattctgttacgactttaccaaaattaaggatatacggacttactatctttttctcaacgtcaatttgatgaacacacgatgaaaatgtgcttctatgagattgatcatgtagaaaacaacaagggatacaatatttccgcatatcatgaaatatattaagaaatcccaccttattatatttccccaaaggatccatgcacgtaaacattatgccgttatcattaataaagacttctttctcatcggatctgtaaaagttgttactgatttttttcattccaggatctagataattaataatgatgggttttctattcttattctttgtattttggcatatcctagaccagtaaacagtttccactttggtaaaatcagcagacttttgaacgctattaaacatggcattaatggcaataactaaaaatgtaaaatatttttctatgttaggaatatggtttttcactttaatagatatatggtttttggccaaaatgatagatatttttttatccgaggatagtaaaatattattagtcgccgtctctataaaaatgaagctagtctcgatatccaattttattctagaattgataggagtcgccaaatgtaccttatacgttatatctcccttgatgcgttccatttgtgtatctatatcggacacaagatctgtaaatagttttacgttattaatcatcacggtatcgccgtcgctagataacgctaatgtaccatccaagtcccaaatggagagatttaactgttcatcgtttagaataaaatgattaccggtcatattaataaagtgttcatcgtatctagataacaacgacttataattaatgtccaagtcttgaactcgctgaatgatcttttttaacccagttagttttagattggtacgaaatatattgttaaactttgattctacagtaatgtccaaatctagttgtggaaatacttccatcaacattgtttcaaacttgataatattattatctacatcttcgtacgatccaaattccggaatagatgtatcgcacgctctggccacccagataaccaaaaagtcacacgctccaggatatacattgtataaaaagctatcgttttttagtagggtttttttctgcgtgtatacgaagggattaaaaatagtattatcaacgtaactatattccaaattattcttatgagaatagataataatatcgtccttaatatctaacaaatttcctaaatatccctttaattgagtcattcgaagcgtcaatagaatatgtctcttaactatttccggctgttgtatatttaaatgacttcgtaaaaaataatatatgggcgacttctcatctatgtaatcatatggagtgagatatagggctcgttctacctcctgccccttacccacctgtaataccaattgcggacttactatatatcgcatatttatatcgtggggtaaagtgaaaatctactaccgatgatgtaagtcttacaatgttcgaaccagtaccagatcttaatttggaggcctccgtagaactaggggaggtaaatatagatcaaacaacacctatgataaaggagaatagcggttttatatcccgcagtagacgtctattcgcccatagatctaaggatgatgagagaaaactagcactacgattctttttacaaagactttattttttagatcatagagagattcattatttgttcagatgcgttgacgctgtaaaagacgtcactattaccaaaaaaaataacattatcgtggcgccttatatagcacttttaactatcgcatcaaaaggatgcaaacttacagaaacaatgattgaagcattctttccagaactatataatgaacatagtaagaaatttaaattcaactctcaagtatccatcatccaagaaaaactcggataccagtttggaaactatcacgtttatgattttgaaccgtattactctacagtagctctggctattcgagatgaacattcatctggcatttttaatatccgtcaagagagttatctggtaagttcattatctgaaataacatatagattttatctaattaatctaaaatctgatcttgttcaatggagtgctagtacgggcgctgtaattaatcaaatggtaaatactgtattgattacagtgtatgaaaagttacaactggtcatagaaaatgattcacaatttacatgttcattggctgtggaatcaaaacttccaataaaattacttaaagatagaaatgaattatttacaaaattcattaacgagttaaaaaagaccagttcattcaagataagcaaacgcgataaggatacgctactaaaatattttacttaggactggagttagaatttatagacgactcatttcgtttatcattgttactattattactattactatcattattagtgttggcattattagtattcttcttgtcatcttgttcagaaatatacagcaatgctatacctaatactaaatacattatcatgctcgcaatggctctaacaacaacgaaccaaaatgaatttggtcgtagcttttgttcacaaaaatacataaagaaatgtctacataaatctatggcgccattggctacttgaaatagcgccagtcctcctacagattttaatatagctgtataacatgacatttattcatcatcaaaagagacagagtcaccatctgtcatatttagattttttttcatgtgttcaaagtatcctctactcatttcattataatagtttatcatacttagaattttaggacggatcaatgagtaagacttgactagatcgtcagtagtaatttgtgcatcgtctattctgcatccgcttcgtcgaataatgtatagcatcgctttgagattctccatagctatcaagtctttatacaatgacatggaaatatctgtgaatactttatacttctccaacatcgatgccttaacatcatcgcctactttagcattgaaaatacgttctattgtgtagatggatgtagcaagatttttaaacaacaatgccatcttacacgatgattgcctcaagtctccaatcgtttgtttagaacgattagctacagagtccaatgcttggctgactagcatattattatctttagaaattgtattcttcaatgaggcgtttatcatatctgtgatttcgttagtcatattacagtctgactgggttgtaatgttatccaacatatcacctatggatacggtacacgtaccagcatttgtaataatcctatctaagatgttgtatggcattgcgcagaaaatatcttctcctgtaatatctccactctcgataaatctactcagattattcttaaatgccttattctctggagaaaagatatcagtgtccatcatttcattaatagtatacgcagaaaagataccacgagtatcaattctatccaagatacttatcggttccgagtcacagataatggtttcctctccttcgggagatcctgcatagaaatatctaggacaatagtttctatactgtctgtaactctgataatctctaaagtcactaactgataccatgaaattgagaagatcaaacgctgaagtaattaatttttctgcctcgtttttactacaactagttttcatcaatgtagtgacgatgtattgtttagttacttttggtctaatactgatgatagagatattattgcttcccataatggatcttctagtagtcaccttaaagcccattgatgcgaatagcagatagataaagtcttggtatgactcctttctaatatagtacggactacctttgtcacccaactttatacccacataagccataacaacctctttaatagccgtttcatgaggtttatcagccatgagcctgagtagttggaagaatctcatgaatcccgtctcagaaagtcctatatgcatgatagatttatctttcctgggaaactctcgtatagtcatagatgaaatactctttaaagtttctgaaataagattagtaacagtcttacctccgactactctaggtaacaaacaaactctaataggtgttttctctgcggagataatatcagaaaggatagagcaataagtagtattattgtgattataaagaccgaatacataacaggtagaatttataaacatcatgtcctgaaggtttttagacttgtattcctcgtaatccataccgtcccaaaacatggatttggtaactttgatagccgtagatctttgttccttcgccaacaggttaaagaaattaataaagaatttgtggtttctacctatgtctacaaattgcacgtttggaagcgccacggttacattcactgcagcattttgaggatcgcgagtatgaagtacgatgttattgtttactggtatatctggaaagaaatctaccagtctaggaataagagattgatatcgcatagaaatagtaaagtttataatctcatcatcgaagagcattttgttaccattgtaataaatatccactctgtcatatgtataaatgaagtactgttcaaacatgatgagatgtttatatgttggcatagtagtgagatcgacgtttggtaatggcaatgtattaagattaactccataatgtctagcagcatctgcgatgttataagcgtcgtcaaagcggggtcgatcttgtattgttatatattgtctaacacctataagattatcaaaatcttgtctgcttaatacaccgttaacaatttttgccttgaattcttttattggtgcattaataacatccttatagaggatgttaaacaaataagtgttatcaaagttaagatctggatatttcttttctgctagaacatccattgagtcggagccatctggtttaatataaccaccgataaatctagctctgtattctgtatccgtcaatctaatattaagaaggtgttgagtgaaaggtggaagatcgtaaaagctgtgagtattaatgataggattagtttccgaactaatgttaattggggtattaataatatctatatttccagcgttaagtgtaacattaaacagttttaattcacgtgacgtggtatcaattaaataattaatgcccaatttggatatagcagcctgaagctcatcttgtttagttacggatcctaatgagttattaagcaatatatcgaacggatgaacgaaggttgttttaagttggtcacatactttgtaatctagacatagatgcggaagaacggtagaaactatacgaaataaatattcagagtcctctaattgatcaagagtaactattgacttaataggcatcatttatttagtattaaatgacgaccgtaccagtgacggatatacaaaacgatttaattacagagttttcagaagataattatccatctaacaaaaattatgaaataactcttcgtcaaatgtctattctaactcacgttaacaacgtggtagatagagaacataatgccgccgtagtgtcatctccagaggaaatatcctcacaacttaatgaagatctatttccagatgatgattcaccggccactattatcgaacgagtacaacctcatactactattattgacgatactccacctcctacgtttcgtagagagttattaatatcggaacaacgtcaacaacgagaaaaaagatttaatattacagtatcgaaaaatgctgaagcaataatggaatctagatctatgataacttctatgccaacacaaacaccatccttgggagtagtttatgataaagataaaagaattcagatgttagaggatgaagtggttaatcttagaaatcaacgatctaatacaaaatcatctgataatttagataattttaccaaaatactatttggtaagactccgtacaaatcaacagaagttaataagcgtatagccatcgttaattatgcaaatttgaacgggtcccccttatcagtcgaggacttggatgtttgttcggaggatgaaatagatagaatctataaaacgattaaacaatatcacgaaagtagaaaacgaaaaattatcgtcactaacgtgattattattgtcataaacattatcgagcaggcattgctaaaactcggatttgaagaaatcaaaggactgagtaccgatatcacttcagaaattatcgatgtggagatcggagatgactgcgatgctgtagcatcaaaactaggaatcggtaacagtccggttcttaatattgtattgtttatactcaagatattcgttaaacgaattaaaattatttaatttaatacattcccatatccagacaacaatcgtctggattaatctgttcctgtcgtctcataccggacgacatattaatctttttattagtgggcatctttttagatggtttctttttcccagcattaactgagtcgatacctagaagatcgtgattgatctctccgaccattccacgaacttctaattggccgtctctgacggtaccataaactattttaccagcattagtaacagcttggacaatctgaccatccatcgcattgtacgatgtagtagtaactgttgttctacgtctaggagcaccagaagtatttttggagcccttggatgttgatgtagaagaagacgaggattttgattttggtttacatgtaatacattttgaactctttgattttgtatcacatgcgccggcagtcacatctgtttgagaattaagattattgttgcctcctttgacggctgcatctccaccgatttgcgctagtagatttttaagctgtggtgtaatcttattaactgtttcgatataatcatcgtaactgcttctaacggctaaattttttttatccgccatttagaagctaaaaatatttttatttatgcagaagatttaactagattatacaatgaactaatatgatccttttccagattatttacaaacttggtattttttggttctggaggaggcgaatttaaattcggacttggattcggattttgtaagttcttgatcttattatacatcgagtataggatggcgacagtaactgctacacaaataccgatcaaaagaagaataccaatcatttattgacaataacttcactattgatcaagtatgcaatatatcatcttttcactaaataagtagtaataatgattcaacaatgtcgagatatatggacgataataatttagttcatggaaatatcgctatgattggtgtgaatgactccgctaactctgtggggtgcgcagtgctttccccacatagaataaattagcattccgactgtgataataataccaagtataaacgccataatactcaatactttccatgtacgagtgggactggtagacttactaaagtcaataaaggcgaagatacacgaaagaatcaaaagaatgattccagcgattagcacgccggaaaaataatttccaatcataagcatcatgtccatttaactaataaaaattttaaatcgccgaatgaacaaagtggaatataaaccatataaaaacaatagtttgtactgcaaaaataatatctatttttgttttcgaagatatggtaaaattaaatagtagtacacagcatgttataactaacagcagcaacggctcgtaattacttatcatttactagacgaaaaggtggtgggatattttcttgctcaaataatacgaatatatcacccatccattttatgcgatgtttatatactctaatctttaatagatctatagacgacgggtttaccaacaatatagattttatcgattcatctaatttaaacccttccttaaacgtgaatgatctattatctggcataacgatgaccctacctgatgaatcggacaatgtactgggccatgtagaataaattatcaacgaattatcgtctacgaacatttatatcatttgttttaattttaggacgcgaataaatggatataaaatagaaaataacagatattacaaccagtgttatggccgcgcccaaccaggtaggcagttttattttatcttttactacaggttctcctggatgtacgttaccaacggcggacgtagttctagtacaattagacgtaagttccgcttgggaattttttaacgctaaagagttaacgttaatcgtgcacccaacgtatttacatctagttcgttgaacatcttgattataatataaccattttctatctctagattcgtcagtgcactcatgtaaccaacataccctaggtcctaaatatttatctccggaattagattttggataattcgcgcaccaacaatttctatttcctttatgatcgttacaaaagacgtataatgccgtatccccaaaagtaaaataatcaggacgaataattctaataaactcagaacaatatctcgcatccatatgtttggagcaaatatcggaataagtagacatagccggtttccgttttgcacgtaaccattctaaacaattggggtttccaggatcgtttctacaaaatccagtcatgaaatcgtcacaatgttctgtcttgtaattattattaaatatttttggacagtgtttggtatttgtcttagaacaacattttgccacgctatcactatcgcccaggagataatccttttttataaaatgacatcgttgcccggatgctatataatcagtagcgtgttttaaatccttaatatattcaggagttacctcgttctgataatagattaatgatccaggacgaaatttgaaagaactacatggttctccatgaattaatacatattgtttagcaaattcaggaactataaaactactacaatgatctatcgacataccatctatcaaacaaaacttgggtttaatttctcccggagatgtttcataatagtacgtataactttcttctgcaaacttaacagctctattatattcaggataattaaaacctaattccatatatttgtctcgtatatctgctattcctggtgctattttgattctattaagagtaacagctgcccccattcttaataatcgtcagtatttaaactgttaaatgttggtatatcaacatctaccttatttcccgcagtataaggtttgttgcaggtatactgttcaggaatggttacatttatacttcttctatagtcctgtctttcgatgttcatcacatatgcaaagaacagaataaacaaaataatgtaagaaataatattaaatatctgtgaattcgtaaatacattgattgccataataattacagcagctacaatacacacaatagacattcccacagtgttgccattacctccacgatacatttgagttactaagcaataggtaataactaagctagtaagaggcaatagaaaagatgagataaatatcatcaatatagagattagaggagggctatatagagccaagacgaacaaaatcaaaccgagtaacgttctaacatcattatttttgaagattcccaaataatcattcattcctccataatcgttttgcatcatacctccatctttaggcataaacgattgctgctgttcctctgtaaataaatctttatcaagcactccagcacccgcagagaagtcgtcaagcatattgtaatatcttaaataactcatttatatattaaaaaatgtcactattaaagatggagtataatctttatgccgaactaaaaaaaatgacttgtggtcaacccctaagtctttttaacgaagacggggatttcgtagaagttgaaccgggatcatcctttaagtttctgatacctaagggattttacgcctctccttccgtaaagacgagtctagtattcgagacattaacaacgaccgataataaaatcactagtatcaatccaacaaatgcgccaaagttatatcctcttcaacgcaaagtcgtatctgaagtagtttctaatatgaggaaaatgatcgaatcaaaacgtcctctatacattactcttcacttggcgtgtggatttggtaagactattaccacgtgttatcttatggctacacacggtagaaaaaccgtcatttgcgtacccaataaaatgttaatacatcaatggaagacacaggtagaggcagtcggattggaacataagatatccatagatggagtaagtagtctattaaaggaactaaagactcaaagtccggatgtattaatagtagtcagtagacatctgacaaacgatgccttttgtaaatatatcaataagcattatgatttgttcatcttggatgaatcacatacgtataatctgatgaacaatacagcagttacaagatttttagcgtattatcctccgatgatgtgttattttttaactgctacacctagaccatctaaccgaatttattgtaacagtattattaatattgccaagttatccaatctaaaaaaaactatctatgcagtagatagtttttttgagccatattccacagataatattagacatatggtaaaacgactagatggaccatctaataaatatcatatatataccgagaagttattatctgtagacgagcctagaaatcaacttattcttgataccctggtagaagaattcaagtcaggaactattaatcgcattttagttattactaaactacgtgaacatatggtattattctacaaacgattattagattttttcggaccagaggttgtatttataggagacgcccaaaatagacgtactccagatatggtcaaatcaatcaaggaactaaatagatttatattcgtatccaccttattttattccggtactggtttagatattcctagtttggattcgttgttcatttgctcggcagtaatcaacaatatgcaaatagagcaattactagggagggtatgtcgagaaacagaactattagataggacggtatatgtatttcctaacacatccatcaaagaaataaagtacatgataggaaatttcatgcaacgaattattagtctgtctgtagataaactaggatttaaacaaaaaagttatcggaaacatcaagaatccgatcccacttctgtatgtacaacatcctccagagaagaacgtgtattaaatagaatatttaactcgcaaaatcgttaagaagtttaagcgacgatccgcatgctgcgcaggccagtgtattacccctcatagtattaatataatccaatgatacttttgtgatgtcggaaatcttaaccaatttagactgacaggcagaacacgtcatgcaatcatcatcgtcatcgataactgtagtcttgggcttctttttgcggctcttcattccggaacgcacattggtgctatccatttaggtagtaaaaaataagtcagaatatgccctataacacgatcgtgcaaaacctggtatatcgtctctatctttatcacaatatagtgtatcgacatttttattattattgacctcgtttatcttggaacatggaatgggaacatttttgttatcaacggccacctttgccttaattccagatgttgtaaaattataactaaacagtctatcatcgacacaaatgaaattcttgtttagacgtttgtagtttacgtatgcggctcgttcgcgtctcattttttcagatattgcaggtactataatattaaaaataagaatgaaataacataggattaaaaataaagttatcatgacttctagcgctgatttaactaacttaaaagaattacttagtctgtacaaaagtttgagattttcagattctgcggctatagaaaagtataattctttggtagaatggggaacatctacttactggaaaataggcgtgcaaaaggtagctaatgtcgagacgtcaatatctgattattatgatgaggtaaaaaataaaccgtttaatattgatccgggctattacattttcttaccggtatattttgggagcgtctttatttattcgaagggtaaaaatatggtagaacttggatctggaaactcttttcaaataccagatgatatgcgaagtgcgtgtaacaaagtattagacagcgataacggaatagactttctgagatttgttttgttaaacaatagatggataatggaagatgctatatcaaaatatcagtctccagttaatatatttaaactagctagtgagtacggattaaacatacccaaatatttagaaattgaaatagaggaagacacattatttgacgacgagttatactctattatagaacgctctttcgatgataaatttccaaaaatatccatatcgtatattaagttgggagaacttagacggcaagttgtagactttttcaaattctcattcatgtatattgagtccatcaaggtagatcgtataggagataatatttttattcctagcgttataacaaaatcaggaaaaaagatattagtaaaagatgtagaccatttaatacgatccaaggttagagaacatacatttgtaaaagtaaaaaagaaaaacacattttccattttatacgactatgatggaaacggaacagaaactagaggagaagtaataaaacgaattatagacactataggacgagactattatgttaacggaaagtatttctctaaggttggtagtgcaggcttaaagcaattgactaataaattagatattaatgagtgcgcaactgtcgatgagttagttgatgagattaataaatccggaactgtaaaacgaaaaataaaaaaccaatcagcatttgatttaagcagagaatgtttgggatatccagaagcggattttataacgttagttaataacatgcggttcaaaatagaaaattgtaaggttgtaaatttcaatattgaaaatactaattgtttaaataacccgagtattgaaactatatatggaaactttaaccagttcgtctcaatctttaatgtcgtcaccgatgtcaaaaaaagattattcgagtgaaataatatgcgcctttgatataggtgcaaaaaatcctgccagaactgttttagaagtcaaggataactccgttagggtattggatatatcaaaattagactggagttctgattgggaaaggcgcatagctaaagatttgtcacaatatgaatacactacagttcttctagaacgtcagcctagaaggtcgccgtatgttaaatttatctattttattaaaggctttttatatcatacatcggctgccaaagttatttgcgtctcgcctgtcatgtctggtaattcatatagagatcgaaaaaagagatcggtcgaagcatttcttgattggatggacacattcggattgcgagactccgttccggatagacgcaaattagacgatgtagcggatagtttcaatttggctatgagatacgtattagataaatggaatactaattatacaccttataataggtgtaaatctagaaattacataaaaaaaatgtaataacgttagtaacgccattatggataatctatttacctttctacatgaaatagaagatagatatgccagaactatttttaactttcatctaataagttgcgatgaaataggagatatatatggtcttatgaaagaacgcatttcctcagaggatatgtttgataatatagtgtataataaagatatacatcctgccattaagaaactagtgtattgcgacatccaacttactaaacacattattaatcagaatacgtatccggtatttaacgattcttcacaagtgaaatgttgtcattatttcgacataaactcagataatagcaatattagctctcgtacagtagagatatttgagagggaaaagtcatctcttgtatcatatattaaaactaccaataagaagagaaaggtcaattacggcgaaataaagaaaactgttcatggaggcactaatgcaaattacttttccggtaaaaagtctgacgagtatctgagtactacagttagatccaacattaatcaaccttggatcaaaaccatctctaagaggatgagagttgatatcattaatcactctatagtaacgcgtggaaaaagctctatattacaaactatagaaattatttttactaatagaacatgtgtgaaaatattcaaggattctactatgcacattattctatccaaggacaaggatgaaaaggggtgtatacacatgattgacaaattattctatgtctattataatttatttctgttgttcgaagatatcatccaaaacgagtactttaaagaagtagctaatgttgtaaaccacgtactcacggctacggcattagatgagaaattattcctaattaagaaaatggctgaacacgatgtttatggagttagcaatttcaaaatagggatgtttaacctgacatttattaagtcgttggatcataccgttttcccctctctgttagatgaggatagcaaaataaagttttttaaggggaaaaagctcaatattgtagcattacgatctctggaggattgtataaattacgtgactaaatccgagaatatgatagaaatgatgaaggaaagatcgactattttaaatagcatagatatagaaacggaatcggtagatcgtctaaaagaattgcttctaaaatgaaaaaaaacactaattcagaaatggatcaacgactagggtataagtttttggtgcctgatcctaaagccggagttttttatagaccgttacatttccaatatgtatcgtattctaattttatattgcatcgattgcatgaaatcttgaccgtcaagcggccactcttatcgtttaagaataatacagaacgaattatgatagaaattagcaatgttaaagtgactcctccagattactcacctataatcgcgagtattaaaggtaagagttatgacgcattagccacgttcactgtaaatatctttaaagaggtaatgaccaaagagggtatatccatcactaaaataagtagttatgagggaaaagattctcatttgataaaaattccgctactaataggatacgggaataaaaatccacttgatacagccaagtatcttgttcctaatgtcataggtggagtctttatcaataaacaatctgtcgaaaaagtaggaattaatctagtagaaaagattacaacatggccaaaatttagggttgttaagccaaactcattcactttctcgttttcctccgtatcccctcctaatgtattaccgacaagatatcgccattacaagatatctctggatatatcacaattggaagcgttgaatatatcatcgacaaagacatttataacggtcaatattgttttgctgtctcaatatttatctagagtgagtctagaattcattagacgtagtttatcatacgatatgcctccagaagttgtctatctagtaaacgcgataatagatagtgctaaacgaattactgaatctattactgactttaatattgatacatacattaatgacctggtggaagctgaacacattaaacaaaaatctcagttaacgattaacgagttcaaatatgaaatgctgcataactttttacctcatatgaactatacacccgatcaactaaagggattttatatgatatctttactaagaaagtttctctactgtatcttccacacttctagatatccagatagagattcgatggtttgtcatcgcatcctaacgtacggcaaatattttgagacgttggcacatgatgaattagagaattacataggcaacatccgaaacgatatcatgaacaatcacaagaacagaggcacttacgcggtaaacattcatgtactaacaactcccggacttaatcacgcgttttctagcttattgagtggaaagttcaaaaagtcagacggtagttatcgaacacatcctcactattcatggatgcagaatatttctattcctaggagtgttggattttatccggatcaagtaaagatttcaaagatgttttctgtcagaaaataccatccaagtcaatatctttacttttgttcatcagacgttccggaaagaggtcctcaggtaggtttagtatctcaattgtctgtcttgagttccattacaaatatactaacgtctgagtatttggatttggaaaagaaaatttgtgagtatatcagatcatattataaagatgatataagttactttgaaacaggatttccaatcactatagaaaatgctctagtcgcatctcttaatccaaatatgatatgtgattttgtaactgactttagacgtagaaaacggatgggattcttcggtaacttggaggtaggtattactttagttagggatcacatgaatgaaattcgcattaatattggagcgggaagattagtcagaccattcttggttgtggataacggagagctcatgatggatgtgtgtccggagttagaaagcagattagacgacatgacattctctgacattcagaaagagtttccgcatgtcatcgaaatggtagatatagaacaatttacttttagtaacgtatgtgaatcggttcaaaaatttagaatgatgtcaaaggatgaaagaaagcaatacgatttatgtgactttcctgccgaatttagagatggatatgtagcatcttcactagtgggaatcaatcacaattctggacccagagctattcttggatgtgctcaagctaaacaagctatctcttgtctgagttcggatatacgaaataaaatagacaatggaattcatttgatgtatccagagaggccaatcgtgattagtaaggctttagaaacttcaaagattgcggctaattgcttcggccaacatgttactatagcattaatgtcgtacaaaggtatcaatcaagaggatggaattatcatcaaaaaacaatttattcagagaggcggtctcgatattgttacagccaagaaacatcaagtagaaattccattggaaaactttaataacaaagaaagagataggtctaacgcctattcaaaattagaaagtaatggattagttagactgaatgctttcttggaatccggagacgctatggcacgaaatatctcatcaagaactcttgaagatgattttgctagagataatcagattagctttgatgtttccgagaaatataccgatatgtacaaatctcgcgttgaacgagtacaagtagaacttactgacaaagttaaggtacgagtattaaccatgaaagaaagaagacccattctaggagacaaatttaccactagaacgagtcaaaagggaacagtcgcgtatgtcgcggatgaaacggaacttccatacgacgaaaatggtatcacaccagatgtcattattaattctacatccatcttctctagaaaaactatatctatgttgatagaggttattttaacagccgcatattctgctaagccgtacaacaataagggagaaaaccgacctgtctgttttcctagtagtaacgaaacatccatcgatacatatatgcaattcgctaaacaatgttatgagcattcaaatccgaaattgtccgatgaagaattatcggataaaatcttttgtgaaaagattctctatgatcctgaaacggataagccttatgcatccaaagtattttttggaccaatttattacttgcgtctgaggcatttaactcaggacaaggcaaccgttagatgtagaggtaaaaagacgaagctcattagacaggcgaatgagggacgaaaacgtggaggaggtatcaagttcggagaaatggagagagactgtttaatagcgcatggtgcagccaatactattacagaagttttgaaagattcggaagaagattatcaagatgtgtatgtttgtgaaaattgtggagacatagcagcacaaatcaagggtattaatacatgtcttagatgttcaaaacttaatctctctcctctcttaacaaaaattgataccacgcacgtatctaaagtatttcttactcaaatgaacgccagaggcgtaaaagtcaaattagatttcgaacgaaggcctccttcgttttataaaccattagataaagttgatctcaagccgtcttttctggtgtaatattctagtttggtagtagatacatatcaatatcatcaaattcgagatccgaattataaaatgggcgtggattgttaactatagaatcggacgtctgatattcgaaaatctgtggagtttcaggttttggtggaggtgtaactgctacttgggatactgaagtctgatattcagaaagctgtggatgttctggttcggcatccaccgatggtgtcacatcactaatcggttcggtaacgtctgtggatggaggtgctacttctacagaacctgtagcctcagttgtcaacggagatacatttttaatgcgagaaaatgtataatttggtaatggtttcttatgtggatctgaagaagaggtaagatatctactagaaagataccgatcacgttctagttctcttttgtagaacttaactttttctttctccgcatctagttgatattccaacctcttcacgttactacgttcagattccaattcacgttcgcatgggttacctccgcagtttttacgagcgatttcacgttcagccttcatgcgtctctccctctctctatcgagtttatcagagcagtctttctgaaggcgatcgaactccataaatttctccaacgctttgattgtttccatagatttccgaagttcagcttttaggactgtgattctttttctttcgaattcacagctggatgtacaaccgtttccattaccgccatctctaagtttcttttctagatcggcaacatttcatccccatgccttttacattcctcgagtctactgtcgtcgaaatatcgttccagctccttttcgacatcaataactttagcacgttgtctctcaagctctcttttgtagttatctgattccctggcacgtttaagatcttcatgcaattgagtcagctcttaacttcctctcttgcttcttcgtcatagtacgcgcaatcactgtgagatccattgttaccacgtctacactcggcgagctcgcgtttaagagattcaatttcccgtttgtattggtccatgtttccattgctaccaccattagatttacaggctgctagttgtcgttcgagatcagaaatacgggttttcttggaattgatttcgtcgatgtacttggcatcgaaacacttattaagttctttttccaattctacgattttatttctttcgcgagtcaattccctcctgtagtaactatctgttttgtcagattcacgctctctacgtagactttcttgcaagttactaatttgttccctagcacgtccgagtttagttttatatgctgaatagagttctgattcatcctttgagcagatctctagcgatcgtttaagattcctaattctagtctttagcctatttacctcctcagaagatgttccgttaccgttgcgtttacactcgttaagctgtctatcaagatccatgattctatctctaagacgttgcatctctctttccatatcagcattgctttcattattacgtctgcagtcactcaactgtctttcaatatctgagattctatctctaagacgtcgcatctctctctgtttcggcattggtttcattattacgtttacagtcgttcaactgtctttcaagatctgatattctagattggagtctgctaatctctgtagcattttcacggcattcactcagttgtctttcaagatctgaaattttagattggagtctgctaatctctgtaagatttcctcctccgctctcgatgcagtcggtcaacttattctctagttctctaatacgcgaacgcagtgcatcaacttcttgcgtgtcttcctggttgcgtgtacattcatcgagatctctaacgcgtcgtcgttcttcctcaagttctctgcgtactacagaaagcgtgtccttatcttgttgatatttagcaatttctgattctagagtactgattttgcttacgtagttactaatatttgtcttggccttatcaagatcctccttgtatttgtcgcattccttgatatccctacgaagtctggacagttcccattcgacattacgacgtttatcgatttcagctcggagatcgtcatcgcgttgttttagccacatacgactgagttcaagttctcgttgacaagatccatctacttttccattcctaatagtatccagttccttttctagttctgaacgcatttctcgttccctatcaagcgattctctcaattctcggatagtcttcttatcaatttctaataaatctgaaccatcatctgtcccattttgaatatccctgtgttctttgatctcttttgtaagtcggtcgattctttcggttttataaacagaatccctttccaaagtcctaatcttactgagtttatcactaagttctgcattcaattcggtgagttttctcttggcttcttccaactctgttttaaactctccactatttccgcattcttcctcgcatttatctaaccattcaattagtttattaataactagttggtaatcagcgattcctatagccgttcttgtaattgtgggaacataattaggatcttctaatggattgtatggcttgatagcatcatctttatcattattagggggatggacaaccttaattggttggtcctcatctcctccagtagcgtgtggttcttcaataccagtgttagtaataggcttaggcaaatgcttgtcgtacgcgggcacttcctcatccatcaagtatttataatcgggttctacttcagaatattcttttctaagagacgcgacttcgggagttagtagaagaactctgtttctgtatctatcaacgctggaatcaatactcaagttaaggatagcgaatacctcatcgtcatcatccgtatcttctgaaacaccatcatatgacatttcatgaagtctaacgtattgataaatagaatcagatttagtattaaacagatccttaacctttttagtaaacgcatatgtatattttagatctccagatttcataatatgatcacatgccttaaatgtcagtgcttccatgatataatctggaacactaatgggtgacgaaaaagatacagcaccatatgctacgttgataaataaatctgaaccactaagtagataatgattaatgttaaggaaaagaaaatattcagtgtataggtatgtcttggcgtcatatcttgtactaaacacgctaaacagtttgttaatgtgatcaatttccaatagattaattagagcagcgggaataccaacaaacatattaccacatccgtattttctatgaatatcacatatcatgttaaaaaatcttgatagaagagcgaatatctcgtctgacttaatgagtcgtagttcagcagcaacataagtcataactgtaaatagaacatactttcctgtagtgttgattctagactccacatcaacaccattattaaaaatagttttatatacatctttaatctgctctccgttaatcgtcgaacgttctagtatacggaaacactttgatttcttatctgtagttaatgacttagtgatatcacgaagaatattacgaattacatttcttgtttttcttgagagacctgattcagaactcaactcatcgttccatagtttttctacctcagtggcgaaatctttggagtgcttggtacatttttcaataaggttcgtgacctccatttattataaaaaatttattcaaaacttaactacaatcgggtaattataaaatcgtagatctcccatgtggcggaatactaccatctatcgcatgtggatggacagtaggtaatggccatgggaacagtaatgtttgcatatttatctttcttgccagtattactgcatattgtcccaatgtttcgatgtgatgttctaacctatcaactgccgctgtatcacaacaatagtgtccgatgaaattaagattatgatccaatgtgtttaatatatgattatcaagtcttatacgatccgcgtcttttttgacaggatcaggttcttctacaggaagaagtttcggcctcttatgatattcatgtctgggaaacggtggtctagggtgaggctccggtatcggagtgggttttggattataatcatcatcgtctatgacatcatcttcgacttcgatatttattttgctatcttgatgatgtcctgtatcagttgcattttcagcactcgactgaatattagcgcattcattgtctattattaccatatttctaaacccaaaatgtatgtgttgaacatcagtactatcgttgatgagtcttatagcatgaattcgcttatcgttatcgggtttatcttctgtcaccttagcaattccttttttattaaactctacataatcatatccatttctattgtttgttctaatataaacgagtatagcatcattgctaaatttttcaatagtatcaaaaacagaatatcctaaaccatataatatatattcaggaacactcaaactaaatgtccaggattctcctaaatacgtaaactttaatagtgcgaaatcattcaaaaatctaccacttatagatagatagtacataaatgcgtatagtagtctacctatctctttattatgaaaaccggcattacgatcatatatgtcgtgatatacctgtgatccgtttacgttaaaccataaatacatgggtgatcctataaacatgaatttatttctaattctcagagctatagttaattgaccgtgtaatatttgcttacatgcatacttgatacgcttattaataagatttttatcattgctcgttatttcagaatcgtatatataaggagtaccatcgtgattcttaccagatattatacaaaatactatatataaaatatattgacccacgttagtaatcatataaatgtttaacgttttaaattttgtattcaatgatccattatcatacgctatcatggtcttgtaatattcattctttaaaatataatattgtgttagccattgcattggggctcctaatggagattttttattctcatccattttaggataggctttcataaagtccctaataacttcgtgaataatgtttctatgttttctactgatgcatgtatttgcttcgatttttttatcccatgtttcatctatcatagatttaaacgcagtaatgctcgcaacattaacatcttgaaccgttggtacaattccgttccataaatttataatgttcgccatttatataactcattttttgaatatacttttaattaacaaaagagttaagttactcatatggacgccgtccagtctgaacatcaatctttttagccagagatatcatagccgctcttagagtttcagcgtgattttccaacctaaatagaacttcatcgttgcgtttacaacacttttctatttgttcaaactttgttgttacattagtaatctttttttccaaattagttagccgttgtttgagagtttcctcattgtcgtcttcatcggctttaacaattgcttcgcgtttagcctctggctttttagcagcctttgtagaaaaaaattcagttgctggaattgcaagatcgtcatctccggggaaaagagttccgtccatttaaagtacagattttagaaactgacactctgcgttatttatatttggtacaacacatggattataaatattgatgttaataacatcagaaaatgtaaagtctatacattgttgcatcgtgttaaattttctaatggatctagtattattgggtccaacttctgcctgaaatccaaatatggaagcggatacaaaaccgtttcctggataaaccacacatctccacttttgctttacatcagaaattgtgtcgttgacatcttgaactctcctatctaatgccggtgttccacctatagattttgaatattcgaatgctgcatgagtagcattaaattccttaatattgccataattttcatatattgagtaaccctggataaaaagtaaacacaccgcagccgtcgctaccacaataaaaaaaattgatagagagttcatttataatctattagaagctgacaaaatttttttacacgcatcagacaatgctttaataaatagttcaacatctacttttgtcatatcgaaccgatggtatgattctaacctagaattacatccgaaaaagttgactatgttcatagtcattaagtcattaacaaacaacattccagactctggattataagacgatactgtttcgtcacaattacctaccttaatcatgtgattatgaatattggctattagagcaccttctaagaaatctataatatctttgaaacacgatttaaaatcaaaccacgaatatacttctacgaagaaagttagtttacccataggagaaataactataaatggagatctaaatacaaaatccggatctatgatagttttaacattattatattctctattaaatacctccacatctaaaaatgttaattttgaaactatgtcttcgtttattaccgtacctgaactaaacgctataagctctattgtttgagaactctttaaacgatattcttgaaatacatgtaacaaagtttcctttaactcggtcggtttatctaccatagttacagaatttgtatccttatctataatataataatcaaaatcgtataaagttatataattatcgcgttcagattgggatcttttcaaatagactaaaaaccccatttctctagtaagtatcttatgtatatgtttgtaaaatatcttcatggtgggaatatgctctaccgcagttagccattcctcattgacagcggtagatgtattagacaaaactattccaatgtttaacaagggccattttacgagattattaaatccttgtttgataaatgtagccaatgagggttcgagttcaacgacgattgaattctcttcccgcggatgctgcatgatgaacgacgggatgttgttcgattgatttggaattctttttcgactttttgtttatattaaatattttaaaatttatagcggatagcaattcatgtaccacggataatgtagacgcgtattgcgcatcgatatctttattattagataaatttatcaataaatgtgagaagtttgcctcgttaaggtcttccatttaaatattatataaacatttgtgtttgtaacttattcgtcttttatggaatagttttttactagtaaagctgcaattacacactttgtccgtaaaacataaatataaacaccagcttttatcaatcgttccaaaaagtcgacggcggacatttttaacatggcatctattttaaatacacttaggtttttggaaaaaacatcattttataattgtaacgattcaataactaaagaaaagattaagattaaacataagggaatgtcatttgtattttataagccaaagcattctaccgttgttaaatacttgtctggaggaggtatatatcatgatgatttggttgtattggggaaggtaacaattaataatctaaagatgatgctattttacatggatttatcatatcatggagtgacaagtagtggagcaatttacaaattgggatcgtctatcgatagactttctctaaataggactattgttacaaaagttaataattatgatgatacattttttgacgacgatgattgatcgctattgcacaattttgtttttgtactttctaatatagtgtttaggttctttttcatatgagaatattgatttactaaaatatctatgtttaacttttgttctatgacgtccttatcggcggtatcggtacatatacgtaattcaccttcacaaaatacggagtcttcgataataatagccaatcgattattggatctagctgtctgtatcatattcaacatgtttaatatatcctttcgtttcccctttacaggcatcgatcgtagcatattttccgcgtctgatatggaaatgttaaaactacaaaaatgcgtaatgttagcccgtcctaatattggtacgtgtctataagtttggcatagtagaataatagacgtgtttaaatgccttccaaagtttaagaattctattagagtattgcattttgatagtttatcgcctacatcatcaaaaataagtaaaaagtgtgctgattttttatgattttgtgcgacagcaatacatttttctatgttacttttagttcgtatcagattatattctagagattcctgactactaacgaaattaatatgatttggccaaatgtatccatcataatctgggttataaacgggtgtaaacaagaatatatgtttatattttttaactagtgtagaaaacagagatagtaaatagatagtttttccagatccagatcctcctgttaaaaccattctaaacggcatttttaataaattttctcttgaaaattgtttttcttggaaacaattcataattatatttacagttactaaattaatttgataataaatcaaaatatggaaaactaaggttgttagtagggaggagaacaaagaaggcacatcgtgatataaataacatttattatcatgatgacaccagaaaacgacgaagagcagacatctgtgttctccgctactgtttacggagacaaaattcagggaaagaataaacgcaaacgcgtgattggtctatgtattagaatatctatggttatttcactactatctatgattaccatgtccgcgtttctcatagtgcgcctaaatcaatgcatgtctgctaacgaggctgctattactgacgccgctgttgccgttgctgctgcatcatctactcatagaaaggttgcgtctagcactacacaatatgatcacaaagaaagctgtaatggtttatattaccagggttcttgttatatattacattcagactaccagttattctcggatgctaaagcaaattgcactgcggaatcatcaacactacccaataaatccgatgtcttgactacctggctcattgattatgttgaggatacatggggatctgatggtaatccaattacaaaaactacatccgattatcaagattctgatgtatcacaagaagttagaaagtatttttgtgttaaaacaatgaactaatatttatttttgtacattaataaatgaaatcgcttaatagacaaactgtaagtaggtttaagaagttgtcggtgccggccgctataatgatgatactctcaaccattattagtggcataggaacatttctgcattacaaagaagaactgatgcctagtgcttgcgccaatggatggatacaatacgataaacattgttatttagatactaacattaaaatgtctacagataatgcggtttatcagtgtcgtaaattacgagctagattgcctagacctgatactagacatctgagagtattgtttagtattttttataaagattattgggtaagtttaaaaaagaccaatgataaatggttagatattaataatgataaagatatagatattagtaaattaacaaattttaaacaactaaacagtacgacggatgctgaagcgtgttatatatacaagtctggaaaactggttaaaacagtatgtaaaagtactcaatctgtactatgtgttaaaaaattctacaagtgacaacaaaaaatgaattaataataagtcgttaacgtacgccgccatggacgccgcgtttgttattactccaatgggtgtgttgactataacagatacattgtatgatgatctcgatatctcaatcatggactttataggaccatacattataggtaacataaaaactgtccaaatagatgtacgggatataaaatattccgacatgcaaaaatgctactttagctataagggtaaaatagttcctcaggattctaatgatttggctagattcaacatttatagcatttgtgccgcatacagatcaaaaaataccatcatcatagcatgcgactatgatatcatgttagatatagaagataaacatcagccattttatctattcccatctattgatgtttttaacgctacaatcatagaagcgtataacctgtatacagctggagattatcatctaatcatcaatccttcagataatctgaaaatgaaattgtcgtttaattcttcattctgcatatcagacggcaatggatggatcataattgatgggaaatgcaatagtaattttttatcataaaagttgtaaagtaaataataaaacaataaatattgaactagtagtacgtatattgagcaatcagaaatgatgctggtacctcttatcacggtgaccgtagttgcgggaacaatattagtatgttatatattatatatttgtaggaaaaagatacgtactgtctataatgacaataaaattatcatgacaaaattaaaaaagataaagagttctaattccagcaaatctagtaaatcaactgatagcgaatcagactgggaggatcactgtagtgctatggaacaaaacaatgacgtagataatatttctaggaatgagatattggacgatgatagcttcgctggtagtttaatatgggataacgaatccaatgttatggcgcctagcacagaacacatttacgatagtgttgctggaagcacgctgctaataaataatgatcgtaatgaacagactatttatcagaacactacagtagtaattaatgaaacggagactgttgaagtacttaatgaagataccaaacagaatcctaactattcatccaatcctttcgtaaattataataaaaccagtatttgtagcaagtcaaatccgtttattacagaacttaacaataaatttagtgagaataatccgtttagacgagcacatagcgatgattatcttaataagcaagaacaagatcatgaacacgatgatatagaatcatcggtcgtatcattggtgtgattagtttcctttttataaaattgaagtaatatttagtattattgctgccgtcacgttgtacaaatggagatattccctgtattcggcatttctaaaattagcaattttattgctaataatgactgtagatattatatagatacagaacatcaaaaaattatatctgatgagatcaatagacagatggatgaaacggtacttcttaccaacatcttaagcgtagaagttgtaaatgacaatgagatgtaccatcttattcctcatagattatcgacgattatactctgtattagttctgtcggaggatgtgttatctctatagataatgacatcaatggcaaaaatattctaacctttcccattgatcatgctgtaatcatatccccactgagtaaatgtgtcgtagttagcaagggtcctacaaccatattggttgttaaagcggatatacctagcaaacgattggtaacatcgtttacaaacgacatactatatgtaaacaatctgtcactgattaattatttgccgttgtctgtattcattattagacgagtcaccgactatttggatagacacatatgcgatcagatatttgctaataataagtggtattcccttataaccatcgacgataagcaatatcctattccatcaaactgtataggtatgtcctctgccaagtacataaattctagcatcgagcaagatactttaatccatgtttgtaacctcgagcatccgttcgactcagtatacaaaaaaatgcagtcgtacaattctctacctatcaaggaacaaatattgtacggtagaattgataatataaatatgagcattagtatttctgtggattaatagatttctagtatggggatcattaatcatctctaatctctaaatacctcataaaacgaaaaaaaagctattatcaaatactgtacggaatggattcattctcttctctttttatgaaactctgttgtatatctactgataaaactggaagcaaaaaatctgatagaaagaataagaataagatcaaggattatatggaacacgattattataaaataacaatagttcctggttcctcttccacgtctactagctcgtggtattatacacatgcctagtaatagtctctttgcgttgacggaaagcagactagaaataacaggctaaaatgttcagacaccataatagttcccaacccagataataacagagttccatcaacacattcctttaaactcaatcccaaacccaaaaccgttaaaatgtatccggccaattgatagtagataatgaggtgtacagcgcatgataatttacacagtaaccaaaatgaaaatactttagtaattataagaaatatagacggtaatgtcatcatcaacaatccgataatatgcctgagagtaaacattgacggataaaacaaaaatgctccgcataactctatcatggcaataacacaaccaaatacttgtaagattcctaaattagtagaaaatacaacgaatatcgatgtataagtgatctcgagaaataataagaataaagtaatgcccgtaaagataaacatcaacattgtttggtaatcattaaaccaattagtatgaagttgaactaatttcacagtagattttattccagtgttatcctcgcatgtataagtacctggtaagatatctttatattccataatcaatgagacatcactatctgataacgaatgaagtctagcactagtatgccatttacttaatattgtcgtcttggaagttttattataagttaaaatatcatggttatccaatttccatctaatatactttgtcggattatctatagtacacggaataatgatggtatcattacatgctgtatactctatggtctttgtagttgttataacaaccaacgtatagaggtatatcaacgatattctaactcttgacattttttatttatttaaaatgatacctttgttatttattttattctattttgctaacggtattgaatggcataagtttgaaacgagtgaagaaataatttctacttacttattagacgacgtattatacacgggtgttaatggggcggtatacacattttcaaataataaactaaacaaaactggtttaactaataataattatataacaacatctataaaagtagaggatgcggataaggatacattagtatgcggaaccaataacggaaatcccaaatgttggaaaatagacggttcagacgacccaaaacatagaggtagaggatacgctccttatcaaaatagcaaagtaacgataatcagtcacaacggatgtgtactatctgacataaacatatcaaaagaaggaattaaacgatggagaagatttgacggaccatgtggttatgatttattcacggcggataacgtaattccaaaagatggtttacgaggagcattcgtcgataaagatggtacttatgacaaagtttacattcttttcactgatactatcggctcaaagagaattgtcaaaattccgtatatagcacaaatgtgcctaaacgacgaaggtggtccatcatcattgtctagtcatagatggtcgacgtttctcaaagtcgaattagaatgtgatatcgacggaagaagttatagacaaattattcattctagaactataaaaacagataatgatacgatactatatgtattcttcgatagtccttattccaagtccgcattatgtacctattctatgaataccattaaacaatctttttctacgtcaaaattggaaggatatacaaagcaattgccgtctccagctcctggtatatgtttaccagctggaaaagttgttccacataccacgtttgaagtcatagaacaatataatgtactagatgatattataaagcctttatctaaccaacctatcttcgaaggaccgtctggtgttaaatggttcgatataaaggagaaggaaaatgaacatcgggaatatagaatatacttcataaaagaaaattctatatattcgttcgatacaaaatctaaacaaactcgtagctcgcaagtcgatgcgcgactattttcagtaatggtaactgcgaaaccgttatttatagcagatatagggataggagtaggaatgccacaaatgaaaaaaatacttaaaatgtaatcttaatcgagtacaccacacgacaatgaacaaacataagacagattatgctggttatgcttgctgcgtaatatgcggtctaattgtcggaattatttttacagcgacactattaaaagttgtagaacgtaaattagttcatacaccattaatagataaaacgataaaagatgcatatattagagaagattgtcctactgactggataagctataataataaatgtatccatttatctactgatcgaaaaacctgggaggaaggacgtaatgcatgcaaagctctaaatccaaattcggatctaattaagatagagactccaaacgagttaagttttttaagaagccttagacgaggctattgggtaggagaatccgaaatattaaaccagacaaccccatataattttatagctaagaatgccacgaagaatggaactaaaaaacggaaatatatttgtagcacaacgaatactcccaaactgcattcgtgttacactatataacaattacactacatttttatcataccactacttcggttagatgttttagaaaaaaataaatatcgccgtaccgttcttgtttttataaaaataacaattaacaattatcaaattttttctttaatattttacgtggttgaccattcttggtggtaaaataatctcttagtgttggaatggaatgctgtttaatgtttccgcactcatcgtatattttgacgtatgcagtcacatcgtttacgcaatagtcagactgtagttctatcatgcttcctacatcagaaggaggaacagttttaaagtctcttggttttaatctattaccgttagttttcatgaaatcctttgttttatccacttcacattttaaataaatgtccactatacattcttttgttaattttactagatcgtcatgggtcatagaatttataggttccgtagtccatggatccaaactagcaaacttcgcgtatacggtatcgcgattagtgtatacaccaactgtatgaaaattaagaaaacagtttaataaatcaacagaaatatttaatcctccgtttgatacagatgcgccatatttatggatttcggattcacacgttgtttgtctgaggtgttcgtctagtgttgcttctacgtaaacttcgattcccatatattctttattgtcagaatcgcataccgatttatcatcatacactgtttgaaaactaaatggtatacacatcaaaataataaataataacgagtacattctgcaatattgttatcgtaattggaaaaatagtgttcgagtgagttggattatgtgagtattggattgtatattttattttatattttgtaataagaataaaatgctaatgtcaagtttattccaatagatgtcttattaaaaacatatataataaataacaatggctgaatggcataaaattatcgaggatatctcaaaaaataataagttcgaggatgccgccatcgttgattacaagactacaaagaatgttctagctgctattcctaacagaacatttgccaagattaatccgggtgaaattattcctctcatcactaatcgtaatattctaaaacctcttattggtcagaaatattgtattgtatatactaactctctaatggatgagaacacgtatgctatggagttgcttactgggtacgcccctgtatctccgatcgttatagcgagaactcataccgcacttatatttttgatgggtaagccaacaacatccagacgtgacgtgtatagaacgtgtagagatcacgctacccgtgtacgtgcaactggtaattaaaataaaaagtaatattcatatgtagtgtcaattttaaatgatgatgatgaaatggataatatccatattgacgatgtcaataatgccggtattggcatacagttcatcgatttttagatttcattcagaggatgtggaattatgttatgggcatttgtattttgataggatctataatgtagtaaatataaaatataatccgcatattccatatagatataattttattaatcacacgttaaccgtagatgaactagacgataatgtcttttttacacatggttattttttaaaacacaaatatggttcacttaatcctagtttgattgtctcattatcaggaaacttaaaatataatgatatacaatgctcagtaaatgtatcgtgtctcattaaaaatttggcaacgagtacatctactatattaacatctaaacataagacttattctctacatcggtccacgtgtattactataataggatacgattctattatatggtataaagatataaatgacaagtataatgacatctatgattttactgcaatatgtatgctaatagcgtctacattgatagtgaccatatacgtgtttaaaaaaataaaaatgaactcttaattatgctatgctattagaaatggataaaatcaaaattacggttgattcaaaaattggtaatgttgttaccatatcgtataacttggaaaagataactattgatgtcacacctaaaaagaaaaaagaaaaggatgtattattagcgcaatcagttgctgtcgaagaggcaaaagatgtcaaggtagaagaaaaaaatattatcgatattgaagatgacgatgatatggatgtagaaagcgcgtaatacgatctataaaaataagtatataaatactttttatttactgtactcttactgtgtagtggtgataccctactcgattatttttttaaaaaaaaaatacttattctgattcttctagccatttccgtgttcgtttgaatgccacatcgacgtcaaagataggggagtagttgaaatctagttctgcattgttggtacgcacctcaaatgtagtgttggatatcttcaacgtatagttgttgagtagtgatggttttctaaatagaattctcttcatatcattcttgcacgcgtacatttttagcatccatcttggaatcctagatccttgttctattcccaatggtttcatcaatagaagattaaacatatcgtacgaacacgatggagagtaatcgtagcaaaagtaagcatttcctttaatcttagatcccggatactggatatattttgcagccaacacgtgcatccatgcagcatttcctacatatacccggctatgcaccgcgtcatcatcgactgtacgatacataatgttaccgtgttgcttacattgctcgtaaaagactttcatcaatttgtctccttctccgtaaattccagtgggtcttaggcaacaagtatacaattttgctccattcatgattacggaattattggctttcataaccagttgctcggccatacgtttactttttgcgtatacatgtcctggtgatatatcataaagggtatgctcatggccgatgaatggatcaccgtgtttattgggtcctattgcttccatgctactagtatagatcaaatacttgattcctaggtccacacaagctgccaaaatagtctgtgttccataatagtttactttcatgatttcattatcggtgtattttccaaatacatccactagagcagccgtatgaataatcagatttaccccatctagcgcttctctcaccttatcaaagtcgtttatatcacattgtatatagtttataaccttaactttcgaggttattggttgtggatcttctacaatatctatgactctgatttcttgaacatcatctgcactaattaacagttttactatatacctgcctagaaatccggcaccaccagtaaccgcgtacacggccattgctgccactcataatatcagactacttattctattttactaaataatggctgtttgtataatagaccacgataatatcagaggagttatttactttgaaccagtccatggaaaagataaagttttaggatcagttattggattaaaatccggaacgtatagtttgataattcatcgttacggagatattagtcaaggatgtgattccataggcagtccagaaatatttatcggtaacatctttgtaaacagatatggtgtagcatatgtttatttagatacagatgtaaatatatttacaattattggaaaggcgttatctatttcaaaaaatgatcagagattagcgtgtggagttattggtatttcttacataaatgaaaagataatacattttcttacaattaacgagaatggcgtttgatatatcagttaatgcgtctaaaacaataaatgcattagtttacttttctactcagcaaaataaattagtcatacgtaatgaagttaatgatacacactacactgtcgaatttgatagggacaaagtagttgacacgtttatttcatataatagacataatgacaccatagagataagaggggtgcttccagaggaaactaatattggttgcgcggttagtatgacttacttgtataataagtatagttttaaactgattttagcagaatatataagacacagaaatactatatccggcaatatttattcggcattgatgacactagatgatttggctattaaacagtatggagacattgatctattatttaatgagaaacttaaagtagactccgattcgggactatttgactttgtcaactttgtaaaggatatgatatgttgtgattctagaatagtagtagctctatctagtctagtatctaaacattgggaattgacaaataaaaaatataggtgtatggcattagccgaacatatatctgatagtattccaatatctgagctatctagactacgatacaatctatgtaagtatctacgcggacacactgagagcatagaggataaatttgattattttgaagacgatgattcgtctacatgttctgccgtaaccgacagggaaacggatgtataattttttttatagcgtgaaggatatgataaaaaatataattgttgtatttatcccattccaatcaccttatatgattctgtaacacaataaaggagtcttatagatgtatagaggtcagatactggtttgataaactgtttattccacataagtatgtttgactttatggttagacccgcatactttaacaaatcactgaaaattggagttaggtattgacctctcagaatcagttgccgttctggaacattaaatgtattttttatgatatactccaacgcatttatgtgggcatacaacaagtcattactaatggaatattccaagagttttagttgtctagtatttaacaagagaagagatttcaacagactgtttatgaactcgaatgccgcctcattgtcgcttatattgatgatgtcgaattctcccaatatcatcaccgatgagtagctcatcttgttatcgggatccaagttttctaaagatgtcattaaaccctcgatcatgaatggatttatcatcatcgtttttatgttggacatgagcttagtccgtttgtccacatctatagaagatgatttctgaattatttcatatatctctctctttaactccaggaacttgtcaggatggtctactttaatatgttctcgtctaagagatgaaaatctttggatggttgcacgcgacttttctctaaaggatgacgttgcccaagatcctctcttaaatgaatccatcttatccttggacaagatggacagtctattttccttagatggtttaatatttttgttacccatgatctataaaggtagacctaatcgtctcggatgaccatatatttattttcagttttattatacgcataaattgtaaaaaatatgttaggtttacaaaaatgtctcgtggggcattaatcgtttttgaaggattggacaaatctggaaaaacaacacaatgtatgaacatcatggaatctataccggcaaacacgataaaatatcttaactttcctcagagatccactgtcactggaaaaatgatagatgactatctaactcgtaaaaaaacctataatgatcatatagttaatctattattttgtgcaaatagatgggagtttgcatcttttatacaagaacaactagaacagggaattactttaatagttgatagatacgcattttctggagtagcgtatgccgccgctaaaggcgcgtcaatgactctcagtaagagttatgaatctggattgcctaaacccgacttagttatattcttggaatctggtagcaaagaaattaatagaaacgtcggtgaggaaatttatgaagatgttacattccaacaaaaggtattacaagaatataaaaaaatgattgaagaaggagatattcattggcaaattatttcttctgaattcgaggaagatgtaaagaaggagttgattaagaatatagttatagaggctatacacacggttactggaccagtggggcaactgtggatgtaatagtgaaattacattttttataaatagatgttagtacagtgttataaatggatgaagcatattactctggcaacttggaatcagtactcggatacgtgtccgatatgcataccgaactcgtatcaatatctcaattagttattgccaagatagaaactatagataatgatatattaaacaaggacattgtaaattttatcatgtgtagatcaaacttggataatccatttatctctttcctagatactgtatatactattatagatcaagagatctatcagaccgaattgattaattcattagacgacaatgaaattatcgattgtatagttaataagtttatgagcttttataaggataacctagaaaatatagtagatgctatcattactctaaaatatataatgaataatccagattttaaaactacgtatgcagaagtactcggttccagaatagccgatatagatattaaacaagtgatacgtaagaatatactacaattgtctaataatatccgcgaacgatatttgtgaaaatattaaaaaaaaatactttttttattaaatgacgtcgcttcgcgaatttagaaaattatgctgtgatatatatcacgcatcaggatataaagaaaaatctaaattaattagagactttataacagatagggatgataaatatttgatcattaagctattgcttcccggattagacgatagaatttataacatgaacgataaacaaattataaaattatatagtataatatttaaacaatctcaggaagatatgctacaagatttaggatacggatatataggagacactattaggactttcttcaaagagaacacagaaatccgtccacgagataaaagcattttaactttagaagaagtggatagttttttaactacgttatcatccgtaactaaagaatcgcatcaaataaaattattgactgatgtagcatccgtttgtacatgtaatgatttaaaatgtgtagtcatgcttattgataaagatctaaaaattaaagcgggtcctcggtacgtacttaacgctattagtcctaatgcctatgatgtgtttagaaaatctaataacttgaaagagataatagaaaatgcatctaaacaaaatctagactctatatctatttctgttatgactccaattaatcccatgttagcggaatcgtgtgattctgtcaataaggcgtttaaaaaatttccatcaggaatgtttgcggaagtcaaatacgatggtgaaagagtacaagttcataaaaataataacgagtttgccttctttagtagaaacatgaaaccagtactctctcataaagtggattatctcaaagaatacataccgaaagcatttaaaaaagctacgtctatcgtattggattctgaaattgttcttgtagacgaacataatgtaccgctcccgtttggaagtttaggaatacacaaaaagaaagaatataaaaactctaacatgtgtttgttcgtgtttgactgtttgtactttgatggattcgatatgacggacattccattgtacgaacgaagatcttttctcaaagatgttatggttgaaatacccaatagaatagtattctcagagttgacgaatattagtaacgagtctcagttaactgacgtattggatgatgcactaacgagaaaattagaaggattggtcttaaaagatattaatggagtatacgaaccgggaaagagaagatggttaaaaataaagcgagactatttgaacgagggttccatggcagattctgccgatttagtagtactaggtgcttactatggtaaaggagcaaagggtggtatcatggcagtctttctaatgggttgttacgacgataaatccggtaaatggaagacggttaccaagtgttcaggacacgatgataatacgttaagggagttgcaagaccaattaaagatggttaaaattaacaaggatcccaaaaaaattccagagtggttggtagttaataaaatctatattcccgattttgtagtagaggatccaaaacaatctcagatatgggaaatttcaggagcagagtttacatcttccaagtcccataccgcaaatggaatatccattagatttcctagatttactaggataagagaggataaaacgtggaaagaatctactcatctaaacgatttagtaaacttgactaaatcttaatagttacatacaaactgaaaattaaaataacactatttagttggtggtcgccatggatggtgttattgtatactgtctaaacgcgctagtaaaacatggcgaggaaataaatcatataaaaaatgatttcatgattaaaccatgttgtgaaagagtttgtgaaaaagtcaagaacgttcacatcggcggacaatctaaaaacaatacagtgattgcagatttgccatatctggataatgcggtatccgatgtatgcaattcactgtataaaaagaatgtatcaagaatatccagatttgataaagatagatgacgatgacaagactcctactggtgtatataattattttaaacctaaagatgccattcctgttattatatccataggaaaggatagagatgtttgtgaactattaatctcatctgataaagcgtgtgcgtgtatagagttaaattcatataaagtagccattcttcccatggatgtttccttttttaccaaaggaaatgcatcattgattattctcctgtttgatttctctatcgatgcggcacctctcttaagaagtgtaaccgataataatgttattatatctagacaccagcgtctacatgacgagcttccgagttccaattggttcaagttttacataagtataaagtccgactattgttctatattatatatggttgttgatggatctgtgatgcatgcgatagctgataatagaactcacgcaattattagcaaaaatatattagacaatactacgattaacgatgagtgtagatgctgttattttgaaccacagattaggattcttgatagagatgagatgctcaatggatcatcgtgtgatatgaacagacattgtattatgatgtaggcaaatttggatctagtatgttggggaaatatgaacctgacatgattaagattgctctttcggtggctggtaatttaataagaaatcgagactacattcccgggagacgaggctatagcctctagataatttttttaagcacgaaataaaaaacataattttaaaccaatctatttcatactattttgtgtgatcaccatggacataaagatagatattagtatttctggtgataaatttacggtgactactaggagggaaaatgaagaaagaaaaaaatatctacctctccaaaaagaaaaaactactgatgttatcaaacctgattatcttgagtacgatgacttgttagatagagatgagatgtttactattctagaggaatattttatgtacagaggtctattaggcctcagaataaaatatggacgactctttaacgaaattaaaaaattcgacaatgatgcggaagaacaattcggtactatagaagaactcaagcagaaacttagattaaattctgaagagggagcagataactttatagattatataaaggtacaaaaacaggatatcgtcaaacttactgtatacgattgcatatctatgataggattgtgtgcatgcgtggtagatgtttggagaaatgagaaactgttttctagatggaaatattgtttacgagcgattaaactgtttattaatgatcacatgcttgataagataaaatctatactgcagaatagactagtatatgtggaaatgtcatagaaagttaaaagttaatgagagcaaaaatatataaggttgtattccatatttgttattttttctgtaatagttaaaaaatacattcgatggtctatctatcagattattatgtgttataaggtactttttctcataataaactagagtatgagtaagatagtgtttttcaaaacatataaatctaaaattgatggatgagatatacagctattaatttcgaaaatatattttaatctgataactttaaacatggatttttgatggtggtttaacgttttaaaaaaagattttgttattgtagtatatgataatattaaaagatggatataaagaatttgctgactgcatgtactattttttacattactacattggctacggcagatatacctacttcgtcactgccacacgctccggtaaacggggcatgtgacgagggagaatatcttgataagaggcataatcaatgttgtaatcagtgtccacctggagaatttgccaaggtcagatgtaatggtaacgataacacaaaatgtgaacgctgcccacctcatacatataccgcaatccccaattactctaatggatgtcatcaatgtagaaaatgcccaacaggatcatttgataaggtaaagtgtaccggaacacagaacagtaaatgttcgtgtcttcctggttggtattgcgctactgattcttcacagactgaagattgtcgagattgtataccaaaaaggagatgtccatgcggatactttggtggaatagatgaacaaggaaatcctatttgtaaatcgtgttgtgttggtgaatattgcgactacctacgtaattatagacttgatccatttcctccatgcaaactatctaaatgtaattaattatgattttgatgataatgttaccatacattatatcgctacttggttagtgtattattcagtatgaagacctattaataattacttatcttttgacgatcttgttataattataatataaaaacttatggcatagtaacttataattgctgacgcgataaattcgtaataatctgttttgttcaaaggaatctacaggcataaaaataaaaatataatttataatatactcttacagcgcgccatcatgaataacagcagtaaattaattgctgttattaatggatttagaaatagtggacgattttgtgatattaatatagttattaatgatgaaaggataaacgctcacagactcatcctatctggagcctccgaatatttttccattctgttttccaataattttatcgattctaatgaatacgaagttaatctaagtcatttagattatcaaagtgttaacgatttgatcgattacatttatgggatacctttgagcctaactaacgataacgtgaaatatattctttcaaccgctgattttttacaaattggatctgctattacggagtgtgaaaattacatacttaaaaatctttgttctagaaactgtatcgatttctacatatacgctgataaatataataacaagaaaatagaatcagcgtcgtttaacacaatattacaaaatattttgagactcatcaacgatgaaaactttaaatacttaacagaggaatcaatgataaaaattttaagcgatgatatgttaaatataaaaaatgaggatttcgccccactaattctcattaaatggttagagagtactcaacaaccatgcaccgtcgagttacttaaatgcctcagaatatcattgctttccccacaagttataaaatcactttatagtcatcgactggttagttcaatctacgaatgtataacattcttaaacaatatagcattcttggatgaatcatttcctagataccatagcatcgagttgatatctatcggtataagtaattcgcatgataagatttccataaactgctacaatcataaaaaaaatacatgggaaatgatatcttcacgtagatataggtgtagtttcgcagtggccgtcctggataatattatttatatgatgggtggatatgatcagtccccgtatagaagttcaaaggttatagcgtacaatacatgtacaaattcttggatatatgatataccagagctaaaatatcctcgttctaattgtgggggactggctgatgacgaatacatttattgtataggcggcatacgcgatcaggattcatcgttgacatctagtattgatagatggaagccatcaaaaccatattggcagaagtatgctaaaatgcgcgaaccaaaatgtgatatgggggttgcgatgttaaacggattaatatatgttataggtggaatcgttaaaggtgacacgtgtaccgacgcactagagagtttatcagaagatggatggatgaagcatcaacgtcttccaataaaaatgtccaatatgtcgacgattgttcatgatggcaagatttatatatctggaggttacaacaatagtagtgtagttaatgtaatatcgaatctagtccttagctataattcgatatatgatgaatggaccaaattatcatcattaaacattcctagaattaatcccgctctatggtcagcgcataataaattatatgtaggaggaggaatatctgatgatgttcgaactaatacatctgagacatacgacaaagaaaaagattgttggacattggataatggtcacgtgttaccacgcaattatataatgtataaatgcgaaccgattaaacataaatatccattggaaaaaacacagtacacgaatgattttctaaagtatttggaaagttttataggtagttgatagaacaaaatacataattttgtaaaaataaatcactttttatactaatatgacacgattaccaatacttttgttactaatatcattagtatactctacaccttttcctcagacatctaaaaaaataggtgatgatgcaactctatcatgtaatcgaaataatacaaatgactacgttgttatgagtgcttggtataaggagcccaattccattattcttttagctgctaaaagcgacgtcttgtattttgataattataccaaggataaaatatcttacgactctccatacgatgatctagttacaactatcacaattaaatcattgactgctagagatgccggtacttatgtatgtgcattctttatgacatcgcctacaaatgacactgataaagtagattatgaagaatactccacagagttgattgtaaatacagatagtgaatcgactatagacataatactatctggatctacacattcaccggaaactagttctgagaaacctgattatatagataattctaattgctcgtcggtattcgaaatcgcgactccggaaccaattactgataatgtagaagatcatacagacaccgtcacatacactagtgatagcattaatacagtaagtgcatcatctggagaatccacaacagacgagactccggaaccaattactgataaagaagaagatcatacagtcacagacactgtctcatacactacagtaagtacatcatctggaattgtcactactaaatcaaccaccgatgatacgtacaatgataatgatacagtaccatcaactactgtaggcggtagtacaacctctattagcaattataaaaccaaggactttgtagaaatatttggtattaccgcattaattatattgtcggccgtggcaatattctgtattacgtattatatatgtaataaacgttcacgtaaatacaaaacagagaacaaagtctagatttttgacttacataaatgtctgggatagtaaaatctatcatattgagcggaccatctggtttaggaaagacagccatagccaaaagactatgggaatatatttggatttgtggtgtcccataccactagatttcctcgtcctatggaacgagaaggtgtcgattaccattacgttaacagagaggccatctggaagggaatagccgccggaaactttctagaacatactgagtttttaggaaatatttacggaacttctaaaactgctgtgaatacagcggctattaataatcgtatttgtgtgatggatctaaacatcgatggcgttagaagtcttaaaaatacgtacctaatgccttactcggtgtatataagacctacctctcttaaaatggttgagaccaagcttcgttgtagaaacactgaagcggatgatgagattcatcgtcgtgtgatgttggcaaaaactgacatggatgaggcaggtgaagccggtctattcgacactattattattgaagatgatgtgaatttagcatatagtaagttaattcagatactacaggaccgtattagaatgtattttaacactaattagagacttaagacttaaaacttgataattaataatataactcgtttttatatgtggctatttcaacgtctaatgtattagttaaatattaaaacttaccacgtaaaacttaaaatttaaaatggtatttcattgacagatagatcacacattatgaactttcaaggacttgtgttaactgacaattgcaaaaatcaatgggtcgttggaccattaataggaaaaggtggattcggtagtatttatactactaatgacaataattatgtagtaaaaatagagcccaaagctaacggatcattatttaccgaacaggcattttatactagagtacttaaaccatccgttatcgaagaatggaaaaaatctcacaatataaagcacgtaggtcttatcacgtgcaaggcatttggtctatacaaatccattaatgtggaatatcgattcttggtaattaatagattaggtgcagatctagatgcggtgatcagagccaataataatagattaccaaaaaggtcggtgatgttgatcggaatcgaaatcttaaataccatacaatttatgcacgagcaaggatattctcacggagatattaaagcgagtaatatagtcttggatcaaatagataagaataaattatatctagtggattacggattggtttctaaattcatgtctaacggcgaacatgttccatttataagaaatccaaataaaatggataacggtactctagaatttacacctatagattcgcataaaggatacgttgtatctagacgtggagatctagaaacacttggatattgtatgattagatggttgggaggtatcttgccatggactaagatatctgaaacaaagaattgtgcattagtaagtgccacaaaacagaaatatgttaacaatactgcgactttgttaatgaccagtttgcaatatgaacctagagaattgctgcaatatattaccatggtaaactctttgacatattttgaggaacccaattacgacaagtttcggcacatattaatgcagggtgtatattattaagtgtggtgtttggtcgataaaaattaaaaaataacttaatttattattgatctcgtgtgtacaaccgaaatcatggcgatgttttacgcacacgctctcggtgggtacgacgagaatcttcatgcctttcctggaatatcatcgactgttgccaatgatgtcagaaaatattctgttgtgttagtttataataacaagtatgacattgtaaaagacaaatatatgtggtgttacagtcaggtgaacaagagatatattggagcactgctgcctatgtttgagtgcaatgaatatctacaaattggagatccgatccatgatcaagaaggaaatcaaatctctatcatcacatatcgccacaaaaactactatgctctaagcggaatcgggtacgagagtctagacttgtgtttggaaggagtagggattcatcatcacgtacttgaaacaggaaacgctgtatatggaaaagttcaacatgattattctactatcaaagagaaggccaaagaaatgaatgcacttagtccaggacctatcatcgattaccacgtctggataggagattgtatctgtcaagttactgctgtggacgtacatggaaaggaaattatgagaatgagattcaaaaagggtgcggtgcttccgatcccaaatctggtaaaagttaaacttggggagaatgatacagaaaatctttcttctactatatcggcggcaccatcgaggtaaccacctctctggaagacagcgtgaataatgtactcatgaaacgtttggaaactatacgccatatgtggtctgttgtatatgatcattttgatattgtgaatggtaaagaatgctgttatgtgcatacgcattcatctaatcaaaatcctataccgagtactgtaaaaacaaatttgtacatgaagactatgggatcatgcattcaaatggattccatggaagctctagagtatcttagcgaactgaaggaatcaggtggatggagtcccagaccagaaatgcaggaatttgaatatccagatggagtggaagacactgaatcaattgagagattggtagaggagttcttcaatagatcagaacttcaggctggtgaatcagtcaaatttggtaattctattaattgttaaacatacatctgtttcagctaagcaactaagaacacgtatacggcagcagcttccttctatactctcatcttttaccaacacaaagggtggatatttgttcattggagttgataataatacacacaaagtatttggattcacggtgggttacgactacctcagactgatagagaatgatatagaaaagcatatcaaaagactttgtgttgtgtatttctgtgagaagaaagaggacatcaagtacgcgtgtcgattcatcaaggtatataaacctggggatgaggctacctcgacatacgtgtgcgctatcaaagtggaaagatgctgttgtgctgtgtttgcagattggccagaatcatggtatatggatactaatggtatcaagaagtattctccagatgaatgggtgtcacatataaaattttaattaatgtaactatagagaacaaataataaggttgtaatatcatatagacaataactaacaattaattagtaactgttatctcttttttaattaaccaactaactatatacctattaatacatcgtaattatagttcttaacatctattaatcattaattcgcttctttaattttttataaactaacattgttaattgaaaagggataacatgttacagaatataaattatatatggatttttttaaaaaggaaatacttgactggagtatatatttatctcttcattatatagcacgcgtgttttccaatttttccacatcccatataatacaggattataatctcgttcgaacatacgagaaagtggataaaacaatagttgattttttatctaggttgccaaatttattccatattttagaatatggggaaaatattctacatatttattctatggatgatgctaatacgaatattataattttttttctagatagagtattaaatattaataagaacgggtcatttatacacaatctcgggttatcatcatccattaatataaaagaatatgtatatcaattagttaataatgatcatccagataataggataagactaatgcttgaaaatggacgtagaacaagacattttttgtcctatatatcagatacagttaatatctatatatgtattttaataaatcatggattttatatagatgccgaagacagttacggttgtacattattacatagatgtatatatcactataagaaatcagaatcagaatcatacaatgaattaattaagatattgttaaataatggatccgatgtagataaaaaagatacgtacggaaacacaccttttatcctattatgtaaacacgatatcaacaacgtggaattgtttgagatatgtttagagaatgctaatatagactctgtagactttaatagatatacacctcttcattatgtctcatgtcgtaataaatatgattttgtaaagttattaatttctaaaggagcaaatgttaatgcgcgtaataaattcggaactactccattttattgtggaattatacacggtatctcgcttataaaactatatttggaatcagacacagagttagaaatagataatgaacatatagttcgtcatttaataatttttgatgctgttgaatctttagattatctattatccagaggagttattgatattaactatcgtactatatacaacgaaacatctatttacgacgctgtcagttataatgcgtataatacgttggtctatctattaaacaaaaatggtgattttgagacgattactactagtggatgtacatgtatttcggaagcagtcgcaaacaacaacaaaataataatggaagtactattgtctaaacgaccatctttgaaaattatgatacagtctatgatagcaattactaaacataaacagcataatgcagatttattgaaaatgtgtataaaatatactgcgtgtatgaccgattatgatactcttatagatgtacagtcgctacagcaatataaatggtatattttaagatgtttcgatgaaatagatatcatgaagagatgttatataaaaaataaaactgtattccaattagttttttgtatcaaagacattaatactttaatgagatacggtaaacatccttctttcgtgaaatgcactagtctcgacgtatacggaagtcgtgtacgtaatatcatagcatctattagatatcgtcagagattaattagtctattatccaagaagctggatcctggagataaatggtcgtgttttcctaacgaaataaaatataaaatattggaaaactttaacgataacgaactatccacatatctaaaaatcttataaacattattaaaatataaaatctaagtaggataaaatcacactacatcattgtttccttttagtgctcgacagtgtatactatttttaacgctcataaataaaaatgaaaacgatttccgttgttacgttgttatgcgtactacctgctgttgtttattcaacatgtactgtacccactatgaataacgctaaattaacgtctaccgaaacatcgtttaatgataaccagaaagttacgtttacatgtgatcagggatatcattctttggatccaaatgctgtctgtgaaacagataaatggaaatacgaaaatccatgcaaaaaaatgtgcacagtttctgattatgtctctgaactatataataaaccgctatacgaagtgaattccaccatgacactaagttgcaacggcgaaacaaaatattttcgttgcgaagaaaaaaatggaaatacttcttggaatgatactgttacgtgtcctaatgcggaatgtcaacctcttcaattagaacacggatcgtgtcaaccagttaaagaaaaatactcatttggggaatatatgactatcaactgtgatgttggatatgaggttattggtgcttcgtacataagttgtacagctaattcttggaatgttattccatcatgtcaacaaaaatgtgatatgccgtctctatctaacggattaatttccggatctacattttctatcggtggcgttatacatcttagttgtaaaagtggttttacactaacggggtctccatcatccacatgtatcgacggtaaatggaatcccatactcccaatatgtgtacgaactaacgaaaaatttgatccagtggatgatggtcccgacgatgagacagatttgagcaaactctcgaaagacgttgtacaatatgaacaagaaatagaatcgttagaagcaacttatcatataatcatagtggcgttgacaattatgggcgtcatatttttaatctccgttatagtattagtttgttcctgtgacaaaaataatgaccaatataagttccataaattgctaccgtaaatataaatccgttaaaataattaataatttaataacaaacaagtatcaaaagattaaagacttatagctagaatcaattgagatgtcttcttcagtggatgttgatatctacgatgccgttagagcatttttactcaggcactattataacaagagatttattgtgtatggaagaagtaacgccatattacataatatatacaggctatttacaagatgcgccgttataccgttcgatgatatagtacgtactatgccaaatgaatcacgtgttaaacaatgggtgatggatacacttaatggtataatgatgaatgaacgcgatgtttctgtaagcgttggcaccggaatactattcatggaaatgtttttcgattacaataaaaatagtatcaacaatcaactaatgtatgatataattaatagcgtatctataattctagctaatgagagatatagaagcgcttttaacgacgatggtatatacatccgtagaaatatgattaacaagttgtacggatacgcatctctaactactattggcacgatcgctggaggtgtttgttattatctgttgatgcatctagttagtttgtataaataattatttcaatatactagttaaaattttaagattttaaatgtataaaaaactaataacgtttttatttgtaataggtgcattagcatcctattcgaataatgagtacactccgtttaataaactgagtgtaaaactctatatagatggagtagataatatagaaaattcatatactgatgataataatgaattggtgttaaattttaaagagtacacaatttctattattacagagtcatgcgacgtcggatttgattccatagatatagatgttataaacgactataaaattattgatatgtataccattgactcgtctactattcaacgcagaggtcacacgtgtagaatatctaccaaattatcatgccattatgataagtacccttatattcacaaatatgatggtgatgagcgacaatattctattactgcagagggaaaatgctataaaggaataaaatatgaaataagtatgatcaacgatgatactctattgagaaaacatactcttaaaattggatctacttatatatttgatcgtcatggacatagtaatacatattattcaaaatatgatttttaaaaatttaaaatatattatcacttcagtgacagtagtcaaataacaaacaacaccatgagatatattataattctcgcagttttgttcattaatagtatacatgctaaaataactagttataagtttgaatccgtcaattttgattccaaaattgaatggactggggatggtctatacaatatatcccttaaaaattatggcatcaagacgtggcaaacaatgtatacaaatgtaccagaaggaacatacgacatatccgcatttccaaagaatgatttcgtatctttctgggttaaatttgaacaaggcgattataaagtggaagagtattgtacgggactatgcgtcgaagtaaaaattggaccaccgactgtaacattgactgaatacgacgaccatatcaatttgtacatcgagcatccgtatgctactagaggtagcaaaaagattcctatttacaaacgcggtgacatgtgtgatatctacttgttgtatacggctaacttcacattcggagattctaaagaaccagtaccatatgatatcgatgactacgattgcacgtctacaggttgcagcatagactttgtcacaacagaaaaagtgtgcgtgacagcacagggagccacagaagggtttctcgaaaaaattactccatggagttcgaaagtatgtctgacacctaaaaagagtgtatatacatgcgcaattagatccaaagaagatgttcccaatttcaaggacaaaatggccagagttatcaagagaaaatttaatacacagtctcaatcttatttaactaaatttctcggtagcacatcaaatgatgttaccacttttcttagcatgcttaacttgactaaatattcataactaatttttattaatgatacaaaaacgaaataaaactgcatattatacactggttaacgcccttataggctctaaccattttcaagatgaggtccctgattatagtccttctgttcccctctatcatctactccatgtctattagacgatgtgagaagactgaagaggaaacatggggattgaaaatagggttgtgtataattgccaaagatttctatcccgaaagaactgattgcagtgttcatctcccaactgcaagtgaaggattgataactgaaggcaatggattcagggatatacgaaacaccgataaattataaaaaaagcaatgtgtccgctgtttccgttaataatactattttcgtaactggcggattattcataaataactctaatagcacgatcgtggttaacaatatggaaaaacttgacatttataaagacaaacaatggtcgattatagaaatgcctatggctagggtatatcacggcattgactcgacatttggaatgttatattttgccggaggtctatccgttaccgaacaatatggtaatttagagaaaaacaacgagatatcttgttacaatcctagaacgaataagtggtttgatatttcatatactatttataagatatccatatcatcattgtgtaaactaaataacgtcttctatgtatttagtaaggacattggatatgtggaaaagtatgatggtgcatggaagttagtacatgatcgtctccccgctataaaggcattatcaacttctccttattgattgaaaatgaaaatataaatagtttttatgtatagcagtattaccctatagttttattgcttactactaacatggatacagatgttacaaatgtagaagatatcataaatgaaatagatagagagaaagaagaaatactaaaaaatgtagaaattgaaaataataaaaacattaacaagaatcatcccaatgaatatattagagaagcactcgttattaataccagtagtaatagtgattccattgataaagaagttatagaatgtatcagtcacgatgtaggaatatagatcatatctactaatttttataatcgatacaaaacataaaaaacaactcgttattacatagcaggcatggaatccttcaagtattgttttgataacgatggcaagaaatggattatcggaaatactttatattctggtaattcaatactatataaggtcagaaaaaatttcactagttcgttctacaattacgtaatgaagatagatcacaaatcacacaagccattgttgtctgaaatacgattctatatatctgtattggatcctttgactatcgacaactggacacgggaacgtggtataaagtatttggctattccagatctgtatggaattggagaaaccgatgattatatgttcttcgttataaagaattcgggaagagtattcgccccaaaggatactgaatcagtcttcgaagcatgcgtcactatgataaacacgttagagtttatacactctcaaggatttacccatggaaaaatagaaccgaggaatatactgattagaaataaacgtctttcactaattgactattctagaactaacaaactatacaagagtggaaactcacatatagattacaacgaggacatgataacttcaggaaatatcaattatatgtgtgtagacaatcatcttggagcaacagtttcaagacgaggagatttagaaatgttgggatattgcatgatagaatggttcggtggcaaacttccatggaaaaacgaaagtagtataaaagtaataaaacaaaaaaaagaatataaaaaatttatagctactttctttgaggactgttttcctgaaggaaatgaacctctggaattagttagatatatagaattagtatacacgttagattattctcaaactcctaattatgacagactacgtaaactgtttatacaagattgaaattatattcttttttttatagagtgtggtagtgttacggatatctaatattaatattagactatctctatcgcgctacacgaccaatatcgattactatggatatcttctatgaaaggagagaatgtatttatttctccagcgtcaatctcgtcagtattgacaatactgtattatggagctaatggatccactgctgaacagctatcaaaatatgtagaaacggaggagaacacggataaggttagcgctcagaatatctcattcaaatccatgaataaagtatatgggcgatattctgccgtgtttaaagattcctttttgagaaaaattggcgataagtttcaaactgttgacttcactgattgtcgcactatagatgcaatcaacaagtgtgtagatatctttactgaggggaaaatcaatccactattggatgaaccattgtctcctagcaattagtgccgtatactttaaagcaaaatggttgacgccattcgaaaaggaatttaccagtgattatcccttttacgtatctccgacggaaatggtagacgtaagtatgatgtctatgtacggcaaggcatttaatcacgcatctgtaaaagaatcattcggcaacttttcaatcatagaactgccatatgttggagatactagtatgatggtcattcttccagacaagattgatggattagaatccatagaacaaaatctaacagatacaaattttaagaaatggtgtgactttatggatgctatgtttatagatgttcacattcccaagtttaaggtaacaggctcgtataatctggtggatactctagtaaagtcaggactgacagaggtgttcggttcaactggagattatagcaatatgtgtaatttagatgtgagtgtcgacgctatgatccacaaaacgtatatagatgtcaatgaagagtatacagaagcagctgcagcaacttctgtactagtggcagactgtgcatcaacaattacaaatgagttctgtgcagatcatccgttcatctatgtgattaggcatgttgatggaaaaattcttttcgttggtagatattgctctccgacaactaattgttaaccattttttttaaaaaaaatagaaaaaacatgtggtattagtgcaggtcgttgttcttccaattgcaattggtaagatgacggccaactttagtacccacgtcttttcaccacagcactgtggatgtgacagactgaccagtattgatgacgtcaaacaatgtttgactgaatatatttattggtcgtcctatgcataccgcaacaggcaatgcgctggacaattgtattccacactcctctcttttagagatgatgcggaattagtgttcatcgacattcgcgagctggtaaaaaatatgccgtgggatgatgtcaaagattgtacagaaatcatccgttgttatataccggatgagcaaaaaaccatcagagagatttcggccatcatcggactttgtgcatatgctgctacttactggggaggtgaagaccatcccactagtaacagtctgaacgcattgtttgtgatgcttgagatgctaaattacgtggattataacatcatattccggcgtatgaattgatgagttgtacatcttgacattttctttcttctcttctccctttcttctcttctcccttcctccctcttctccctttcccagaaacaaacttttttacccactataaaataaaatgagtatactacctgttatatttctttctatatttttttattcttcattcgttcagacttttaacgcgcctgaatgtatcgacaaagggcaatattttgcatcattcatggagttagaaaacgagccagtaatcttaccatgtcctcaaataaatacgctatcatccggatataatatattagatattttatgggaaaaacgaggagcggataatgatagaattataccgatagataatggtagcaatatgctaattctgaacccgacacaatcagactctggtatttatatatgcattaccacgaacgaaacctactgtgacatgatgtcgttaaatttgacaatcgtgtctgtctcagaatcaaatatagattttatctcgtatccacaaatagtaaatgagagatctactggcgaaatggtatgtcccaatattaatgcatttattgctagtaacgtaaacgcagatattatatggagcggacatcgacgccttagaaataagagacttaaacaacggacacctggaattattaccatagaagatgttagaaaaaatgatgctggttattatacatgtgttttagaatatatatacggtggcaaaacatataacgtaaccagaattgtaaaattagaggtacgggataaaataataccttctactatgcaattaccagatggcattgtaacttcaataggtagtaatttgactattgcatcgttgagacctcccacaacggatgcagacgtcttttggataagtaatggtatgtattacgaagaagatgatggggacggaaacggtagaataagtgtagcaaataaaatctatatgaccgataagagacgtgttattacatcccggttaaacattaatcctgtcaaggaagaagatgctacaacgtttacgtgtatggcgtttactattcctagcatcagcaaaacagttactgttagtataacgtgaatgtatgttgttacatttccatgtcaattgagtttataagaatttttatacattatcttccaacaaacaattgacgaacgtattgctatgattaactcccacgatactatgcatattattaatcattaacttgcagactatacctagtgctattttgacatactcatgttcttgtgtaattgcggtatctatattattaaagtacgtaaatctagctatagttttattatttaattttagataatataccgtctccttatttttaaaaattgccacatcctttattaaatcatgaatgggaatttctatgtcatcgttagtatattgtgaacaacaagagcagatatctataggaaagggtggaatgcgatacattgatctatgtagttttaaaacacacgcgaactttgaagaatttatataaatcattccatcgatacatccttctatgttgagatgtatatatccaggaattcgtttattaatatcgggaaatgtataaactaaaacattgcccgaaagcggtgcctctatctgcgttatatccgttcttaacttacaaaatgtaaccaatacctttgcatgacttgttttgttcggcaacgttagtttaaacttgacgaatggattaattacaatagcatgatccgcgcatctattaagtttttttactttaacgcccttgtatgtttttacagagactttatctaaatttctagtgcttgtatgtgttataaatataacgggatatagaaccgaatcacctaccttagatacccaattacattttatcagatccagataataaacaaattttgtcgccctaactaattctatattgttatatattttacaattggttatgatatcatgtaataacttggagtctaacgcgcatcgtcgtacgtttatacaattgtgatttagtgtagtatatctacacatgtatttttccgcactatagtattctggactagtgataaaactatcgttatatctatcttcaatgaactcatcgagatattgctctctgtcatattcatacacctgcataaactttctagacatcttacaatccgtgttattttaggatcatatttacatatttacgggtatatcaaagatgttagattagttaatgggaatcgtctataataatgaatattaaacaattatatgaggacttttaccacaaagcatcataaaaatgagtcgtcgtctgatttatgttttaaatatcaaccgcaaatcaactcataaaatacaagagaatgaaatatatacatattttagtcattgcaatatagaccatacttctacagaacttgattttgtagttaaaaactatgatctaaacagacgacaacctgtaactgggtatactgcactacactgctatttgtataataattactttacaaacgatgtactgaagatattattaaatcatggagtggatgtaacgatgaaaaccagtagcggacgtatgcctgtttatatattgcttactagatgttgtaatatttcacatgatgtagtgatagatatgatagacaaagataaaaaccacttattacatagagactattccaacctattactagagtatataaaatctcgttacatgttattaaaggaagaggatatcgatgagaacatagtatccactttattagataagggaatcgatcctaactttaaacaagacggatatacagcgttacattattattatttgtgtctcgcacacgtttataaaccaggtgagtgtagaaaaccgataacgataaaaaaggccaagcgaattatttctttgtttatacaacatggagctaatctaaacgcgttagataattgtggtaatacaccattccatttgtatcttagtattgaaatgtgtaataatattcatatgactaaaatgctgttgacttttaatccgaatttcgaaatatgtaataatcatggattaacgcctatactatgttatataacttccgactacatacaacacgatattcttgttatgttaatacatcactatgaaacaaatgttggagaaatgccgatagatgagcgtcgtatgatcgtattcgagtttatcaaaacatattctacacgtccggcagattcgataacttatttgatgaataggtttaaaaatataaatatttatacccgctatgaaggaaagacattattacacgtagcatgtgaatataataatacacacgtaatagattatcttatacgtatcaacggagatataaatgcgttaaccgacaataacaaacacgctacacaactcattatagataacaaagaaaattccccatataccattaattgtttactgtatatacttagatatattgtagataagaatgtgataagatcgttggtggatcaacttccatctctacctatcttcgatataaaatcatttgagaaattcatatcctactgtatacttttagatgacacattttacgataggcacgttaagaatcgcgattctaaaacgtatcgatacgcattttcaaaatacatgtcgtttgataaatacgatggtataataactaaatgtcacgacgaaacaatgttactcaaactgtccactgttctagacactacactatatgcagttttaagatgtcataattcgagaaagttaagaagatacctcaacgagttaaaaaaatataataacgataagtcctttaaaatatattctaatattatgaatgagagataccttaatgtatattataaagatatgtacgtgtcaaaggtatatgataaactatttcctgttttcacagataaaaattgtctactaacattactaccttcagaaattatatacgaaatattatacatgctgacaattaacgatctttataatatatcgtatccacctaccaaagtatagttgtatttttctcatgcgatgtgtgtaaaaaaactgatattatataaatattttagtgccgtataataaagatgacgatgaaaatgatggtacatatatatttcgtatcattattgttattgctattccacagttacgccatagacatcgaaaatgaaatcacagaattcttcaataaaatgagagatactctaccagctaaagactctaaatggttgaatccagcatgtatgttcggaggcacaatgaatgatatagccgctctaggagagccattcagcgcaaagtgtcctcctattgaagacagtcttttatcgcacagatataaagactatgtggttaaatgggagaggctagaaaagaatagacggcgacaggtttctaataaacgtgttaaacatggtgatttatggatagccaactatacatctaaattcagtaaccgtaggtatttgtgcaccgtaactacaaagaatggtgactgtgttcagggtatagttagatctcatattaaaaaacctccttcatgcattccaaaaacatatgaactaggtactcatgataagtatggcatagacttatactgtggaattctttacgcaaaacattataataatataacttggtataaagataataaggaaattaatatcgacgacattaagtattcacaaacgggaaaggaattaattattcataatccagagttagaagatagcggaagatacgactgttacgttcattacgacgacgttagaatcaagaatgatatcgtagtatcaagatgtaaaatacttacggttataccgtcacaagaccacaggtttaaactaatactagatccgaaaatcaacgtaacgataggagaacctgccaatataacatgcactgctgtgtcaacgtcattattgatcgacgatgtactgattgaatgggaaaatccatccggatggcttataggattcgattttgatgtatactctgttttaactagtagaggcggtatcaccgaggcgaccttgtactttgaaaatgttactgaagaatatataggtaatacatataaatgtcgtggacacaactattattttgaaaaaacccttacaactacagtagtattggagtaaatacacaatgcatttttatatacattactgaattattattactgaattattattactgaattattattaattatatcgtatttgtgctatagaatggatgaagatacgcgactatctaggtatttgtatctcaccgatagagaacatataaatgtagactctattaaacagttgtgtaaaatatcagatcctaatgcatgttatagatgtggatgtacggctttacatgagtacttttataattatagatcagtcaacggaaaatacaagtatagatacaacggttactatcaatattattcatctagcgattatgaaaattataatgaatattattatgatagaactggtatgaacagtgagagtgataatatatcaatcaaaacagaatatgaattctatgatgaaacacaagatcaaagtacacaactagtaggttacgacattaaactcaaaaccaatgaggatgattttatggctatgatagatcagtgggtgtccatgattatatagatgaatcaattaataaagtagtatatggaagagagtctcacgtaagatggcgggatatatggcaagaacataatgatggcgtatacagtataggaaaggagtgcatagataatatatacgaagacaaccataccgtagacgaattctacaagatagacagcgtatcagatgtagatgacgcggaacacatatctcctataactaatgatgtatctacacaaacatgggaaaagaaatcagagttagatagatacatggaatcgtatcctcgtcatagatatagtaaacattctgtatttaagggattttctgataaagttagaaaaaatgatttagacatgaatgtggtaaaagaattactttctaacggtgcatctctaacaatcaaggatagcagtaataaggatccaattgctgtttattttagaagaacgataatgaatttagaaatgattgatattattaacaaacatacaactattgatgaacgaaagtatatagtacactcctatctaaaaaattatagaaatttcgattatccatttttcaggaagttagttttgactaataaacattgtctcaacaattattataatataagcgacagcaaatatggaacaccgctacatatattggcgtctaataaaaaattaataactcctaattacatgaagttattagtgtataacggaaatgatataaacgcacgaggtgaagatacacaaatgcgaaccaactcagaaatggttgttgtattattgggtgtataggtattattagctatgtaccaatttaccaaccctcttaatattgattgataatcacatcggttatccaatcaataactaaattgtagtgtatatatagaccatatatgtttctatttttttgacagttacgtatagtttcagtaagttttgattgttgtattcctgtatctctagataagttagtcatatagtcccttccggcgatacgttttttccaagcccgaaattgattagccaaatgtgtatttatttttgtgatattgatataatatttcggataatgcatactgttagtcttatatcatttggttcatctatgtattgtaatattgttacatgatctatagatgatgtattgattttggcaggatcgaattccatatccgcgactaaacagtgaaaaaaatgtaaatactttttaaattttaaattagtaaaacttttttttattttttatgattccaaaaatactgaatacaaagtcctaaattataaatatggagatcatactaccacaacttattattatgtatacaaggccggtgtaatagatagatatatataattctattacaccggcagacaattaccgaccggtatttgtcgttaccaacataccgtataatatgtaatatacaattccataacccattgacagttgttatacatcaaaattgcaattcttttgattacgatgttataagaatgtagttaattgatgtatgatgttaatgtgtcctctttcctcttataacatcgtaatcaaaaacttttttataatatatacctaataatgtgtcttaatagttctcgtgattcgtcaaacaatcattcttataaaatataataaagcaacgtaaaacacataaaaataagcgtaactaataagacaatggatatttacgacgataaaggtctacagactattaaactgtttaataatgaatttgattgtataaggaatgacatcagagaattatttaaacatgtaactgattccgatagtatacaacttccgatggaagacaattctgatattatagaaaatatcagaaaaatactatatagacgattaaaaaatgtagaatgtgttgacatcgataacacaataacttttatgaaatacgatccaaatgatgataataagcgtacgtgttctaattgggtacccttaactaataactatatggaatattgtctagtaatatatttggaaacaccgatatgtggaggcaaaataaaattataccaccctacaggaaatataaagtcggataaggatattatgtttgcaaagactctagactttaaatcaacgaaagtgttaactggacgtaaaacaattgccgttctagacatatccgtttcatataatagatcaatgactactattcactacaacgacgacgttgatatagatatacatactgataaaaatggaaaagagttatgttattgttatataacaatagatgatcattacttggttgatgtggaaactataggagttatagtcaatagatctggaaaatgtctgttagtaaataaccatctaggtataggtatcgttaaagataaacgtataagcgatagttttggagatgtatgtatggatacaatatttgacttttctgaagcacgagagttattttcattaactaatgatgataacaggaatatagcatgggacactgataaactagacgatgatacagatatatggactcccgtcacagaagatgattacaaatttctttctagactagtattgtatgcaaaatctcaatcggatactgtatttgactattatgttcttactggtgatacggaaccacccactgtattcattttcaaggtaactagattttactttaatatgccgaaataaaaaatttttgtataatatctagaggtagaggtattgtttagataaatacaaataacatagatacatcgcatacttagcatttttataaatatacataagacatacactttatacatttttgtaaaaatactcataaaaaaaatttataaaaattatggcacaaccatatcttgtataggtagtttagttcgtcgagtgaacctataaacagataatagacaacacataataatgcctactaatacaagcataataccgggagatgggatatatgacgttgtagtgtttgggttttctgaacgttgatagtctactaatactacatgctgacatctaatgcctgtataaccatgagagcatctacaatacataccgtcaatatctctagcgtggatacagtcaccgtgtaaacaatatccatctccctctggaccgcataatctgatagctggaatatctgttgtagcgtttgtaatttctggcaatgtcgtttcgatagcgttaccactatcggcgaatgatctgattatcatagcagcgaacaacaacatcagataatttatcaacatttttgatggattctgtgtttatgctgtttctcagtgtgtgtttatgacaagattgggaattttatattattaattcagtaatataaactaataatatattgttaattgtgtaaataatataaaaataacaatacaatattgaatgtgttgctgttaaaaatgtatgtgttaatataatagaataaaataaatgagtatgatcattttagataacgattgattttatcattaccgcttcattcttatattctttgcttacggaacctatatttagaaacatctactaacaattttttatgcttgcattattaatggtatgtaatatgattgattgtgtacgcaataccaatttgttaagtatgaatacggggtacaaacataaattgaaatttaacattatttatttatgatatatatcgttatcgttaggtctataccatggatatctttaaagaactaatcttaaaacaccctgatgaaaatgttttgatttctccagtttccattttatctactttatctattctaaatcatggagcagctggttctacagctgaacaactatcaaaatatatagagaatatgaatgagaatacacccgatgacaataatgatgacatggaggtagatattccgtattgtgcgacactagctaccgcaaataaaatatacggtagcgatagtatcgagttccacgcctccttcctacaaaaaataaaagacgattttcaaactgtaaactttaataatgctaaccaaacaaaggaactaatcaacgaatgggttaagacaatgacaaatggtaaaattaattccttattgactagtccgctatccattaatactcgtatgacagttgttagcgccgtccattttaaagcaatgtggaaatatccattttctaaacatcttacatatacagacaagttttatatttctaagaatatagttaccagcgttgatatgatggtgggtaccgagaataacttgcaatatgtacatattaatgaattattcggaggattctctattatcgatattccatacgagggaaactctagtatggtaattatactaccggacgacatagaaggtatatataacatagaaaaaaatataacagatgaaaaatttaaaaaatggtgtggtatgttatctactaaaagtatagacttgtatatgccaaagtttaaagtggaaatgacagaaccgtataatctggtaccgattttagaaaatttaggacttactaatatattcggatattatgcagattttagcaagatgtgtaatgaaactatcactgtagaaaaatttctacatacgacgtttatagatgttaatgaggagtatacagaagcatcggccgttacaggagtatttacgattaacttttcgatggtatatcgtacgaaggtctacataaaccatccattcatgtacatgattaaagacaccacaggacgtatactttttatagggaaatactgctatccgcaataaatataaacaaatagacttttataaagagtcttcaacgataagtatatcgacatactacttatgctgcgaaagattctgaacgagaacgactatctcaccctcttggatcatatccgcactgctaaatactaaatctccactacactttttatcatcttatgaggaatgattgccttcgtgaaataggaataattagcaccagaatagctatggattattgtggtagagagtgcactattctatgtcgtctactggatgaagatgtgacgtacaaaaaaataaaactagaaattgaaacgtgtcacaacttatcaaaacatatagatagacgaggaaacaatgcgctacattgttacgtctccaataaatgcgatacagacattaagattgttctctcgcggagtcgagagactttgtagaaacaacgaaggattaactccgctaggagtatacagtaagcatagatacgtcaaatctcagattgtgcatctactgatatccagctattcaaattcctctaacgaactcaagtcgaatataaatgatttcgatctgtattcggataatatcgacttacgtctgctaaaatacctaattgtggataaacggatacgtccgtccaagaatacgaattatgcaatcaatggtctcggattggtggatatatacgtaacgacgcctaatccgagaccagaagtattgctatggcttcttaaatcagaatgttacagcaccggttacgtatttcgtacctgtatgtacgacagtgatatgtgtaagaactctcttcattactatatatcgtctcatagagaatctcaatctctatccaaggatgtaattaaatgtttgatcgataacaatgtttccatccatggcagagacgaaggaggatctttacccatccaatactactggtctttctcaaccatagatatagagattgttaaattattattaataaaggatgtggacacgtgtagagtatacgacgtcagccctatattatctaaacaagcgatttagagtaaccccatataatgtagacatggaaatcgttaatcttcttattgagagacgtcatactcttgtcgacgtaatgcgtagtattacttcgtacgattccagagaatataaccactacatcatcgataacattctaaagagatttagacaacaggatgtacaagccatgttgataaactacttacattacggcgatatggtcgttcgatgcatgttagataacggacaacaactatcctctgcacgactactttgttaataataatctcgtcgatgtaaacgtcgtaaggtttatcgtggaaaatatggacacgcggctgtaaatcacgtatcgaacaatggccgtctatgtatgtacggtctgatattatcgagatttaataattgcgggtatcactgttatgaaaccatactgatagatgtatttgatatactaagcaagtacatggatgatatagatatgatcgataactctactatattacgcggtcgatgtcaataatatacaatttgcaaagcggttattggaatatggagcgagtgtcacgctcgataatcaatacggccatccagaaaagcagttaccaaagagaaaacaaaacgaagctagttgatttattactgagttaccatcccactctagagactatgattgacgcatttaatagagatatacgctatctatatcctgaaccattattcgcctgtatcagatacgccttaatcctagatgatgattttccttctaaagtaaagtatgatatcgccggtcgtcataaggaactaaagcgctatagagtagacattaatagaatgaagaatgtctacatatcaggcgtctccatgtttgatatattatttaaacgaagcaaacgccacaaattgagatacgcaaagaatccgacatcaaatggtacaaaaaagaactaacgtccatcattacagaaactgtaaagaacaatgagaggatcgactccatagtggacaacattaatacagacgataacttgatttcgaaattacccatggagatactttattactccattaaataatttatcatggagcgataatgtcctgtttcatttgtttccatgacatattacaaaatcgattccgtccaagatgataaaaacatttaccggcatcataaacacggagtttattttatatgtctcgcataaacattactaaaaaaatatattgttcggttttctttcacatctttaattatgaaaaagtaaatcattatgagatggacgagattgtacgcatcgttcgcgacagtatgtggtacatacctaacgtatttatggacgacggtaagaatgaaggtcacgtttctgtcaacaatgtctgtcatatgtattttacgttctttgatgtggatacatcgtctcatctgtttaagctagttattaaacactgcgatctgaataaacgaggtaactctccattacattgctatacgatgaatacacgatttaatccatctgtattaaagatattgttacaccacggcatgcgtaactttgatagcaaggatgaccactatcaatcgataacaagatctttgatatactaacggacaccattgatgactttagtaaatcatccgatctattgctgtgttatcttagatataaattcaatgggagcttaaactattacgttctgtacaaaggatccgaccctaattgcgccgacgaggatgaactcacttctcttcattactactgtaaacacatatccacgttctacgaaagcaattattacaagttaagtcacactaagatgcgagccgagaagcgattcatctacgcgataatagattatggagcaaacattaacgcggttacacacttaccttcaacagtataccaaacatagtcctcgtgtggtgtatgctcttttatctcgaggagccgatacgaggatacgtaataatcttgattgtacacccatcatggaacgattgtgcaacaggtcatattctcataatgttactcaattggcacgaacaaaaggaagaaggacaacatctactttatctattcataaaacataatcaaggatacactctcaatatactacggtatctattagataggttcgacattcagaaagacgaatactataataccgcctttcaaaattgtaacaacaatgttgcctcatacatcggatacgacatcaaccttccgactaaagacggtattcgacttggtgtttgaaaacagaaacatcatatacaaggcggatgttgtgaatgacatcatccaccacagactgaaagtatctctacctatgattaaatcgttgttctacaagatgtctctccctacgacgattactacgtaaaaaagatactagcctactgcctattaagggacgagtcattcgcggaactacatagtaaattctgtttaaacgaggactataaaagtgtatttatgaaaaatatatcattcgataagatagattccatcatcgtgacataagtcgccttaaagagattcgaatctccgacaccgacctgtatacggtatcacagctatcttaaagccatacattcagacagtcacatttcatttcccatgtacgacgatctcatagaacagtgccatctatcgatggagcgtaaaagtaaactcgtcgacaaagcactcaataaattagagtctaccatcggtcaatctagactatcgtatttgcctccggaaattatgcgcaatatcatctaaacagtatgttgtacggaaagaaccattacaaatattatccatgatagaaagaaaatatctatatgattggagaagtaggaaacaggaacaagacgacgattactacattattaaatcatgaagtccgtattatactcgtatatattgtttctctcatgtataataataaacggaagagatatagcaccgcatgcaccatccgatggaaagtgtaaagacaacgaatacaaacgccataatttgtgtccgggaacatacgcttccagattatgcgatagcaagactaacacacaatgtacgccgtgtggttcgggtaccttcacatctcgcaataatcatttacccgcttgtctaagttgtaacggaagacgcgatcgtgtaacacgactcacaatagaatctgtgaatgctctcccggatattattgtcttctcaaaggatcatccggatgcaaggcatgtgtttcccaaacaaaatgtagaataggatacggagtatccggagacgtcatctgttctccgtgtggtctcggaacatattctcacaccgtctcttccgcagataaatgcgaacccgtacccagtaatacctttaactatatcgatgtggaaattaacctgtatcccgtcaacgacacgtcgtgtactcggacgaccactaccggtctcagcgaatccatctcaacgtcggaactaactattactatgaatcataaagactgtaatcccgtctttcgtgatggatacttctccgttcttaataaggtagcgacttcaggtttctttacaggagaaaggtgtgcactctgaatttcgagattaaatgcaataacaaagattcttcctccaaacagttaacgaaagcaaagaatgatactatcatgccgcattcggagacagtaactctagtgggcgacatctatatactatatagtaataccaatactcaagactacgaaactgatacaatctcttatcatgtgggtaatgttctcgatgtcgatagccatatgcccggtagttgcgatatacataaactgatcactaattccaaacccacccactttttatagtaagtttttcacccataaataataaatacaataattaatttctcgtaaaagtagaaaatatattctaatttattgcacggtaaggaagtagaatcataaagaacagtactcaatcaatagcaattatgaaacaatatatcgtcctggcatgcatgtgcctggcggcagctgctatgcctgccagtcttcagcaatcatcctcatcctcctcctcgtgtacggaagaagaaaacaaacatcatatgggaatcgatgttattatcaaagtcacaaagcaagaccaaacaccgaccaatgataagatttgccaatccgtaacggaaattacagagtccgagtcagatccagatcccgaggtggaatcagaagatgattccacatcagtcgaggatgtagatcctcctaccacttattactccatcatcggtggaggtctgagaatgaactttggattcaccaaatgtcctcagattaaatccatctcagaatccgctgatggaaacacagtgaatgctagattgtccagcgtgtccccaggacaaggtaaggactctcccgcgatcactcatgaagaagctcttgctatgatcaaagactgtgaagtgtctatcgacatcagatgtagcgaagaagagaaagacagcgacatcaagacccatccagtactcgggtctaacatctctcataagaaagtgagttacgaagatatcatcggttcaacgatcgtcgatacaaaatgcgtcaagaatctagagtttagcgttcgtatcggagacatgtgcaaggaatcatctgaacttgaggtcaaggatggattcaagtatgtcgacggatcggcatctgaaggtgcaaccgatgatacttcactcatcgattcaacaaaactcaaagcgtgtgtctgaatcgataactctattcatctgaaattggatgagtagggttaatcgaacgattcagacacaccacgaattaaaaaagtgtaccggacactatattccggtttgcaaaacaaaaatgttcttaactacattcacaaaaagttacctctcgcgacttcttctttttctgtctcaatagtgtgatacgattatgacactattcctattcctattcctatttcctttcagagtatcacaaaaatattaaacctctttctgatggtctcataaaaaaagttttacaaaaatatttttattctctttctctctttgatggtctcataaaaaaagttttacaaaaatatttttattctctttctctctttgatggtctcataaaaaaagttttacaaaaatatttttattctctttctctctttgatggtctcataaaaaaagttttacaaaaatatttttattctctttctctctttgatggtctcataaaaaaagttttacaaaaatatttttattctctttctctctttgatggtctcataaaaaaagttttacaaaaatatttttattctctttctctctttgatggtctcataaaaaaagttttacaaaaatatttttattctctttctctctttgatggtctcataaaaaaagttttacaaaaatatttttattctctttctctctttgatggtctcataaaaaaagttttacaaaaatatttttattctctttctctctttgatggtctcataaaaaaagttttacaaaaatatttttattctctttctctctttgatggtctcataaaaaaagttttacaaaaatatttttattttctttctctctttgatggtctcataaaaaatattaaacctctttctgatggtgtcactaaaatatttttattctcattctcattttctctttctctcttcaatggagtcataaaatatttttattctctttctctcttcgatggtctcacaaaaatattaaacctctttctgatggtgtcactaaaatatttttattctcattctcattttctttttctctcttcaatggagtcataaaatatttttattctctttctctcttcgatggtctcacaaaaatattaaacctctttctgatggagtcgtaaaaaagttttatctctttctctcttcgatggtctcactaaaatattttttattctctttctgatgcatcaactatttcttaaacaataacgtccaacaacatatactcgtcgagcttatcaacatcccctatgcccatctaggttaccagacaattgtatatcataaaataatgtttataatttacacgttaaaatcatataataaaacgtagatcgtataatattttttggtatataaatgatctagtaaaatccatgtaggggatactgctcacattttttctttggtacaaaatttcacacaagtttttatacagacaaattcttgtccatatattttaaaacattgacttttgtactaagaaaaatatctagactaactatctc

SEQ ID NO: 57 - DNA, 187653 bp, Vaccinia virus
  LIVP 4.1.1 strain
agaaagagaataaaaatatttttgtaaaactttttttatgagaccatcaaagagagaaagagaataaaaatatttttgtaaaactttttttatgagaccatcaaagagagaaagagaataaaaatatttttgtaaaactttttttatgagaccatcaaagagagaaagagaataaaaatatttttgtaaaactttttttatgagaccatcaaagagagaaagagaataaaaatatttttgtaaaactttttttatgagaccatcaaagagagaaagagaataaaaatatttttgtaaaactttttttatgagaccatcaaagagagaaagagaataaaaatatttttgtaaaactttttttatgagaccatcaaagagagaaagagaataaaaatatttttgtaaaactttttttatgagaccatcaaagagagaaagagaataaaaatatttttgtaaaactttttttatgagaccatcagaaagaggtttaatatttttgtgatactctgaaaggaaataggaataggaataggaatagtgtcataatcgtatcacactattgagacagaaaaagaagaagtcgcgagaggtaactttttgtgaatgtagttaagaacatttttgttttgcaaaccggaatatagtgtccggtacacttttttaattcgtggtgtgcctgaatcgttcgattaaccctactcatccaatttcagatgaatagagttatcgattcagacacacgctttgagttttgttgaatcgatgagtgaagtatcatcggttgcaccttcagatgccgatccgtcgacatacttgaatccatccttgacctcaagttcagatgattccttgcacatgtctccgatacgaacgctaaactctagattcttgacgcattttgtatcgacgatcgttgaaccgatgatatcttcgtaactcactttcttatgagagatgttagacccgagtactggatgggtcttgatgtcgctgtctttctcttcttcgctacatctgatgtcgatagacacttcacagtctttgatcatagcaagagcttcttcatgagtgatcgcgggagagtccttaccttgtcctggggacacgctggacaatctagcattcactgtgtttccatcagcggattctgagatggatttaatctgaggacatttggtgaatccaaagttcattctcagacctccaccgatgatggagtaataagtggtaggaggatctacatcctcgactgatgtggaatcatcttctgattccacctcgggatctggatctgactcggactctgtaatttccgttacggattggcaaatcttatcattggtcggtgtttggtcttgctttgtgactttgataataacatcgattcccatatgatgtttgttttcttcttccgtacacgaggaggaggatgaggatgattgctgaagactggcaggcatagcagctgccgccaggcacatgcatgccagtacgatatattgtttcataattgctattgattgagtactgttctttatgattctacttccttaccgtgcaataaattagaatatattttctacttttacgagaaattaattattgtatttattatttatgggtgaaaaacttactataaaaagtgggtgggtttggaattagtgatcagtttatgtatatcgcaactaccgggcatatggctatcgacatcgagaacattacccacatgataagagattgtatcagtttcgtagtcttgagtattggtattactatatagtatatagatgtcgcccactagagttactgtctccgaatgcggcatgatagtatcattctttgctttcgttaactgtttggaggaagaatctttgttattgcatttaatctcgaaattcagagtgcacacctttctcctgtaaagaaacctgaagtcgctaccttattaagaacggagaagtatccatcacgaaatacgggattacagtctttatgattcatagtaatagttagttccgacgttgagatggattcgctgagaccggtagtggtcgtccgagtacacgacgtgtcgttaactggatacaggttaatttccacatcgatatagttaaacgtatttctgggtacgggttcgcatttatctgcggaagagacggtgtgagaatatgttccgagaccacacggagaacagatgacgtctccggatactccgtatcctattccacattttgtttgggaaacacatgccttgcatccggatgatcctttgagaagacaataatatccgggagagcattcacagattctattgtgagtcgtgttacacgatcgcgtcttccgttacaacttagacaagcgggtaaatgattattgcgagatgtgaaggtacccgaaccacacggcgtacatcgtgtgttagtcttgctatcgcataatctggaagcgtatgttcccggacacagattatggcgtttgtattcgttgtctttacactttccatcggatggtgcatgcggtgctatatctcttccgtttattattatacatgagagaaacaatatatacgagtataatacggacttcataatttaataatgtagtaatcgttgtcttgttcctgtttcctacttctccaatcatggataatatttgtaatggttctttccgtacaacatactgtttagatgatattgcgcataatttccggaggcaaatacgatagtctagattggccatcgatggtagactctaatttattgagtgctttgtcgacgagtttcgatagatggcactgttctatgagatcgtcgtacatgggaaatgaaatgtgactgtctgaatgtatggctttaagatagctgtgataccgtatacaggtcggtgtcggagattcgaatctctttgaggcgacttatgtcacgatgatggaatctatcttatcgaatgatatatttttcataaatacacttttatagtcctcgtttaaacagaatttactatgtagttccgcgaatgactcgtcccttaataggcagtaggctagtatcttttttacgtagtaatcgtcgtagggagagacatcttgtagaacaacgatttaatcataggtagagatactttcagtctgtggtggatgatgtcattcacaacatccgccttgtatatgatgtttctgttttcaaacaccaagtcgaataccgtctttagtcggaaggttgatgtcgtatccgatgtatgaggcaacattgttgttacaattttgaaaggcggtattatagtattcgtctttctgaatgtcgaacctatctaatagataccgtagtatattgagagtgtatccttgattatgttttatgaatagataaagtagatgttgtccttcttccttttgttcgtgccaattgagtaacattatgagaatatgacctgttgcacaatcgttccatgatgggtgtacaatcaagattattacgtatcctcgtatcggctcctcgagataaaagagcatacaccacacgaggactatgtttggtatactgttgaaggtaagtgtgtaaccgcgttaatgtttgctccataatctattatcgcgtagatgaatcgcttctcggctcgcatcttagtgtgacttaacttgtaataattgctttcgtagaacgtggatatgtgtttacagtagtaatgaagagaagtgagttcatcctcgtcggcgcaattagggtcggatcctttgtacagaacgtaatagtttaagctcccattgaatttatatctaagataacacagcaatagatcggatgatttactaaagtcatcaatggtgtccgttagtatatcaaagatcttgttatcgattgatagtggtcatccttgctatcaaagttacgcatgccgtggtgtaacaatatctttaatacagatggattaaatcgtgtattcatcgtatagcaatgtaatggagagttacctcgtttattcagatcgcagtgtttaataactagcttaaacagatgagacgatgtatccacatcaaagaacgtaaaatacatatgacagacattgttgacagaaacgtgaccttcattcttaccgtcgtccataaatacgttaggtatgtaccacatactgtcgcgaacgatgcgtacaatctcgtccatctcataatgatttactttttcataattaaagatgtgaaagaaaaccgaacaatatatttttttagtaatgtttatgcgagacatataaaataaactccgtgtttatgatgccggtaaatgtttttatcatcttggacggaatcgattttgtaatatgtcatggaaacaaatgaaacaggacattatcgctccatgataaattatttaatggagtaataaagtatctccatgggtaatttcgaaatcaagttatcgtctgtattaatgttgtccactatggagtcgatcctctcattgttctttacagtttctgtaatgatggacgttagttcttttttgtaccatttgatgtcggattctttgcgtatctcaatctgtggcgtttgcttcgtttaaataatatatcaaacatggagacgcctgatatgtaggcattcttcattctattaatgtctactctatagcgctttagttccttatgacgaccggcgatatcatactttactttagaaggaaaatcatcatctaggattaaggcgtatctgatacatgccgataatggttcaggatatagatagcgtatatctctattaaatgcgtcaatcatagtctctagagtgggatggtaactcagtaataaatcaactatcctcgttttgttttctctttggtaactgcttttctggatggccgtattgattatcgagcgtgatgttgtgacactcgctccatattccaataaccgctttgcaaattgtatattattgacatcgaccgcgtaatatagtagagttatcgatcatatctatatcatccatgtacttgcttagtatatcaaatacatctatcagtatggtttcataacagtgatacccgcaattattaaatctcgataatatcagaccgtacatacatagacggccattgttcgatatgtgatttacagccgcgtgtccatattttccacgataaaccttacgacgtttacatcgacgagattattattaacaaagtagtcgtgtagaggatagttgttgtccgtcgtcttatccatggttgctccgttatctaacatgcattgaatgataggtatacttaccatatcgccgtaatgtaagtagtttatcaacatggcttgtacatcctgttgtctaaatctctttagaatgttatcgatgatgtagtggttatattctctggaatcgtacgaagtaatactacgcattacgtcgacaagagtatgacgtctctcaataagaagattaacgatttccatgtctacattatatggggttactctaaatcgcttgtttagataatacgcctctaatatagggctgacgtcgtatactctacacgtgtccacatcctttattaataataatttaacaatctctatatctatggttgagaaagaccagtagtattggatgggtaaagatcctccttcgtctctgccatggatggaaacattgttatcgatcaaacatttaattacatccttggatagagattgagattctctatgagacgatatatagtaatgaagagagttcttacacatatcactgtcgtacatacaggtacgaaatacgtaaccggtgctgtaacattctgatttaagaagccatagcaatacttctggtctcggattaggcgtcgttacgtatatatccaccaatccgagaccattgattgcataattcgtattcttggacggacgtatccgtttatccacaattaggtattttagcagacgtaagtcgatattatccgaatacagatcgaaatcatttatattcgacttgagttcgttagaggaatttgaatagctggatatcagtagatgcacaatctgagattttacgtatctatgcttactgtatactcctagcggagttaatccttcgttgtttctacaaagtctctcgactccgcgagagaacaatcttaatgtctgtatcgcatttattggagacgtaacaatgtagcgcattgtttcctcgtctatctatatgttttgataagttgtgacacgtttcaatttctagttttatttttttgtacgtcacatcttcatccagtagacgacatagaatagtgcactctaccacaataatccatagctattctggtgctaattattcctatttcacgaaggcaatcattcctcataagatgataaaaagtgtagtggagatttagtatttagcagtgcggatatgatccaagagggtgagatagtcgttctcgttcagaatctttcgcagcataagtagtatgtcgatatacttatcgttgaagactctttataaaagtctatttgtttatatttattgcggatagcagtatttccctataaaaagtatacgtcctgtggtgtctttaatcatgtacatgaatggatggtttatgtagaccttcgtacgatataccatcgaaaagttaatcgtaaatactcctgtaacggccgatgcttctgtatactcctcattaacatctataaacgtcgtatgtagaaatttttctacagtgatagtttcattacacatcttgctaaaatctgcataatatccgaatatattagtaagtcctaaattttctaaaatcggtaccagattatacggttctgtcatttccactttaaactttggcatatacaagtctatacttttagtagataacataccacaccattttttaaatttttcatctgttatatttttttctatgttatatataccttctatgtcgtccggtagtataattaccatactagagtttccctcgtatggaatatcgataatagagaatcctccgaataattcattaatatgtacatattgcaagttattctcggtacccaccatcatatcaacgctggtaactatattcttagaaatataaaacttgtctgtatatgtaagatgtttagaaaatggatatttccacattgctttaaaatggacggcgctaacaactgtcatacgagtattaatggatagcggactagtcaataaggaattaattttaccatttgtcattgtcttaacccattcgttgattagttcctttgtttggttagcattattaaagtttacagtttgaaaatcgtcttttattttttgtaggaaggaggcgtggaactcgatactatcgctaccgtatattttatttgcggtagctagtgtcgcacaatacggaatatctacctccatgtcatcattattgtcatcgggtgtattctcattcatattctctatatattttgatagttgttcagctgtagaaccagctgctccatgatttagaatagataaagtagataaaatggaaactggagaaatcaaaacattttcatcagggtgttttaagattagttctttaaagatatccatggtatagacctaacgataacgatatatatcataaataaataatgttaaatttcaatttatgtttgtaccccgtattcatacttaacaaattggtattgcgtacacaatcaatcatattacataccattaataatgcaagcataaaaaattgttagtagatgtttctaaatataggttccgtaagcaaagaatataagaatgaagcggtaatgataaaatcaatcgttatctaaaatgatcatactcatttattttattctattatattaacacatacatttttaacagcaacacattcaatattgtattgttatttttatattatttacacaattaacaatatattattagtttatattactgaattaataatataaaattcccaatcttgtcataaacacacactgagaaacagcataaacacagaatccatcaaaaatgttgataaattatctgatgttgttgttcgctgctatgataatcagatcattcgccgatagtggtaacgctatcgaaacgacattgccagaaattacaaacgctacaacagatattccagctatcagattatgcggtccagagggagatggatattgtttacacggtgactgtatccacgctagagatattgacggtatgtattgtagatgctctcatggttatacaggcattagatgtcagcatgtagtattagtagactatcaacgttcagaaaacccaaacactacaacgtcatatatcccatctcccggtattatgcttgtattagtaggcattattatgtgttgtctattatctgtttataggttcactcgacgaactaaactacctatacaagatatggttgtgccataatttttataaatttttttatgagtatttttacaaaaatgtataaagtgtatgtcttatgtatatttataaaaatgctaagtatgcgatgtatctatgttatttgtatttatctaaacaatacctctacctctagatattatacaaaaattttttatttcggcatattaaagtaaaatctagttaccttgaaaatgaatacagtgggtggttccgtatcaccagtaagaacataatagtcaaatacagtatccgattgagattttgcatacaatactagtctagaaagaaatttgtaatcatcttctgtgacgggagtccatatatctgtatcatcgtctagtttatcagtgtcccatgctatattcctgttatcatcattagttaatgaaaataactctcgtgcttcagaaaagtcaaatattgtatccatacatacatctccaaaactatcgcttatacgtttatctttaacgatacctatacctagatggttatttactaacagacattttccagatctattgactataactcctatagtttccacatcaaccaagtaatgatcatctattgttatataacaataacataactcttttccatttttatcagtatgtatatctatatcaacgtcgtcgttgtagtgaatagtagtcattgatctattatatgaaacggatatgtctagaacggcaattgttttacgtccagttaacactttcgttgatttaaagtctagagtctttgcaaacataatatccttatccgactttatatttcctgtagggtggtataattttattttgcctccacatatcggtgtttccaaatatattactagacaatattccatatagttattagttaagggtacccaattagaacacgtacgcttattatcatcatttggatcgtatttcataaaagttattgtgttatcgatgtcaacacattctacattttttaatcgtctatatagtatttttctgatattttctataatatcagaattgtcttccatcggaagttgtatactatcggaatcagttacatgtttaaataattctctgatgtcattccttatacaatcaaattcattattaaacagtttaatagtctgtagacctttatcgtcgtaaatatccattgtcttattagttacgcttatttttatgtgtttttacgttgctttattatattttataagaatgattgtttgacgaatcacgagaactattaagacacattattaggtatatattataaaaaagtttttgattacgatgttataagaggaaagaggacacattaacatcatacatcaattaactacattcttataacatcgtaatcaaaagaattgcaattttgatgtataacaactgtcaatgggttatggaattgtatattacatattatacggtatgttggtaacgacaaataccggtcggtaattgtctgccggtgtaatagaattatatatatctatctattacaccggccttgtatacataataataagttgtggtagtatgatctccatatttataatttaggactttgtattcagtatttttggaatcataaaaaataaaaaaaagttttactaatttaaaatttaaaaagtatttacatttttttcactgtttagtcgcggatatggaattcgatcctgccaaaatcaatacatcatctatagatcatgtaacaatattacaatacatagatgaaccaaatgatataagactaacagtatgcattatccgaaatattatatcaatatcacaaaaataaatacacatttggctaatcaatttcgggcttggaaaaaacgtatcgccggaagggactatatgactaacttatctagagatacaggaatacaacaatcaaaacttactgaaactatacgtaactgtcaaaaaaatagaaacatatatggtctatatatacactacaatttagttattaattggataaccgatgtgattatcaatcaatattaagagggttggtaaattggtacatagctaataatacctatacacccaataatacaacaaccatttctgagttggatatcatcaaaatactaaataaatacgaggacgtgtatagagtaagtaaagaaaaagaatgtggaatttgctatgaagttgtttactcaaaacgatagatactttggtttattggattcgtgtactcatatattttgcataacatgcatcaatatatggcatagaacacgaagagaaaccggtgcgtcggataattgtcctatatgccgtacccgttttagaaacataacaatgagcaagttctataagctagttaactaataaataaaaagtttaatttgttgacgacgtatgtcgttattttttctcgtataaaagattaatttgattctaatataatctttagtattggataaatatcaattcaaattaattccattagattatatcataaataaaaatagtagcacacaactacttcagccaaatattcttttttgaaacgccatctatcgtagtgaggacacaagtgaacctataattatcaaatttattagtatcggttacatgaaggactttacgtagagtgacgattccactatctgtggtacgaacggtttcatcttctttgatgccatcacccagatgttctataaacttggtatcctcgtccgatctcatatcctttgccaaccaatacatgtagctaaaattaggcataaatttcacacatcctgaacaatgaaattctccagaagatgttacaatgtctagatttggacatttggtttcaaccgcgttaacatatgagtgaacacacccatacatgaaagcgatgagaaataggattctcatcttgccaaaatatcactagaaaaaatttatttatcagttttaaaggtataaaaaatacttattgttgctcgaatattttgtatttgatggtatacggaagattagaaatgtaggtattatcatcaactgattctatggttttatgtattctatcatgtttcactattgcgttggaaataatatcatatgcttccacatatattttattttgttttaactcataatactcacgtaattctggattattggcatatctatgaataattttagctccatgatcagtaaatattaatgagaacatagtattaccacctaccattatttttttcatctcattcaattcttaattgcaaagatctatataatcattatagcgttgacttatggactctggaatcttagacgatgtacagtcatctataatcatggcatatttaatacattgttttatagcatagtcgttatctacgatgttagatatttctctcaatgaatcaatcacacaatctaatgtaggtttatgacataatagcattttcagcagttcaatgtttttagattcgttgatggcaatggctatacatgtatatccgttatttgatctaatgttgacatctgaaccggattctagcagtaaagatactagagattgtttattatatctaacagccttgtgaagaagtgtttctcctcgtttgtcaatcatgttaatgtctttaagataaggtaggcaaatgtttatagtactaagaattgggcaagcataagacatgtcacaaagacccttttttgtatgtataagtgtaaaaattataacatccatagttggatttacataggtgtccaatcgggatctctccatcatcgagataattgatggcatctcccttccttttttagtagatatttcatcgtgtaagaatcaatattaatatttctaaagtatccgtgtatagcctctttatttaccacagctccatattccactagagggatatcgccgaatgtcatatactcaattagtatatgttggaggacatccgagttcattgttttcaatatcaaagagatggtttccttatcatttctccatagtggtacaatactacacattattccgtgcggctttccattttccaaaaacaatttgaccaaatctaaatctacatctttattgtatctataatcactatttagataatcagccataattcctcgagtgcaacatgttagatcgtctatatatgaataagcagtgttatctattcctttcattaacaatttaacgatgtctatatctatatgagatgacttaatataatattgaagagctgtacaatagtttttatctataaaagacggcttgattccgtgattaattagacatttaacaacttccggacgcacatatgctctcgtatccgactctgaatacagatgagagatgatatacagatgcaatacggtaccgcaatttcgtagttgataatcatcatacgcgtatcagtactcgtcctcataaagaacactgcagccattttctatgaacaaatcaataattttagaaacaggatcattgtcattacataattttctataactgaacgatggttttcacatttaacactcaagtcaaatccatgttctaccaacacctttatcaagtcaacgtctacatttttggatttcatatagctgaatatattaaagttatttatgttgctaaatccagtggcttctagtagagccatcgctatatccttattaactttaacatgtctactatttgtgtattcttctaatggggtaagctgtctccaatttttgcgtaatggattagtgccactgtctagtagtagtttgacgacctcgacattattacaatgctcattaaaaaggtatgcgtgtaaagcattattcttgaattggttcctggtatcattaggatctctgtctttcaacatctgtttaagttcatcaagagccacctcctcattttccaaatagtcaaacattttgactgaatgagctactgtgaactctatacacccacacaactaatgtcattaaatatcatgtcaaaaacttgtacaattattaataaaaataatttagtgtttaaattttaccagttccagattttacacctccgttaatacctccattaaccccactggacgatcctcctccccacattccaccgccaccagatgtataagttttagatcctttattactaccatcatgtccatggataaagacactccacatgccgccactaccccctttagaagacatattaataagacttaaggacaagtttaacaataaaattaatcacgagtaccctactaccaacctacactattatatgattatagtttctatttttacagtaccttgactaaagtttctagtcacaagagcaatactaccaacctacactattatatgattatagtttctatttttataggaacgcgtacgagaaaatcaaatgtctaatttctaacggtagtgttgataaacgattgttatccgcggatacctcctctatcatgtcgtctattttcttactttgttctattaacttattagcattatatattatttgattataaaacttatattgcttattagcccaatctgtaaatatcggattattaacatatcgtttctttgtaggtttatttaacatgtacatcactgtaagcatgtccttaccatttattttaatttgacgcatatccgcaatttctttttcgcagtcggttataaattctatatatgatggatacatgctacatgtgtacttataatcgactaatatgaagtacttgatacatattttcagtaacgatttattattaccacctatgaataagtacctgtgatcgtctaggtaatcaactgttttcttaatacattcgatggttggtaatttactcagaataatttccaatatcttaatatataattctgctatttctgggatatatttatctgccagtataacacaaatagtaatacatgtaaacccatattttgttattatattaatgtctgcgccattatctattaaccattctactaggctgacactatgcgactcaatacaatgataaagtatactacatccatgtttatctattttgtttatatcatcaatatacggcttacaaagttttagtatcgataacacatccaactcacgcatagagaaggtagggaataatggcataatatttattaggttatcatcattgtcattatctacaactaagtttccattttttaaaatatactcgacaactttaggatctctattgccaaatttttgaaaatatttatttatatgcttaaatctatataatgtagctccttcatcaatcatacatttaataacattgatgtatactgtatgataagatacatattctaacaatagatcttgtatagaatctgtatatcttttaagaattgtggatattaggatattattacataaactattacacaattctaaaatataaaacgtatcacggtcgaataatagttgatcaactatataattatcgattttgtgatttttcttcctaaactgtttacgtaaatagttagatagaatattcattagttcatgaccactatagttactatcgaataacgcgtcaaatatttcccgtttaatatcgcatttgtcaagataataatagagtgtggtatgttcacgataagtataataacgcatctctttttcgtgtgaaattaaatagtttattacgtccaaagatgtagcataaccatcttgtgacctagtaataatataataatagagaactgttttacccattctatcatcataatcagtggtgtagtcgtaatcgtaatcgtctaattcatcatcccaattataatattcaccagcacgtctaatctgttctattttgatcttgtatccatactgtatgttgctacatgtaggtattcctttatccaataatagtttaaacacatctacattgggatttgatgttgtagcgtatttttctacaatattaataccatttttgatactatttatttctatacctttcgaaattagtaatttcaataagtctatattgatgttatcagaacatagatattcgaatatatcaaaatcattgatatttttatagtcgactgacgacaataacaaaatcacaacatcgtttttgatattattatttttcttggtaacgtatgcctttaatggagtttcaccatcatactcatataatggatttgcaccactttctatcaatgattgtgcactgctggcatcgatgttaaatgttttacaactatcatagagtatcttatcgttaaccatgattggttgttgatgctatcgcattttttggtttctttcatttcagttatgtatggatttagcacgtttgggaagcatgagctcatatgatttcagtactgtagtgtcagtactattagtttcaataagatcaatctctagatctatagaatcaaaacacgataggtcagaagataatgaatatctgtaggcttcttgttgtactgtaacttctggttttgttagatggttgcatcgtgctttaacgtcaatggtacaaattttatcctcgctttgtgtatcatattcgtccctactataaaattgtatattcagattatcatgcgatgtgtatacgctaacggtatcaataaacggagcacaccatttagtcataaccgtaatccaaaaatttttaaagtatatcttaacgaaagaagttgtgtcattgtctacggtgtatggtactagatcctcataagtgtatatatctagagtaatgtttaatttattaaatggttgataatatggatcctcgtgacaatttccgaagatggaaataagacataaacacgcaataaatctaattgcggacatggttactccttaaaaaaatacgaataatcaccttggctatttagtaagtgtcatttaacactatactcatattaatccatggactcataatctctatacgggattaacggatgttctatatacggggatgagtagttctcttctttaactttatactttttactaatcatatttagactgatgtatgggtaatagtgtttgaagagctcgttctcatcatcagaataaatcaatatctctgtttttttgttatacagatgtattacagcctcatatattacgtaatagaacgtgtcatctaccttattaactttcaccgcatagttgtttgcaaatacggttaatcctttgacctcgtcgatttccgaccaatctgggcgtataatgaatctaaactttaattgcttgtaatcattcgaaataatttttagtttgcatccgtagttatcccctttatgtaactgtaaatttctcaacgcgatatctccattaataatgatgtcgaattcgtgctgtatacccatactgaatggatgaacgaataccgacggcgttaatagtaatttactttttcatctttacatattgggtactagttttactatcataagtttataaattccacaagctactatggaataagccaaccatcttagtataccacacatgtcttaaagtttattaattaattacatgttgttttatatatatcgctacgaatttaaagagaaattagtttaggaagaaaaattatctatctacatcatcacgtctctgtattctacgatagagtgctactttaagatgcgacagatccgtgtcatcaaatatatactccattaaaatgattattccggcagcgaacttgatattggatatatcacaacctttgttaatatctacgacaatagacagcagtcccatggttccataaacagtgagtttatctttctttgaagagatattttgtagagatcttataaaactgtcgaatgacatcgcatttatatctttagctaaatcgtatatgttaccatcgtaatatctaaccgcgtctatcttaaacgtttccatcgctttaaagacgtttccgatagatggtctcatttcatcagtcatactgagccaacaaatataatcgtgtataacatctttgatagaatcagactctaaagaaaacgaatcggctttattatacgcattcatgataaacttaatgaaaaatgtttttcgttgtttaagttggatgaatagtatgtcttaataattgttattatttcattaattaatatttagtaacgagtacactctataaaaacgagaatgacataactaatcataactagttatcaaagtgtctaggacgcgtaattttcatatggtatagatcctgtaagcattgtctgtattctggagctattttctctatcgcattagtgagttcagaatatgttataaatttaaatcgaataacgaacataactttagtaaagtcgtctatattaactcttttattttctagccatcgtaataccatgtttaagatagtatattctctagttactacgatctcatcgttgtctagaatatcacatactgaatctacatccaattttagaaattggtctgtgttacatatctcttctatattattgttgatgtattgtcgtagaaaactattacgtagaccattttctttataaaacgaatatatagtactccaattatctttaccgatatatttgcacacataatccattctctcaatcactacatctttaagattttcgttgttaagatatttggctaaactatataattctattagatcatcaacagaatcagtatatatttttctagatccaaagacgaactctttggcgtcctctataatattcccagaaaagatattttcgtgttttagtttatcgagatctgatctgttcatatacgccatgattgtacggtacgttatgataaccgcataaaataaaaatccattttcatttttaaccaatactattcataattgagattgatgtaatactttgttactttgaacgtaaagacagtacacggatccgtatctccaacaagcacgtagtaatcaaatttggtgttgttaaacttcgcaatattcatcaatttagatagaaacttatactcatcatctgttttaggaatccatgtattattaccactttccaacttatcattatcccaggctatgtttcgtccatcatcgttgcgcagagtgaataattcttttgtattcggtagttcaaatatatgatccatgcatagatcggcaaagctattgtagatgtgatttttcctaaatctaatataaaactcgtttactagcaaacactttcctgatttatcgaccaagacacatatggtttctaaatctatcaagtggtggggatccatagttatgacgcagtaacatatattattacattcttgactgtcgctaatatctaaatatttattgttatcgtattggattctgcatatagatggcttgtatgtcaaagatatagaacacataaccaatttatagtcgcgctttacattctcgaatctaaagttaagagatttagaaaacattatatcctcggatgatgttatcactgtttctggagtaggatatattaaagtctttacagatttcgtccgattcaaataaatcactaaataatatcccacattatcatctgttagagtagtatcattaaatctattatattttatgaaagatatatcactgctcacctctatatttcgtacatttttaaactgtttgtataatatctctctgatacaatcagatatatctattgtgtcggtagacgataccgttacatttgaattaatggtgttccattttacaacgtttaacaagttgaccaattcatttttaatagtatcaaactctccatgattaaatattttaatagtatccattttatatcactacggacacaaagtagctgacataaaccattgtataatttttatgttttatgtttattagcgtacacattttggaagttccggcttccatgtatttcctggagagcaagtagatgatgaggaaccagataggttatatccgtacttgcacttaaagtttacattgtcgttgtatgagtatgatcttttaaacccgctagacaagtatccgtttgatattgtaggatgtggacatttaacaatctgacacgtgggtggatcggaccattctcctcctgaacacaggacactagagttaccaatcaacgaatatccactattgcaactataagttacaacgctcccatcggtataaaaatcctcgtatccgttatgtcttccgttggatatagatggaggggattggcatttaacagattcacaaataggtgcctcgggattccataccatagatccagtagatcctaattcacaatacgatttagattcaccgatcaactgatatccgctattacaagagtacgttatactagagccaaagtctactccaccaatatcaagttggccattatcgatatctcgaggcgatgggcatctccgtttaatacattgattaaagagtgtccatccagtacctgtacatttagcatatataggtcccattttttgctttctgtatccaggtagacatagatattctatagtgtctcctatgttgtaattagcattagcatcagtctccacactattcttaaatttcatattaatgggtcgtgacggaatagtacagcatgatagaacgcatcctattcccaacaatgtcaggaacgtcacgctctccaccttcatatttatttatccgtaaaaatgttatcctggacatcgtacaaataataaaaagcccatatatgttcgctattgtagaaattgtttttcacagttgctcaaaaacgatggcagtgacttatgagttacgttacactttggagtctcatctttagtaaacatatcataatattcgatattacgagttgacatatcgaacaaattccaagtatttgattttggataatattcgtattttgcatctgctataattaagatataatcaccgcaagaacacacgaacatctttcctacatggttaaagtacatgtacaattctatccatttgtcttccttaactatatatttgtatagataattacgagtctcgtgagtaattccagtaattacatagatgtcgccgtcgtactctacagcataaactatactatgatgtctaggcatgggagacttttttatccaacgatttttagtgaaacattccacatcgtttaatactacatatttctcatacgtggtataaactccacccattacatatatatcatcgtttacgaataccgacgcgcctgaatatctaggagtaattaagtttggaagtcttatccatttcgaagtgccgtgtttcaaatattctgccacacccgttgaaatagaaaattctaatcctcctattacatataactttccatcgttaacacaagtactaacttctgattttaacgacgacatattagtaaccgttttccattttttcgttttaagatctacccgcgatacggaataaacatgtctattgttaatcatgccgccaataatgtatagacaattatgtaaaacatttgcattatagaattgtctatctgtattaccgactatcgtccaatattctgttctaggagagtaatgggttattgtggatatataatcagagtttttaatgactactatattatgttttataccatttcgtgtcactggctttgtagatttggatatagttaatcccaacaatgatatagcattgcgcatagtattagtcataaacttgggatgtaaaatgttgatgatatctacatcgtttggatttttatgtatccactttaataatatcatagctgtaacatcctcatgatttacgttaacgtcttcgtgggataagatagttgtcagttcatcctttgataattttccaaattctggatcggatgtcaccgcagtaatattgttgattatttctgacatcgacgcattatatagttttttaattccatatcttttagaaaagttaaacatccttatacaatttgtgaaattaatattatgaatcatagtttttacacatagatctactacaggcggaacatcaattattatggcagcaactagtatcatttctacattgtttatggtgatgtttatcttcttccagcgcatatagtctaatagcgattcaaacgcgtgatagtttataccattcaatataatcgcttcatcctttagatggtgatcctgaatgcgtttaaaaaaattatacggagacgccgtaataatttccttattcacttgtataatttccccattgatagaaaatattacgctttccattcttaaagtactataagtaattatagtataatgtaaacgtttatatattcaatatttttataaaaatcattttgacattaattcctttttaaatttccgtctatcatctatagaaacgtattctatgaatttataaaatgcttttacgtgtcctatcgtaggcgatagaaccgctaaaaagcctatcgaatttctacaaaagaatctgttatatggtatagggagagtataaaacattaaatgtccgtacttattaaagtattcagtagccaatcctaactctttcgaatacttattaatggctcttgttctgtacgaatctatttttttgaacaacggacctagtggtatatcttgttctatgtatctaaaataatgtctgactagatccgttagtttaatatccgcagtcatcttgtctagaatggcaaatctaactgcgggtttaggctttagtttagtttctatatctacatctatgtctttatctaacaccaaaaatataatagctaatattttattacaatcatccggatattcttctacgatctcactaactaatgtttctttggttatactagtatagtcactatcggacaaataaagaaaatcagatgatcgatgaataatacatttaaattcatcatctgtaagatttttgagatgtctcattagaatattattagggttagtactcattatcattcggcagctattacttattttattatttttcaccatatagatcaatcattagatcatcaaaatatgtttcaatcatcctaaagagtatggtaaatgactcttcccatctaatttctgaacgttcaccaatgtctctagccactttggcactaatagcgatcattcgcttagcgtcttctatattattaactggttgattcaatctatctagcaatggaccgtcggacagcgtcattctcatgttcttaatcaatgtacatacatcgccgtcatctaccaattcatccaacaacataagctttttaaaatcatcattataataggtttgatcgttgtcatttctccaaagaatatatctaataagtagagtcctcatgcttagttaacaactattttttatgttaaatcaattagtacaccgctatgtttaatacttattcatattttagtttttaggattgagaatcaatacaaaaattaatgcatcattaattttagaaatacttagtttccacgtagtcaatgaaacatttgaactcatcgtacaggacgttctcgtacaggacgtaactataaaccggtttatatttgttcaagatagatacaaatccgataactttttttacgaattctacgggatccactttaaaagtgtcataccgggttctttttatttttttaaacagatcaatggtgtgatgttgattaggtcttttacgaatttgatatagaatagcgtttacatatcctccataatggtcaatcgccatttgttcgtatgtcataaattctttaattatatgacactgtgtattatttagttcatccttgttcattgttaggaatctatccaaaatggcaattatactagaactataggtgcgttgtatacacatattgatgtgtctgtttatacaatcaatgctactaccttcgggtaaaattgtagcatcatataccatttctagtactttaggttcattattatccattgcagaggacgtcatgatcgaatcataaaaaaatatattatttttatgttattttgttaaaaataatcatcgaatacttcgtaagatactccttcatgaacataatcagttacaaaacgtttatatgaagtaaagtatctacgatttttacaaaagtccggatgcataagtacaaagtacgcgataaacggaataataatagatttatctagtctatctttttctatagctttcatagttagatacatggtctcagaagtaggattatgtaacatcagcttcgataaaatgactgggttatttagtcttacacattcgctcatacatgtatgaccgttaactacagagtctacactaaaatgattgaacaatagatagtctaccattgtttcgtattcagatagtacagcgtagtacatggcatcttcacaaattatatcattgtctaatagatatttgacgcatcttatggatcccacttcaacagccatcttaaaatcggtagaatcatattgctttcctttatcattaataatttctagaacatcatctctatcataaaagatacaaatattaactgtttgatccgtaataacattgctagtcgatagcaatttgttaataagatgcgctgggctcaatgtcttaataagaagtgtaagaggactatctccgaatttgttttgtttattaacatccgttgatggaagtaaaagatctataatgtctacattcttgactgttttagagcatacaatatggagaggtgtatttccatcatgatctggttttgagggactaattcctagtttcatcatccatgagattgtagaagcttttggattgtctgacataagatgtctatgaatatgatttttgccaaatttatccactatcctggcttcgaatccgatggacattatttttttaaacactctttctgaaggatctgtacacgccaacaacggaccacatccttcttcatcaaccgagttgttaatcttggctccatactgtaccaataaatttattctctctatgacttcatcatctgttcccgagagataatatagaggcgttttatgctgtttatcacacgcgtttggatctgcgccgtgcgtcagcagcatcgcgactattctattattattaattttagaagctatatgcaatggataatttccatcatcatccgtctcatttggagagtatcctctatgaagaagttcttcgacaaatcgttcatctagtcctttaattccacaatacgcatgtagaatgtgataattatttccagaaggttcgatagcttgtagcatattcctaaatacatctaaatttttactattatatttggcataaagagatagataatactcggccgacataatgttgtccattgtagtataaaaattaatatttctatttctgtatatttgcaacaatttactctctataacaaatatcataacttagttcttttatgtcaagaaggcactggtttagttcatctataaatgtcacgccataactaccacgcatgccatactcagaattatgataaagatatttatccttggggtgtaggtaatggggattaatctttgttggatcagtctctaagttaacacatgtcacacatgatccatttatagttatatcacacgatgatgatttatgaattgattccggaagatcgctatcgtattttgtggttccacaattcatttccatacatgttattgtcacactaatattatgatgaactttatctagccgctgagtggtaaacaacagaacagatagtttattatctttaccaacaccctcagccgctgccacaaatctctgatccgtatccatgatggtcatgtttatttctagtccgtatccagtcaacactatgttagcatttctgtcgatatagctttcactcatatgacactcaccaataatagtagaattaatgtcgtaatttacaccaatagtgagttcggcggcaaagtaccaataccggtaatcttgtcgaggaggacatatagtattcttgtattctaccgaatacccgagagatgcgatacaaaagagcaagactaatttgtaaaccatcttactcaaaatatgtaacaatagtacgatgcaatgagtaagacaataggaaatctatcttatatacacataattattctatcaattttaccaattagttagtgtaatgttaacaaaaatgtgggagaatctaattagtttttctttacacaattgacgtacatgagtctgagttccttgtttttgctaattatttcatccaatttattattcttgacgatatcgagatcttttgtataggagtcaaacttgtattcaacatgcttttctataatcattttagctatttcggcatcatccaatagtacattttccagattagcagaatagatattaatgtcgtatttgaacagagcctgtaacatctcaatgtctttattatctatagccaatttaatgtccggaatgaagagaagggaattattggtgtttgtcgacgtcatatagtcgagcaagagaatcatcatatccacgtgtccattttttatagtgatgtgaatacaactaaggagaatagccagatcaaaagtagatggtatctctgaaagaaagtaggaaacaatacttacatcattaagcatgacggcatgataaaatgaagttttccatccagttttcccatagaacatcagtctccaatttttcttaacaaacagttttaccgtttgcatgttaccactatcaaccgcataatacaatgcggtgtttcccttgtcatcaaattgtgaatcatccagtccactgaatagcaaaatctttactattttggtatcttccaatgtggctgcctgatgtaatggaaattcattctctagaagatttttcaatgctccagcgttcaacaacgtacatactagacgcacgttattatcagctattgcataatacaaggcactatgtccatggacatccgccttaaatgtatctttactagagagaaagcttttcagctgcttagacttccaagtattaattcgtgacagatccatgtctgaaacgagacgctaattagtgtatattttttcattttttataattttgtcatattgcaccagaattaataatatctctaatagatctgattagtagatacatggctatcgcaaaacaacatatacacatttaataaaaataatatttattaagaaaattcagatttcacgtacccatcaatataaataaaataatgattccttacaccgtacccatattaaggagattccaccttacccataaacaatataaatccagtaatatcatgtctgatgatgaacacaaatggtgtattaaattccagtttttcaggagatgatctcgccgtagctaccataatagtagatgcctctgctacagttccttgttcgtcgacatctatctttgcattctgaaacattttataaatatataatgggtccctagtcatatgtttaaacgacgcattatctggattaaacatactaggagccatcatttcggctatcgacttaatatccctcttattttcgatagaaaatttagggagtttaagattgtacactttattccctaattgagacgaccaatagtctaattttgcagccgtgatagaatctgtgaaatgggtcatattatcacctattgccaggtacatactaatattagcatccttatacggaaggcgtaccatgtcatattctttgtcatcgattgtgattgtatttccttgcaatttagtaactacgttcatcatgggaaccgttttcgtaccgtacttattagtaaaactagcattgcgtgttttagtgatatcaaacggatattgccatatacctttaaaatatatagtattaatgattgcccatagagtattattgtcgagcatattagaatctactacattagacataccggatctacgttctactatagaattaattttattaaccgcatctcgtctaaagtttaatctatataggccgaatctatgatattgttgataatacgacggtttaatacacacagtattatctacgaaactttgataagttagatcagtgtacgtatatttagatgttttcagcttagctaatcctgatattaattctgtaaatgctggacccagatctctttttctcaaatccatagtcttcaataattctattctagtattacctgatgcaggcaatagcgacataaacatagaaaacgaatagccaaacggcgagaagacaatattatcatcttgaatatttttatacgctactataccggcattggtaaatccttgtagacgataggcggacgctgaacacgctaacgatagtatcaataacgcaatcatgattttatggtattaataattaaccttatttttatgttcggtataaaaattattgatgtctacacatccttttgtaattgacatctatatatccttttgtataatcaactctaatcactttaacttttacagttttccctaccagtttatccctatattcaacatatctatccatatgcatcttaacactctctgccaagatagcttcagagtgaggatagtcaaaaagataaatatatagagcataatcattctcgtatactctgccctttattacatcacccgcattgggcaacgaataacaaaatgcaagcatcttgttaacgggctcgtaaattgggataaaaattatgtttttattgattttatatctattttattcaagagaatattcaggaatttctttttccggttgtatctcgtcgcagtatatatcatttgtacattgtttcatattttttaatagtttacaccttttagtaggactagtatcgtacaattcatagctgtattttgaattccaatcacgcataaaaatatcttccaattgttgacgaagacctaatccatcatccggtgtaatattaatagatgctccacatgtatccgtaaagtaatttcctgtccaatttgaggtacctatataggccgttttatcggttaccatatatttggcatggtttaccctagaatacggaatgggaggatcagcatctggtacaataaatagctttacttctatatttatgtttttagattttagcatagcgatagatcttaaaaagtttctcatgataaacgaagatcgttgccagcaactaatcaatagcttaacggatacttgtctgtctatagcggatcttcttaattcatcttctatataaggccaaaacaaaattttacccgccttcgaataaataatagggataaagttcataacagatacataaacgaatttactcgcatttctaatacatgacaataaagcggttaaatcattggttctttccatagtacatagttgttgcggtgcagaagcaataaatacagagtgtggaacgccgcttacgttaatactaagaggatgatctgtattataatacgacggataaaagtttttccaattatatggtagattgttaactccaagataccagtatacctcaaaaatttgagtgagatccgctgccaagttcctattattgaagatcgcaatacccaattccttgacctgagttagtgatctccaatccatgttagcgcttcctaaataaatatgtgtattatcagatatccaaaattttgtatgaagaactcctcctaggatatttgtaatatctatgtatcgtacttcaactccggccatttgtagtctttcaacatcctttaatggtttgttagatttattaacggctactctaactcgtactcctcttttgggtaattgtacaatctcgtttaatattatcgtgccgaaattcgtacccacttcatccgataaactccaataaaaagatgatatatctagtgtttttgtggtattggatagaatttccctccacatgttaaatgtagacaaatatactttatcaaattgcatacctataggaatagtttctgtaatcactgcgattgtattatccggattcattttatttgttaaaagaataatcctatatcacttcactctattaaaaatccaagtttctatttctttcatgactgattttttaacttcatccgtttccttatgaagatgatgtttggcaccttcataaatttttatttctctattacaatttgcatgttgcatgaaataatatgcacctaaaacatcgctaatcttattgtttgttccctggagtatgagagtcgggggggtgttaatcttggaaattatttttctaaccttgttggtagccttcaagacctgactagcaaatccagccttaattttttcatgattgactaatgggtcgtattggtatttataaactttatccatatctctagatactgattctggacatagctttccgactggcgcatttggtgtgatggttcccataagtttggcagctagcagattcagtcttgaaacagcatctgcattaactagaggagacattagaatcattgctgtaaacaagtttggattatcgtaagaggctagctcccatggaatgacccaataagtagatttaatagttaccacgtgctgtaccaaagtcatcaatcatcattttttcaccattacttcttccatgtccaatatgatcatgtgagaatactaaaattcctaacgatgatatgttttcagctagttcgtcataacgtccagaatgtttaccagctccatgacttatgaatactaatgccttaggatatgtaataggtttccaatatttacaatatatgtaatcattgtccagattgaacatacagtttgcactcatgattcacgttatataactatcaatattaacagttcgtttgatgatcatattatttttatgttttattgataattgtaaaaacatacaattaaatcaatatagaggaaggagacggctactgtcttttgtgagatagtcatggcgactaaattagattatgaggatgctgttttttactttgtggatgatgataaaatatgtagtcgcgactccatcatcgatctaatagatgaatatattacgtggagaaatcatgttatagtgtttaacaaagatattaccagttgtggaagactgtacaaggaattgatgaagttcgatgatgtcgctatacggtactatggtattgataaaattaatgagattgtcgaagctatgagcgaaggagaccactacatcaattttacaaaagtccatgatcaggaaagtttattcgctaccataggaatatgtgctaaaatcactgaacattggggatacaaaaagatttcagaatctagattccaatcattgggaaacattacagatttgatgaccgacgataatataaacatcttgatactttttctagaaaaaaaattgaattgatgatataggggtcttcataacgcataattattacgttagcattctatatccgtgttaaaaaaaattatcctatcatgtatttgagagttttatatgtagcaaacatgatagctgtgatgccaataagctttagatattcacgcgtgctagtgttagggatggtattatctggtggtgaaatgtccgttatataatctacaaaacaatcatcgcatatagtatgcgatagtagagtaaacatttttatagtttttactggattcatacatcgtctacccaattcggttataaatgaaattgtcgccaatcttacacccaaccccttgttatccattagcatagtattaacttcgttatttatgtcataaactgtaaatgattttgtagatgccatatcatacatgatattcatgtccctattataatcattactaactttatcacaatatatgttgataatatctatatatgatctagtctttgtgggcaactgtctatacaagtcgtctaaacgttgtttactcatatagtatcgaacagccatcattacatggtcccgttccgttgatagataatcgagtatgttagtggacttgtcaaatctatataccatattttctggaagtggatatacatagtcgtgatcaacattattgctagcctcatcttctatatcctgtactataccattatctatatcatctacataatctatgatattattacacataaacatcgacaacatactattgtttattatctaagtcctgttgatccaaacccttgatctcctctatttgtactatctagagattgtacttcttccagttctggataatatatacgttgatagattagctgagctattctatctccagtatttacattaaacgtacattttccattattaataagaatgactcctatgtttcccctataatcttcgtctattacaccacctcctatatcaatgccttttagtgacagaccagacctaggagctattctaccatagcagaacttaggcatggacatactaatatctgtcttaattaactgtctttctcctggagggatagtataatcgtaagcgctatacaaatcatatccggcagcacccggcgattgcctagtaggagatttagctctgttagtttccttaacaaatctaactggtgagttaatattcatgttgaacataaaactaatattttatttcaaaattatttaccatcccatatattccatgaataagtgtgatgattgtacacttctatagtatctatatacgatccacgataaaatcctcctatcaatagcagtttattatccactatgatcaattctggattatccctcggataaataggatcatctatcagagtccatgtattgctggattcacaataaaattccgcatttctaccaaccaagaataaccttctaccgaacactaacgcgcatgatttataatgaggataataagtggatggtccaaactgccactgatcatgattgggtagcaaatattctgtagttgtatcagtttcagaatgtcctcccattacgtatataacattgtttatggatgccactgctggattacatctaggtttcagaagactcggcatattaacccaagcagcatccccgtggaaccaacgctcaacagatgtgggatttggtagacctcctactacgtataatttattgttagcgggtatcccgctagcatacagtctggggctattcatcggaggaattggaatccaattgtttgatatataatttaccgctatagcattgttatgtatttcattgttcatccatccaccgatgagatatactacttctccaacatgagtacttgtacacatatggaatatatctataatttgatccatgttcataggatactctatgaatggatacttgtatgatttgcgtggttgtttatcacaatgaaatattttggtacagtctagtatccattttacattatttatacctctgggagaaagataatttgacctgattacatttttgataaggagtagcagatttcctaatttatttcttcgctttatataccacttaatgacaaaatcaactacataatcctcatctggaacatttagttcatcgctttctagaataagtttcatagatagataatcaaaattgtctatgatgtcatcttccagttccaaaaagtgtttggcaataaagtttttagtatgacataagagattggatagtccgtattctatacccatcatgtaacactcgacacaatattcctttctaaaatctcgtaagataaagtttatacaagtgtagatgataaattctacagaggttaatatagaagcacgtaataaattgacgacgttatgactatctatatatacctttccagtatacgagtaaataactatagaagttaaactgtgaatgtcaaggtctagacaaaccctcgtaactggatctttatttttcgtgtatttttgacgtaaatgtgtgcgaaagtaaggagataactttttcaatatcgtagaattgactattatattgcctcctatggcatcaataattgttttgaatttcttagtcatagacaatgctaatatattcttacagtacacagtattgacaaatatcggcatttatgtttctttaaaagtcaacatctagagaaaaatgattatctttttgagacataactcccattttttggtattcacccacacgtttttcgaaaaaattagtttttccttccaatgatatattttccatgaaatcaaacggattggtaacattataaatttttttaaatcccaattcagaaatcaatctatccgcgacgaattctatatatgttttcatcatttcacaattcattcctataagtttaactggaagagccgcagtaagaaattcttgttcaatggataccgcatctgttataatagatctaacggtttcttcactcggtggatgcaataaatgtttaaacatcaaacatgcgaaatcgcagtgcagaccctcgtctctactaattagttcgttggaaaacgtgagtccgggcattaggccacgctttttaagccaaaatatggaagcgaatgatccggaaaagaagattccttctactgcagcaaaggcaataagtctctctccataaccggcgctgtcatgtatccacttttgagcccaatcggccttcttttttacacaaggcatcgtttctatggcattaaagagatagtttttttcattactatctttaacataagtatcgatcaaaagactatacatttccgaatgaatgttttcaatggccatctgaaatccgtagaaacatctagcctcggtaatctgtacttctgtacaaaatcgttccgccaaattttcattcactattccgtcactggctgcaaaaaacgccaatacatgttttataaaatatttttcgtctggtgttagtttattccaatcattgatatctttagatatatctacttcttccactgtccaaaatgatgcctctgcctttttatacatgttccagatgtcatgatattggattgggaaaataacaaatctatttggatttggtgcaaggatgggttccataactaaattaacaataacaataaattttttttcagttatctatatgcctgtacttggattttttgtacatcgatatcgccgcaatcactacaataattacaagtattattgatagcattgttattagtactatcataattaaattatctacattcatgggtgctgaataatcgttattatcatcattatcattttgtaattgtgacatcatactagataaatcgtttgcgagattgttgtgggaagcgggcatggaggatgcattatcattattatttaacgccttccatttggattcacaaatgttacgcacattcaacattttatggaaactataattttgtgaaaacaaataacaagaaaactcgtcatcgttcaaatttttaacgatagtaaaccgattaaacgtcgagctaatttctaacgctagcgactctgttggatatgggtttccagatatatatcttttcagttcccctacgtatctataatcatctgtaggaaatggaagatatttccatttatctactgttcctaatatcatatgtggtggtgtagtagaaccattaagcgcgaaagatgttatttcgcatcgtattttaacttcgcaataatttctggttagataacgcactctaccagtcaagtcaatgatattagcctttacagatatattcatagtagtcgtaacgatgactccatcttttagatgcgatactcctttgtatgtaccagaatcttcgtacctcaaactcgatatatttaaacaagttaatgagatattaacgcgttttatgaatgatgatatataaccagaagttttatcctcggtggctagcgctataaccttatcattataataccaactagtgtgattaatatgtgacacgtcagtgtgggtacaaatatgtacattatcgtctacgtcgtattcgatacatccgcatacagccaacaaatataaaatgacaaatactctaacgacgttcgtacccatcttgatgcggtttaataaatgttttgatttcaatttattgtaaaaaaagattcggttttatactgttcgatattctcattgcttatattttcatctatcatctccacacagtcaaatccgtggttagcatacacctcatcaaccggtaaaagactatcggactcttctatcattataactctagaatatttaatttggtcattattaatcaagtcaattatcttatttttaacaaacgtgagtattttactcattttttataaaaacttttagaaatatacagactctatcgtgtgtctatatcttctttttatatccaatgtatttatgtctgatttttcttcatttatcatatataatggtccaaattctacacgtgcttcggattcatccagatcattaaggttcttataattgtaacatccttctcttccctcttctacatcttccttcttattcttattcttagcgtcacagaatctaccacagcaggatcccatgacgagcgtcatattaaactaatccattttcaattataatatatgattagtaatgaccattaaaataaaaaatattcttcataaccggcaagaaagtgaaaagttcacattgaaactatgtcagtagtatacatcatgaaatgatgatatatatatactctattttggtggaggattatatgatataattcgtggataatcatttttaagacacatttctttattcgtaaatcttttcacgttaaatgagtgtccatattttgcaatttcttcatatgatggcggtgtacgtggacgaggctgctcctgttcttgttgtggtcgccgactgtcgtgtctgcgtttagatccctccattatcgcgattgcgtagatggagtactattttataccttgtaattaaatttttttattaattaaacgtataaaaacgttccgtatctgtatttaagagccagatttcgtctaatagaacaaatagctacagtaaaaataactagaataattgctacacccactagaaaccacggatcgtaatacggcaatcggttttcgataataggtggaacgtatattttatttaaggacttaacaattgtctgtaaaccacaatttgcttccgcggatcctgtattaactatctgtaaaagcatatgttgaccgggcggagccgaacattctccgatatctaatttctgtatatctataatattattaacctccgcatacgcattacagttcttttctagcttggataccgcactaggtacatcgtctagatctattcctatttcctcagcgatagctcttctatccttttccggaagcaatgaaatcacttcaataaatgattcaaccatgagtgtgaaactaagtcgagaattactcatgcatttgttagttattcggagcgcgcaatttttaaactgtcctataacctctcctatatgaatagcacaagtgacattagtagggatagaatgttgagctaatttttgtaaataactatctataaaaagattatacaaagttttaaactctttagtttccgccatttatccagtctgagaaaatgtctctcataataaatttttccaagaaactaattgggtgaagaatggaaacctttaatctatatttatcacagtctgttttggtacacatgatgaattcttccaatgccgtactaaattcgatatctttttcgatttctggatatgtttttaataaagtatgaacaaagaaatggaaatcgtaataccagttatgtttaactttgaaattgttttttattttcttgttaatgattccagccacttgggaaaagtcaaagtcgtttaatgccgatttaatacgttcattaaaaacaaactttttatcctttagatgaattattattggttcattggaatcaaaaagtaagatattatcgggtttaagatctgcgtgtaaaaagttgtcgcaacagggtagttcgtagattttaatgtataacagagccatctgtaaaaagataaactttatgtattgtaccaaagatttaaatcctaatttgatagctaactcggtatctactttatctgccgaatacagtgctaggggaaaaattataatgtttcctctttcatattcgtagttagttctcttttcatgttcgaaaaagtgaaacatgcggttaaaatagtttataacattaatattactgttaataactgccggataaaagtgggatagtaatttcacgaatttgatactgtcctttctctcgttaaacgcctttaaaaaaactttagaagaatatctcaatgagagttcctgaccatccatagtttgtatcaataatagcaacatatgaagaacacgtttatacagagtatgtaaaaatgttaatttatagtttaatcccatggcccacgcacacacgattaattttttttcatctccctttagattgttgtatagaaatttgggtactgtgaactccgccgtagtttccatgggactatataattttgtggcctcgaatacaaattttactacatagttatctatcttaaagactataccatatcctcctgtagatatgtgataaaaatcgtcgtttataggataaaatcgtttatccttttgttggaaaaaggatgaattaatgtaatcattctcttctatctttagtagtgtttccttattaaaattcttaaaataatttaacaatctaactgacggagcccaattttggtgtaaatctaattgggacattatattgttaaaatacaaacagtctcctaatataacagtatctgataatctatggggagacatccattgatattcaggggatgaatcattggcaacacccatttattgtacaaaaagccccaatttacaaacgaaagtccaggtttgatagagacaaacaattaactattttgtctctgtttttaacacctccacagtttttaatttctttagtaatgaaattattcacaatatcagtatcttctttatctaccagagattttactaacttgataaccttggctgtctcattcaatagggtagtaatatttgtatgtgtgatattgatatctttttgaattgtttcttttagaagtgattctttgatggtgccagcatacgaattacaataatgcagaaactcggttaacatgcaggaattatagtaagccaattccaattgttgcctgtgttgtattagagtgtcaatatgagcaatggtgtccttgcgtttctctgatagaatgcgagcagcgattttggcgttatcatttgacgatatttctggaatgacgaatcctgtttctactaactttttggtaggacaaagtgaaacaatcaagaagatagcttctcctcctatttgtggaagaaattgaactcctctagatgatctactgacgatagtatctccttgacagatattggaccgaattacagaagtacctggaatgtaaagccctgaaaccccctcattttttaagcagattgttgccgtaaatcctgcactatgcccaagatagagagctcctttggtgaatccatctctatgtttcagtttaaccaagaaacagtcagctggtctaaaatttccatctctatctaatacagcatctaacttgatgtcaggaactatgaccggtttaatgttatatgtaacattgagtaaatccttaagttcataatcatcactgtcatcagttatgtacgatccaaacaatgtttctaccggcatagtggatacgaagatgctatccatcagaatgtttccctgattagtattttctatatagctattcttctttaaacgattttccaaatcagtaactatgttcatttttttaggagtaggacgcctagccagtatggaagaggattttctagatcctctcttcaacatctttgatctcgatggaatgcaaaaccccatagtgaaacaaccaacgataaaaataatattgtttttcactttttataattttaccatctgactcatggattcattaatatctttataagagctactaacgtataattctttataactgaactgagatatatacaccggatctatggtttccataattgagtaaatgaatgctcggcaataactaatggcaaatgtatagaacaacgaaattatactagagttgttaaagttaatattttctatgagctgttccaataaattatttgttgtgactgcgttcaagtcataaatcatcttgatactatccagtaaaccgtttttaagttctggaatattatcatcccattgtaaagcccctaattcgactatcgaatatcctgctctgatagcagtttcaatatcgacggacgtcaatactgtaataaaggtggtagtattgtcatcatcgtgataaactacgggaatatggtcgttagtaggtacggtaactttacacaacgcgatatataactttccttttgtaccatttttaacgtagttgggacgtcctgcagggtattgttttgaagaaatgatatcgagaacagatttgatacgatatttgttggattcctgattattcactataatataatctagacagatagatgattcgataaatagagaaggtatatcgttggtaggataatacatccccattccagtattctcggatactctattgatgacactagttaagaacatgtcttctattctagaaaacgaaaacatcctacatggactcattaaaacttctaacgctcctgattgtgtctcgaatgcctcgtacaaggatttcaaggatgccatagattctttgaccaacgatttagaattgcgtttagcatctgatttttttattaaatcgaatggtcggctctctggtttgctaccccaatgataacaatagtcttgtaaagataaaccgcaagaaaatttatacgcatccatccaaataaccctagcaccatcggatgatattaatgtattattatagattttccatccacaattattgggccagtatactgttagcaacggtatatcgaatagattactcatgtaacctactagaatgatagttcgtgtactagtcataatatctttaatccaatctaaaaaatttaaaattagattttttacactgttaaagttaacaaaagtattacccgggtacgtggatatcatatatggcattggtccattatcagtaatagctccataaactgatacggcgatggtttttatatgtgtttgatctaacgaggaagaaattcgcgcccacaattcatctctagatatgtatttaatatcaaacggtaacacatcaatttcgggacgcgtatatgtttctaaatttttaatccaaatataatgatgacctatatgccctattatcatactgtcaactatagtacacctagggaacttacgatacatctgtttcctataatcgttaaattttacaaatctataacatgctaaaccttttgacgacagccattcattaatttctgatatggaatctgtattctcgataccgtatcgttctaaagccagtgctatatctccctgttcgtgggaacgctttcgtataatatcgatcaacggataatctgaagtttttggagaataatatgactcatgatctatttcgtccataaacaatctagacataggaattggaggcgatgatcttaattttgtgcaatgagtcgtcaatcctataacttctaatcttgtaatattcatcatcgacataatactatctatgttatcatcgtatattagtataccatgaccttcttcatttcgtgccaaaatgatatacagtcttaaatagttacgcaatatctcaatagtttcataattgttagctgttttcatcaaggtttgtatcctgtttaacatgatggcgttctataacgtctctattttctatttttaattttttaaatttttaacgatttactgtggctagatacccaatctctctcaaatatttttttagcctcgcttacaagctgtttatctatactattaaaactgacgaatccgtgattttggtaatgggttccgtcgaaatttgccgaagtgatatgaacatattcgtcgtcgactatcaacaattttgtattattctgaatagtgaaaaccttcacagatagatcattttgaacacacaacgcatctagacttttggcggttgccatagaatatacgtcgttcttatcccaattaccaactagaagtctgatcttaactcctctattaatggctgcttctataatggagttgtaaatgtcgggccaatagtagctattaccgtcgacacgtgtagtgggaactatggccaaatgttcaatatctatactagtcttagctgacctgagtttatcaataactacatcggtatctagatctctagaatatcccaataggtgttccggagaatcagtaaagaacactccacctataggattcttaatatgatacgcagtgctaactggcaaacaacaagccgcagagcataaattcaaccatgaattttttgcgctattaaaggctttaaaagtatcaaatcttctacgaagatctgtggccagcgggggataatcagaatatacacctaacgttttaatcgtatgtatagatcctccagtaaatgacgcgtttcctacataacatctttcatcatctgacacccaaaaacaaccgagtagtagtcccacattattttttttatctatattaacggttataaaatttatatccgggcagtgactttgtagctctcccagatttcttttccctcgttcatctagcaaaactattattttaatccctttttcagatgcctcttttagtttatcaaaaataagcgctcccctagtcgtactcagaggattacaacaaaaagatgctatgtatatatatttcttagctagagtgataatttcgttaaaacattcaaatgttgttaaatgatcggatctaaaatccatattttctggtagtgtttctaccagcctacattttgctcccgcaggtaccgatgcaaatggccacatttagttaacataaaaacttatacatcctgttctatcaacgattctagaatatcatcggctatatcgctaaaattttcatcaaagtcgacatcacaacctaactcagtcaatatattaagaagttccatgatgtcatcttcgtctatttctatatccgtatccattgtagattgttgaccgattatcgagtttaaatcattactaatactcaatccttcagaatacaatctgtgtttcattgtaaatttataggcggtgtatttaagttggtagattttcaattatgtattaatatagcaacagtagttcttgctcctccttgattctagcatcctcttcattattttcttctacgtacataaacatgtccaatacgttagacaacacaccgacgatggcggccgctacagacacgaatatgactaaaccgatgaccatttaaaaacccctctctagctttcacttaaactgtatcgatcattcttttagcacatgtataatataaaaacattattctatttcgaatttaggcttccaaaaatttttcatccgtaaaccgataataatatatatagacttgttaatagtcggaataaatagattaatgcttaaactatcatcatctccacgattagagatacaatatttacattctttttgctgtttcgaaactttatcaatacacgttaatacaaacccaggaaggagatattgaaactgaggctgttgaaaatgaaacggtgaatacaataattcagataatgtaaaatcatgattccgtattctgatgatattagaactgctaatggatgtcgatggtatgtatctaggagtatctattttaacaaagcatcgatttgctaatatacaattatccttttgattaattgttattttattcatattcttaaaaggtttcatatttatcaattcttctacattaaaaatttccatttttaatttatgtagccccgcaatactcctcattacgtttcattttttgtctataatatccattttgttcatctcggtacatagattatccaattgagaagcgcatttagtagttttgtacattttaagtttattgacgaatcgtcgaaaactagttatagttaacattttattatttgataccctgatattaatacccctgccgttactattatttataactgatgtaatccacgtaacattggaattaactatcgatagtaatgcatcgacgcttccaaaattgtctattataaactcaccgataatttttttattgcatgttttcatattcattaggattatcaaatctttaatcttattacgattgtatgcgttgatattacaagacgtcattctaaaagacggaggatctccatcaaatgccagacaatcacgtacaaagtacatggaaataggttttgttctattgcgcatcatagatttatatagaacacccgtagaaatactaatttgttttactctataaaatactaatgcatctatttcatcgttttgtataacgtctttccaagtgtcaaattccaaatttttttcattgatagtaccaaattcttctatctctttaactacttgcatagataggtaattacagtgatgcctacatgccgttttttgaaactgaatagatgcgtctagaagcgatgctacgctagtcacaatcaccactttcatatttagaatatatatatgtaaaaatatagtagaatttcattttgtttttttctatgctataaatgaattctcattttgcatctgctcatactccgttttatattaataccaaagaaggaagatatctggttctaaaagccgttaaagtatgcgatgttagaactgtagaatgcgaaggaagtaaagcttcctgcgtactcaaagtagataaaccctcatcgcccgcgtgtgagagaagaccttcgtccccgtccagatgcgagagaatgaataaccctggaaaacaagttccgtttatgaggacggacatgctacaaaatatgttcgcggctaatcgcgataatgtagcttctagacttttgtcctaaaatactattatatccttttcgatattaataaatccgtgtcgtccaggttttttatctctttcagtatgtgaatagataggtattttatctctattcatcatcgaatttaagagatccgataaacattgtttgtattctccagatgtcagcatctgatacaacaatatatgtgcacataaacctctggcacttatttcatgtaccttccccttatcactaaggagaatagtatttgagaaatatgtatacatgatattatcatgaattagatatacagaatttgtaacactctcgaaatcacacgatgtgtcggcgttaagatctaatatatcactcgataacacattttcatctagatacactagacattttttaaagctaaaatagtctttagtagtaacagtaactatgcgattattttcatcgatgatacatttcatcggcatattattacgcttaccatcaaagactataccatgtgtatatctaacgtattctagcatggttgccatacgcgcattaaacttttcaggatctttggatagatcttccaatctatctatttgagaaaacatttttatcatgttcaatagttgaaacgtcggatccactatatagatattatctataaagattttaggaactacgttcatggtatcctggcgaatattaaaactatcaatgatatgattatcgttttcatcttttatcaccatatagtttctaagatatgggattttacttaatataatattatttcccgtgataaattttattagaaaggccaaatctataagaaaagtcctagaattagtctgaagaatatctatatcgccgtatagtatatttggattaattagatatagagaatatgatccgtaacatatacaacttttattatggcgtctaagatattcttccatcaacttattaacatttttgactagggaagatacattatgacgtcccattacttttgccttgtctattactgcgacgttcatagaatttagcatatctcttgccaattcttccattgatgttacattataagaaattttagatgaaattacatttggagctttaatagtaagaactcctaatatgtccgtgtatgtggtcactaatacagattgtagttctataatcgtaaataatttacctatattatatgtttgagtctgtttagaaaagtagctaagtatacgatcttttatttctgatgcagatgtattaacatcggaaaaaaatctttttttattcttttttactaaagatacaaatatgtctttgttaaaaacagttattttctgaatatttctagcttgtaattttaacatatgatattcgttcacactaggtactctgcctaaataggtttctataatctttaatgtaatattaggaaaagtattctgatcaggattcctattcattttgaggatttaaaactctgattattgtctaatatggtctctacgcaaactttttcacagagcgatagagtttttgataactcgtttttcttaagaaatataaaactactgtctccagagctcgctctatcttttattttatctaattcgatacaaactcctgatactggttcagaaagtaattcattaattttcagtcctttatagaagatatttaatatagataatacaaaatcttcagtttttgatatcgatctgattgatcctagaactagatatattaataacgtgctcattaggcagtttatggcagcttgataattagatatagtatattccagttcatatttattagataccgcattgcccagattttgatattctatgaattcctctgaaaataaatccaaaataactagacattctattttttgtggattagtgtactctcttccctctatcatgttcactactggtgtccacgatgataaatatctagagggaatataatatagtccataggatgccaatctagcaatgtcgaataactgtaattttattcttcgctcttcattatgaattgattcttgaggtataaacctaacacaaattatattattagacttttcgtatgtaatgtctttcatgttataagtttttaatcctggaatagaatctattttaatgaggcttttaaacgcagagttctccaacgagtcaaagcataatactctgttgtttttcttatatacgatgttacgattttcttctttgaatggaataggtttttgaattagtttataattacaacataatagataaggaagtgtgcaaatagtacgcggaaaaaacataatagctcccctgttttcatccatggttttaagtaaatgatcactggcttctttagtcaatggatattcgaacattaaccgtttcatcatcattggacagaatccatatttcttaatgtaaagagtgatcaaatcattgtgtttattgtaccatcttgttgtaaatgtgtattcggttatcggatctgctcctttttctattaaagtatcgatgtcaatctcgtctaagaattcaactatatcgacatatttcatttgtatacacataaccattactaacgtagaatgtataggaagagatgtaacgggaacagggtttgttgattcgcaaactattctaatacataattcttctgttaatacgtcttgcacgtaatctattatagatgccaagatatctatataattattttgtaagatgatgttaactatgtgatctatataagtagtgtaataattcatgtattttgatatatgttccaactctgtctttgtgatgtctagtttcgtaatatctatagcatcctcaaaaaatatattcgcatatattcccaagtcttcagttctatcttctaaaaaatcttcaacgtatggaatataataatctattttacctcttctgatatcattaatgatatagtttttgacactatcttctgtcaattgattcttattcactatatctaagaaacggatagcgtccctaggacgaactactgccattaatatctctattatagcttctggacataattcatctattataccagaattaatgggaactattccgtatctatctaacatagttttaagaaagtcagaatctaagacctgatgttcatatattggttcatacatgaaatgatctctattgatgatagtgactatttcattctctgaaaattggtaactcattctatatatgctttccttgttgatgaaggatagaatatactcaatagaatttgtaccaacaaactgttctcttatgaatcgtatatcatcatctgaaataatcatgtaaggcatacatttaacaattagagacttgtctcctgttatcaatatactattcttgtgataatttatgtgtgaggcaaatttgtccacgttctttaattttgttatagtagatatcaaatccaatggagctacagttcttggcttaaacagatatagtttttctggaacaaattctacaacattattataaaggactttgggtaaataagtgggatgaaatcctattttaattaatgcgatagccttgtcctcgtgcagatatccaaacgcttttgtgatagtatggcattcattgtctagaaacgctctacgaatatctgtgacagatatcatctttagagaatatactagtcgcgttaatagtactacaatttgtattttttaatctatctcaataaaaaaattaatatgtatgattcaatgtataactaaactactaactgttattgataactagaatcagaatctaatgatgacgtacccaagaagtttatctactgccaatttagctgcattatttttagcatctcgtttagattttccatctgccttatcgaatactcttccgtcgatatctacacaggcataaaatgtaggagagttactaggcccaactgattcaatacgaaaagaccaatctctcttagttatttggcagtactcattaataacggtgacagggttagcatctttccaatcaataatttttttagccggaataacatcatcaaaagacttatgatcctctctcattgatttttcgcgggatacatcatctattatgacgtcagccataacatcagcatccggcttatccgcctccgttgtcataaaccaacgaggaggaatatcgtcggagctgtacaccatagcactacgttgaagatcgtacagagctttattaacttctcgcttctccatattaagttgtctagttagttgtgcagcagtagctccttcgattccaatggttttaatagcctcacacacaatctctgcgttagaacgttcgtcgatatagattttagacatttttagagagaactaacacaaccagcaataaaactgaacctactttatcatttttttattcatcatcctctggtggttcgtcgttcctatcaaatgtagctctgattaacccgtcatctataggtgatgctggttctggagattctggaggagatggattattatctggaagaatctctgttatttccttgttttcatgtatcgattgcgttgtaacattaagattgcgaaatgctctaaatttgggaggcttaaagtgttgtttgcaatctctacacgcgtgtctaactagtggaggttcgtcagctgctctagtttgaatcatcatcggcgtagtattcctacttttacagttaggacacggtgtattgtatttctcgtcgagaacgttaaaataatcgttgtaactcacatcctttattttatctatattgtattctactcctttcttaatgcattttataccgaataagagatagcgaaggaattctttttcggtgccgctagtacccttaatcatatcacatagtgttttatattccaaatttgtggcaatagacggtttatttctatacgatagtttgtttctggaatcctttgagtattctataccaatattattctttgattcgaatttagtttcttcgatattagattttgtattacctatattcttgatgtagtactttgatgatttttccatggcccattctattaagtcttccaagttggcatcatccacatattgtgatagtaattctcggatatcagtagcggctaccgccattgatgtttgttcattggatgagtaactactaatgtatacattttccatttataacacttatgtattaactttgttcatttatattttttcattattatgttgatattaacaaaagtgaatatatatatatgttaataattgtattgtggttatacggctacaattttataatgagtgaaagtcagtgtccgatgatcaatgacgatagctttactctgaaaagaaagtatcaaatcgatagtgcggagtcaacaataaaaatggataagaagaggataaagtttcagaatagagccaaaatggtaaaagaaataaatcagacaataagagcagcacaaactcattacgagacattgaaactaggatacataaaatttaagagaatgattaggactactactctagaagatatagcaccatctattccaaataatcagaaaacttataaactattctcggacatttcagccatcggcaaagcatcacagaatccgagtaagatggtatatgctctgctgctttacatgtttcccaatttgtttggagatgatcatagattcattcgttatagaatgcatccaatgagtaaaatcaaacacaagatcttctctcctttcaaacttaatcttattagaatattagtggaagaaagattctataataatgaatgcagatctaataaatggaaaataattggaacacaagttgataaaatgttgatagctgaatctgataaatatacaatagatgcaaggtataacctaaaacccatgtatagaatcaagggagaatctgaagaagataccctcttcatcaaacagatggtagaacaatgtgtgacatcccaggaattggtggaaaaagtgttgaagatactgtttagagatttgttcaagagtggagaatacaaagcgtacagatacgatgatgatgtagaaaatggattcattggattggatacactaaaattaaacattgttcatgatatagttgaaccatgtatgcctgttcgtaggccagtggctaagatactgtgtaaagaaatggtaaataaatactttgagaatccgctacatattattggtaaaaatcttcaagagtgcattgactttgttagtgaataggcatttcatctttctccaatactaattcaaattgttaaattaataatggatagtataaatagttattagttataagatagtaaaaataattattagaataagagtgtagtatcatagataactctcttctataaaaatggattttattcgtagaaagtatcttatatacacagtagaaaataatatagattttttaaaggatgatacattaagtaaagtaaacaattttaccctcaatcatgtactagctctcaagtatctagttagcaattttcctcaacatgttattactaaggatgtattagctaataccaatttttttgttttcatacatatggtacgatgttgtaaagtgtacgaagcggttttacgacacgcatttgatgcacccacgttgtacgttaaagcattgactaagaattatttatcgtttagtaacgcaatacaatcgtacaaggaaaccgtgcataaactaacacaagatgaaaaatttttagaggttgccgaatacatggacgaattaggagaacttataggcgtaaattatgacttagttcttaatccattatttcacggaggggaacccatcaaagatatggaaatcatttttttaaaactgtttaagaaaacagacttcaaagttgttaaaaaattaagtgttataagattacttatttgggcatacctaagcaagaaagatacaggcatagagtttgcggataatgatagacaagatatatatactctatttcaacaaactggtagaatcgtccatagcaatctaacagaaacgtttagagattatatctttcccggagataagactagctattgggtgtggttaaacgaaagtatagctaatgatgcggatatcgttcttaatagacccgccattaccatgtatgataaaattcttagttatatatactctgagataaaacaaggacgcgttaataaaaacatgcttaagttagtttatatctttgagcctgaaaaagatatcagagaacttctgctagaaatcatatatgatattcctggagatatcctatctattattgatgcaaaaaacgacgattggaaaaaatattttattagtttttataaagctaattttattaacggtaatacatttattagtgatagaacgtttaacgaggacttattcagagttgttgttcaaatagatcccgaatatttcgataatgaacgaattatgtctttattctctacgagtgctgcggacattaaacgatttgatgagttagatattaataacagttatatatctaatataatttatgaggtgaacgatatcacattagatacaatggatgatatgaagaagtgtcaaatctttaacgaggatacgtcgtattatgttaaggaatacaatacatacctgtttttgcacgagtcggatcccatggtcatagagaacggaatactaaagaaactgtcatctataaaatccaagagtagacggctgaacttgtttagcaaaaacattttaaaatattatttagacggacaattggctcgtctaggtcttgtgttagatgattataaaggagacttgttagttaaaatgataaaccatcttaagtctgtggaggatgtatccgcattcgttcgattttctacagataaaaaccctagtattcttccatcgctaatcaaaactattttagctagttataatatttccatcatcgtcttatttcaaaggtttttgagagataatctatatcatgtagaagaattcttggataaaagcatccatctaaccaagacggataagaaatatatacttcaattgataagacacggtagatcatagaacagaccaaatatattattaataatttgtatatacatagatataattatcacacatttttgataaatgggaactgctgcaacaattcagactcccaccaaattaatgaataaagaaaatgcagaaatgattttggaaaaaattgttgatcatatagttatgtatattagtgacgaatcaagtgattcagaaaataatcctgaatatattgattttcgtaacagatacgaagactatagatctctcattataaaaagtgatcacgagtttgtaaagctatgtaaaaatcatgcggagaaaagttctccagaaacgcaacaaatgattatcaaacacatatacgaacaatatcttattccagtatctgaagtactattaaaacctataatgtccatgggtgacataattacatataacggatgtaaagacaatgaatggatgctagaacaactctctaccctaaactttaacaatctccgcacatggaactcatgtagcataggcaatgtaacgcgtctgttttatacattttttagttatctgatgaaagataaactaaatatataagtataatcccattctaatactttaacctgatgtattagcatcttattagaatattaacctaactaaaagacataacataaaaactcattacatagttgataaaaagcggtaggatataaatattatggctgccaccgttccgcgttttgacgacgtgtacaaaaatgcacaaagaagaattctagatcaagaaacattttttagtagaggtctaagtagaccgttaatgaaaaacacatatctatttgataattacgcgtatggatggataccagaaactgcaatttggagtagtagatacgcaaacttagatgcaagtgactattatcccatttcgttgggattacttaaaaagttcgagtttctcatgtctctatataaaggtcctattccagtatacgaagaaaaagtaaatactgaattcattgctaatggatctttctccggtagatacgtatcatatcttagaaagttttctgctcttccaacaaacgagtttattagttttttgttactgacttccattccaatctataatatcttgttctggtttaaaaatactcagtttgatattactaaacacacattattcagatacgtctatacagataatgccaaacacctggcgttggctaggtatatgtatcaaacaggagactataagcctttgtttagtcgtctcaaagagaattatatatttaccggtcccgttccaatatgtatcaaagatatagatcaccctaatcttagtagagcaagaagtccatccgattatgagacattagctaatattagtactatattgtactttaccaagtatgatccggtattaatgtttttattgttttacgtacctgggtattcaattactacaaaaattactccagccgtagaatatctaatggataaactgaatctaacaaagagcgacgtacaactgttgtaaattattttatgcttcgtaaaatgtaggttttgaaccaaacattctttcaaagaatgagatgcataaaactttattatccaatagattgactatttcggacgtcaatcgtttaaagtaaacttcgtaaaatattctttgatcactgccgagtttaaaacttctatcgataattgtttcatatgttttaatatttacaagttttttggtccatggtccattaggacaaatatatgcaaaataatatcgttctccaagttctatagtctctggattatttttattatattcagtaaccaaatacatattagggttatctgcggatttataatttgagtgatgcattcgactcaacataaataattctagaggagacgatctactatcaaattcggatcgtaaatctgtttctaaagaacggagaatatctatacatacctgattagaattcatccgtccttcagacaacatctcagacagtctggttttgtacatcttaatcatattcttatgaaacttggaaacatctcttctagtttcactagtacctttattaattctctcaggtacagattttgaattcgacgatgctgagtatttcatcgttgtatatttcttcttcgattgcataatcagattcttatataccgcctcaaactctattttaaaattattaaacaatactctattattaatcagtcgttctaactctttcgctatttctatagacttatctacatcttgactgtctatctctgtaaacacggagtcggtatctccatacacgctacgaaaacgaaatctgtaatctataggcaacgatgttttcacaatcggattaatatctctatcgtccatataaaatggattacttaatggattggcaaaccgtaacataccgttagataactctgctccatttagtaccgattctagatacaagatcattctacgtcctatggatgtgcaactcttagccgaagcgtatgagtatagagcactatttctaaatcccatcagaccatatactgagttggctactatcttgtacgtatattgcatggaatcatagatggccttttcagttgaactggtagcctgttttagcatctttttatatctggctctctctgccaaaaatgttcttaatagtctaggaatggttccttctatcgatctatcgaaaattgctatttcagagatgaggttcggtagtctaggttcacaatgaaccgtaatatatctaggaggtggatatttctgaagcaatagctgattatttatttcttcttccaatctattggtactaacaacgacaccgactaatgtttccggagatagatttccaaagatacacacattaggatacagactgttataatcaaagattaatacattattactaaacattttttgttttggagcaaataccttaccgccttcataaggaaacttttgttttgtttctgatctaactaagatagttttagtttccaacaatagctttaacagtggacccttgatgactgtactcgctctatattcgaataccatggattgaggaagcacatatgttgacgcacccgcgtctgtttttgtttctactccataatactcccacaaatactgacacaaacaagcatcatgaatacagtatctagccatatctaaagctatgtttagattataatccttatacatctgagctaaatcaacgtcatcctttccgaaagataatttatatgtatcattaggtaaagtaggacataatagtacgactttaaatccattttcccaaatatctttacgaattactttacatataatatcctcatcaacagtcacataattacctgtggttaaaacctttgcaaatgcagcggctttgcctttcgcgtccgtagtatcgtcaccgatgaacgtcatttctctaactcctttatttaatactttacccatgcaactgaacgcgttcttggatatagaatccaatttgtacgaatccaatttttcaaatttttgaatgaatgaatatagatcgaaaaatatagttccattattgttattaacgtgaaacgtagtattggccatgccgcctactcccttatgactagactgatttctctcataaatacagagatgtacagcttcctttttgtccggagatctaaagataatcttctctcctgttaataactctagacgattagtaatatatctcagatcaaagttatgtccgttaaaggtaacgacatagtcgaacgttagttccaacaattgtttagctattcgtaacaaaactatttcagaacataaaactagttctcgttcgtaatccatttccattagtgactgtatcctcaaacatcctctatcgacggcttcttgtatttcctgttccgttaacatctcttcattaatgagcgtaaacaataatcgtttaccacttaaatcgatataacagtaacttgtatgcgagattgggttaataaatacagaaggaaacttcttatcgaagtgacactctatatctagaaataagtacgatcttgggatatcgaatctaggtatttttttagcgaaacagttacgtggatcgtcacaatgataacatccattgttaatctttgtcaaatattgctcgtccaacgagtaacatccgtctggagatatcccgttagaaatataaaaccaactaatattgagaaattcatccatggtggcattttgtatgctgcgtttctttggctcttctatcaaccacatatctgcgacggagcattttctatctttaatatctagattataacttattgtctcgtcaatgtctatagttctcatctttcccaacggcctcgcattaaatggaggaggagacaatgactgatatatttcgtccgtcactacgtaataaaagtaatgaggaaatcgtataaatacggtctcaccatttcgacatctggatttcagatataaaaatctgttttcaccgtgactttcaaaccaattaatgcaccgaacatccatttatagaatttagaaatatattttcatttaaatgaatcccaaacattggggaagagccgtatggaccattatttttatagtactttcgcaagcgggtttagacggcaacatagaagcgtgtaaacgaaaactatatactatagttagcactcttccatgtcctgcatgtagacggcacgcgactatcgctatagaggacaataatgtcatgtctagcgatgatctgaattatatttattattttttcatcagattatttaacaatttggcatctgatcccaaatacgcgatcgatgtgacaaaggttaaccctttataaacttaacccattataaaacttatgattagtcacaactgaaataaccgcgtgattattttttggtataattctacacggcatggtttctgtgactatgaattcaacccccgttacattagtgaaatctttaacaaacagcaagggttcgtcaaagacataaaactcattgtttacaatcgaaatagaccccctatcacacttaaaataaaaaatatccttatcctttaccaccaaataaaattctgattggtcaatgtgaatgtattcacttaacagttccacaaatttatttattaactccgaggcacatacatcgtcggtattttttatggcaaactttactcttccagcatccgtttctaaaaaaatattaacgagttccatttatatcatccaatattattgaaatgacgttgatggacagatgatacaaataagaaggtacggtacctttgtccaccatctcctccaattcatgctctattttgtcattaactttaatgtatgaaaacagtacgccacatgcttccatgacagtgtgtaacactttggatacaaaatgtttgacattagtataattgttcaagactgtcaatctataatagatagtagctataatatattctatgatggtattgaagaagatgacaaccttggcatattgatcatttaacacagacatggtatcaacagatagcttgaatgaaagagaatcagtaattggaataagcgtcttctcgatagagtgtccgtataccaacatgtctgatattttgatgtattccattaaattatttagttttttctttttattctcgttaaacagcatttctgtcaacggaccccaacatcgttgaccgattaagttttgattgatttttccgtgtaaggcgtatctagtcagatcgtatagcctatccaataatccatcatctgtgcgtagatcacatcgtacactttttaattctctatagaagagcgacagacatctggagcaattacagacagcaatttctttattctctacagatgtaagatacttgaagacattcctatgatgatgcagaattttggataacacggtattgatggtatctgttaccataattcctttgatggctgatagtgtcagagcacaagatttccaatctttgacaatttttagcaccattatctttgttttgatatctatatcagacagcatggtgcgtctgacaacacagggattaagacggaaagatgaaatgattctctcaacatcttcaatagataccttgctattttttctggcattatctatatgtgcgagaatatcctctagagaatcagtatcctttttgatgatagtggatctcaatgacatgggacgtttaaaccttcttattctatcaccagattgcatggtgatttgtcttctttcttttatcataatgtaatctctaaattcatcggcaaattgtctatatctaaaatcataatatgagatgtttacctctacaaatatctgttcgtccaatgttagagtatttacatcagttttgtattccaaattaaacatggcaacggatttaattttatattcctctattaagtcctcgtcgataataacagaatgtagataatcatttaatccatcgtacatggttggaagatgcttgttgacaaaatctttaattgtcttgatgaaggtgggactatatctaacatcttgattaataaaatttataacattgtccataggatactttgtaactagttttatacacatctcttcatcggtaagtttagacagaatatcgtgaacaggtggtatattatattcatcagatatacgaagaacaatgtccaaatctatattgtttaatatattatatagatgtagcgtagctcctacaggaatatctttaactaagtcaatgatttcatcaaccgttagatctattttaaagttaatcatataggcattgatttttaaaaggtatgtagccttgactacattctcattaattaaccattccaagtcactgtgtgtaagaagattatattctatcataagcttgactacatttggtcccgataccattaaagaattcttatgatataaggaaacagcttttaggtactcatctactctacaagaattttggagagccttaacgatatcagtgacgtttattatttcaggaggaaaaaacctaacattgagaatatcggaattaatagcttccagatacagtgattttggcaatagtccgtgtaatccataatccagtaacacgagctggtgcttgctagacaccttttcaatgtttaatttttttgaaataagctttgataaagccttcctcgcaaattccggatacatgaacatgtcggcgacatgattaagtattgttttttcattattttctcaataccccaatagatgatagaatatcacccaatgcgtccatgttgtctatttccaacaggtcgctatatccaccaatagaagtttttccaaaaaagattctaggaacagttctaccaccagtaatttgttcaaaatagtcacgcaattcattttcgggtttaaattctttaatatcgacaatttcatacgctcctcttttgaaactaaacttatttagaatatccagtgcatttctacaaaaaggacatgtatacttgacaaaaattgtcactttgttattggccaacctttgttgtacaaattcctcggccattttaatatttaagtgatataaaactatctcgacttatttaactctttagtcgagatatatggacgcagatagctatatgatagccaactacagaaggcaaacgctataaaaaacataattacgacgagcatatttataaatatttttattcagcattacttgatatagtaatattaggcacagtcaaacattcaaccactctcgatacattaactctctcattttctttaacaaattctgcaatatcttcgtaaaaagattcttgaaactttttagaatatctatcgactctagatgaaatagcgttcgtcaacatactatgttttgtatacataaaggcgcccattttaacagtttctagtgacaaaatgctagcgatcctaggatcctttagaatcacatagattgacgattcgtctctcttagtaactctagtaaaataatcatacaatctagtacgcgaaataatattatccttgacttgaggagatctaaacaatctagttttgagaacatcgataagttcatcgggaatgacatacatactatctttaatagaactcttttcatccagttgaatggattcgtccttaaccaactgattaatgagatcttctattttatcattttccagatgatatgtatgtccattaaagttaaattgtgtagcgcttctttttagtctagcagccaatactttaacatcactaatatcgatatacaaaggagatgatttatctatggtattaagaattcgtttttcgacatccgtcaaaaccaattcctttttgcctgtatcatccagttttccatcctttgtaaagaaattattttctactagactattaataagactgataaggattcctccataattgcacaatccaaactttttcacaaaactagactttacaagatctacaggaatgcgtacttcaggttttttagcttgtgattttttcttttgcggacattttcttgtgaccaactcatctaccatttcattgattttagcagtgaaataagctttcaatgcacgggcactgatactattgaaaacgagttgatcttcaaattccgccatttaagttcaccaaacaacttttaaatacaaatatatcaatagtagtagaataagaactataaaaaaaataataattaaccaataccaaccccaacaaccggtattattagttgatgtgactgttttctcatcacttagaacagatttaacaatttctataaagtctgtcaaatcatcttccggagaccccataaatacaccaaatatagcggcgtacaacttatccatttatacattgaatattggcttttctttatcgctatcttcatcatattcatcatcaatatcaacaagtcccagattacgagccagatcttcttctacattttcagtcattgatacacgttcactatctccagagagtccgataacgttagccaccacttctctatcaatgattagtttcttgagcgcgaaagtaatttttgtttccgttccggatctatagaagacgataggtgtgataattgccttggccaattgtctttctcttttactgagtgattctagttcaccttctatagatctgagaatggatgattctccagtcgaaacatattctaccatggatccgtttaatttgttgatgaagatggattcatccttaaatgttttctctgtaatagtttccaccgaaagactatgcaaagaatttggaatgcgttccttgtgcttaatgtttccatagacggcttctagaagttgatacaacataggactagccgcggtaacttttatttttagaaagtatccatcgcttctatcttgtttagatttatttttataaagtttagtctctccttccaacataataaaagtggaagtcatttgactagataaactatcagtaagttttatagagatagacgaacaattagcgtattgagaagcatttagtgtaacgtattcgatacattttgcattagatttactaatcgattttgcatactctataacacccgcacaagtctgtagagaatcgctagatgcagtaggtcttggtgaagtttcaactctcttcttgattaccttactcatgattaaacctaaataattgtactttgtaatataatgatatatattttcactttatctcatttgagaataaaaatgtttttgtttaaccactgcatgatgtacagatttcggaatcgcaaaccaccagtggttttattttatccttgtccaatgtgaattgaatgggagcggatgcgggtttcgtacgtagatagtacattcccgtttttagaccgagactccatccgtaaaaatgcatactcgttagtttggaataactcggatctgctatatggatattcatagattgactttgatcgatgaaggctcccctgtctgcagccatttttatgatcgtcttttgtggaatttcccaaatagttttataaactcgcttaatatcttctggaaggtttgtattctgaatggatccaccatctgccataatcctattcttgatctcatcattccataattttctctcggttaaaactctaaggagatgcggattaactacttgaaattctccagacaatactctccgagtgtaaatattactggtatacggttccaccgactcattatttcccaaaatttgagcagttgatgcagtcggcataggtgccaccaataaactatttctaagaccgtatgttctgattttatcttttagaggttcccaattccaaagatccgacggtacaacattccaaagatcatattgtagaataccgttactggcgtacgatcctacatatgtatcgtatggtccttccttctcagctagttcacaactcgcctctaatgcaccgtaataaatggtttcgaagatcttcttatttagatcttgtgcttccaggctatcaaatggataatttaagagaataaacgcgtccgctaatccttgaacaccaataccgataggtctatgtctcttattagagatttcagcttctggaataggataataattaatatctataattttattgagatttctgacaattactttgaccacatccttcagtttgagaaaatcaaatcgcccatctattacaaacatgttcaaggcaacagatgccagattacaaacggctacctcattagcatccgcatattgtattatctcagtgcaaagattactacacttgatagttcctaaattttgttgattactctttttgttacacgcatccttataaagaatgaatggagtaccagtttcaatctgagattctataatcgctttccagacgactcgagcctttattatagatttgtatctcctttctctttcgtatagtgtatacaatcgttcgaactcgtctccccaaacattgtccaatccaggacattcatccggacacatcaacgaccactctccgtcatccttcactcgtttcataaagagatcaggaatccaaagagctataaatagatctctggttctatgttcctcgtttcctgtattctttttaagatcgaggaacgccataatatcagaatgccacggttccaagtatatggccataactccaggccgtttgtttcctccctgatctatgtatctagcggtgttattataaactctcaacattggaataataccgtttgatataccattggtaccggagatatagcttccactggcacgaatattactaattgatagacctattccccctgccattttagagattaatgcgcatcgttttaacgtgtcatagataccctctatgctatcatcgatcatgttaagtagaaaacagctagacatttggtgacgactagttcccgcattaaataaggtaggagaagcgtgcgtaaaccatttttcagaaagtagattgtacgtctcaatagctgagtctatatcccattgatgaattcctactgcgacacgcattaacatgtgctgaggtctttcaacgatcttgttgtttattttcaacaagtaggatttttccaaagttttaaaaccaaaatagttgtatgaaaagtctcgttcgtaaataataaccgagttgagtttatccttatatttgttaactatatccatggtgatacttgaaataatcggagaatgtttcccatttttaggattaacatagttgaataaatcctccatcacttcactaaatagtttttttgtttccttgtgtagatttgatacggctattctggcggctagaatggcataatccggatgttgtgtagtacaagtggctgctatttcggctgccagagtgtccaattctaccgttgttactccattatatattccttgaataaccttcatagctattttaataggatctatatgatccgtgtttaagccataacataattttctaatacgagacgtgattttatcaaacatgacattttccttgtatccatttcgtttaatgacaaacatttttgttggtgtaataaaaaaattatttaacttttcattaatagggatttgacgtatgtagcgtacaaaatgatcgttcctggtatatagataaagagtcctatatatttgaaaatcgttacggctcgattaaactttaatgattgcatagtgaatatatcattaggatttaactccttgactatcatggcggcgccagaaattaccatcaaaagcattaatacagttatgccgatcgcagttagaacggttatagcatccaccatttatatctaaaaattagatcaaagaatatgtgacaaagtcctagttgtatactgagaattgacgaaacaatgtttcttacatatttttttcttattagtaactgacttaatagtaggaactggaaagctagacttgattattctataagtatagatacccttccaaataatattctctttgataaaagttccagaaaatgtagaattttttaaaaagttatcttttgctattaccaagattgtgtttagacgcttattattaatatgagtgatgaaatccacaccgcctctagatatcgcctttatttccacattagatggtaaatccaatagtgaaactatctttttaggaatgtatggactcgcgtttagaggagtgaacgtcttgggcgtcggaaaggatgattcgtcaaacgaataaacaatttcacaaatggatgttaatgtattagtaggaaattttttgacgctagtggaattgaagattctaatggatgatgttctacctatttcatccgataacatgttaatttccgacaccaacggttttaatatttcgatgatatacggtagtctctctttcggacttatatagcttattccacaatacgagtcattatatactccaaaaaacaaaataactagtataaaatctgtatcgaatgggaaaaacgaaattatcgacataggtatagaatccggaacattgaacgtattaatacttaattctttttctgtggtaagtaccgataggttattgacattgtatggttttaaatattctataacttgagacttgatagatattagtgatgaattgaaaattatttttatcaccacgtgtgtttcaggatcatcgtcgacgcccgtcaaccaaccgaatggagtaaaataaatatcattaatatatgctctagatattagtatttttatcaatcctttgattatcatcttctcgtaggcgaatgattccatgatcaagagtgatttgagaacatcctccggagtattaatgggcttagtaaacagtccatcgttgcaataataaaagttatccaagttaaaggatattatgcattcgtttaaagatatcacctcatctgacggagacaattttttggtaggttttagagactttgaagctacttgtttaacaaagttattcatcgtcgtctactattctatttaattttgtagttaatttatcacatatcacattaattgactttttggtccatttttccatacgtttatattcttttaatcctgcgttatccgtttccgttatatccagggatagatcttgcaagttaaatagaatgctcttaaataatgtcattttcttatccgctaaaaatttaaagaatgtataaacctttttcagagatttgaaacttttaggtggagttctagtacacaatatcataaacaaactaataaacattccacattcagattccaacagctgattaacttccacattaatacagcctattttcgctccaaatgtacattcgaaaaatctgaataaaacatcgatgtcacaatttgtattatccaatacagaatgtttgtgattcgtgttaaaaccatcggagaaggaataaaaataaaaattattatagtggtggaattcagttggaatattgcctccggagtcataaaaggatactaaacattgttttttatcataaattacacatttccaatgagacaaataacaaaatccaaacattacaaatctagaggtagaacttttaattttgtctttaagtatatacgataagatatgtttattcataaacgcgtcaaatttttcatgaatcgctaaggagtttaagaatctcatgtcaaattgtcctatataatccacttcggatccataagcaaactgagagactaagttcttaatacttcgattgctcatccaggctcctctctcaggctctattttcatcttgacgacctttggattttcaccagtatgtattcctttacgtgataaatcatcgattttcaaatccatttgtgagaagtctatcgccttagatactttttcccgtagtcgaggtttaaaaaaatacgctaacggtatactagtaggtaactcaaagacatcatatatagaatggtaacgcgtctttaactcgtcggttaactctttcttttgatcgagttcgtcgctactattgggtctgctcaggtgccccgactctactagttccaacatcataccgataggaatacaagacactttgccggcggttgtagatttatcatatttctccactacatatccgttacaatttgttaaaaatttagatacatctatattgctacataatccagctagtgaatatatatgacataataaattggtaaatcctagttctggtattttactaattactaaatctgtatatctttccatttatcatggaaaagaatttaccagatatcttcttttttccaaactgcgttaatgtattctcttacaaatattcacaagatgaattcagtaatatgagtaaaacggaacgtgatagtttctcattggccgtgtttccagttataaaacatagatggcataacgcacacgttgtaaaacataaaggaatatacaaagttagtacagaagcacgtggaaaaaaagtatctcctccatcactaggaaaacccgcacacataaacctaaccgcgaagcaatatatatacagtgaacacacaataagctttgaatgttatagttttctaaaatgtataacaaatacagaaatcaattcgttcgatgagtatatattaagaggactattagaagctggtaatagtttacagatattttccaattccgtaggtaaacgaacagatactataggtgtactagggaataagtatccatttagcaaaattccattggcctcattaactcctaaagcacaacgagagatattttcagcgtggatttctcatagacctgtagttttaactggaggaactggagtgggtaagacgtcacaggtacccaagttattgctttggtttaattatttatttggtggattctctactctagataaaatcactgactttcacgaaagaccagtcattctatctcttcctaggatagctttagttagattgcatagcaataccattttaaaatcattgggatttaaggtactagatggatctcctatttctttacggtacggatctataccggaagaattaataaacaaacaaccaaaaaaatatggaattgtattttctacccataagttatctctaacaaaactatttagttatggcactcttattatagacgaagttcatgagcatgatcaaataggagatattattatagcagtagcgagaaagcatcatacgaaaatagattctatgtttttaatgactgccacgttagaggatgacagggaacggctaaaagtatttttacctaatcccgcatttatacatattcctggagatacactgtttaaaattagcgaggtatttattcataataagataaatccatcttccagaatggcatacatagaagaagaaaagagaaatttagttactgctatacagatgtatactcctcctgatggatcatccggtatagtctttgtggcatccgttgcacagtgtcacgaatataaatcatatttagaaaaaagattaccgtatgatatgtatattattcatggtaaggtcttagatatagacgaaatattagaaaaagtgtattcatcacctaatgtatcgataattatttctactccttatttggaatccagcgttactatacgcaatgttacacacatttatgatatgggtagagtttttgtccccgctccttttggaggatcgcaacaatttatttctaaatctatgagagatcaacgaaaaggaagagtaggaagagttaatcctggtacatacgtctatttctatgatctgtcttatatgaagtctatacagcgaatagattcagaatttctacataattatatattgtacgctaataagtttaatctaacactccccgaagatttgtttataatccctacaaatttggatattctatggcgtacaaaggaatatatagactcgttcgatattagtacagaaacatggaataaattattatccaattattatatgaagatgatagagtatgctaaactttatgtactaagtcctattctcgctgaggagttggataactttgagaggacgggagaattaactagtattgtacaagaagccattttatctctaaatttacaaattaagattttaaattttaaacataaagatgatgatacgtatatacacttttgtaaaatattattcggtgtctataacggaacaaacgctactatatattatcatagacctctaacgggatatatgaatatgatttcagatactatatttgttcctgtagataataactaaaaattaaactctaatgaccacatctttttttagagatgaaaaattttccacatctccttttgtagacacgactaaacattttgcagaaaaaagtttattagtgtttagataatcgtatacttcatcagtgtagatagtaaatgtgaacagataaaaggtattcttgctcaatagattggtaaattccatagaatatattaatcctttcttcttgagatcccacatcatttcaaccagagacgttttatccaatgatttacctcgtactataccacatacaaaactagattttgcagtgacgtcgtacctggtattcctaccaaacaaaattttacttttagttcttttagaaaattctaaggtagaatctctatttgccaatatgtcatctatggaattaccactagcaaaaaatgatagaaatatatattgatacatcgcagctggttttgatctactatactttaaaaacgaatcagattccataattgcctgtatatcatcagctgaaaaactatgttttacacgtattccttcggcatttctttttaatgatatatcttgtttagacaatgataaagttatcatgtccatgagagacgcgtctccgtatcgtataaatatttcattagatgttagacgcttcattaggggtatacttctataaggtttcttaatcagtccatcattggttgcgtcaagaactactatcggatgttgttgggtatctctagtgttacacatggccttactaaagtttgggtaaataactatgatatctctattaattatagatgcatatatttcattcgtcaaggatattagtatcgacttgctatcgtcattaatacgtgtaatgtaatcatataaatcatgcgatagccaaggaaaatttaaatagatgttcatcatataatcgtcgctataattcatattaatacgttgacattgactaatttgtaatatagcctcgccacgaagaaagctctcgtattcagtttcatcgataaaggataccgttaaatataactggttgccgatagtctcatagtctattaagtggtaagtttcgtacaaatacagaatccctaaaatattatctaatgttggattaatctttaccataactgtataaaatggagacggagtcataactattttaccgtttgtacttactggaatagatgaaggaataatctccggacatgctggtaaagacccaaatgtctgtttgaagaaatccaatgttccaggtcctaatctcttaacaaaaattacgatattcgatcccgatatcctttgcattctatttaccagcatatcacgaactatattaagattatctatcatgtctattctcccaccgttatataaatcgcctccgctaagaaacgttagtatatccatacaatggaatacttcatttctaaaatagtattcgttttctaattctttaatgtgaaatcgtatactagaaagggaaaaattatctttgagttttccgttagaaaagaaccacgaaactaatgttctgattgcgtccgattccgttgctgaattaatggatttacaccaaaaactcatataacttctagatgtagaagcattcgctaaaaaattagtagaatcaaaggatataagtagatgttccaacaagtgagcaattcccaagatttcatctatatcattctcgaatccgaaattagaaattcccaagtagatatcctttttcatccgatcgttgatgaaaatacgaactttattcggtaagacaatcatttactaaggagtaaaataggaagtaatgttcgtatgtcgttatcatcgtataaattaaaggtgtgttttttaccattaagtgacattataattttaccaatattggaattataatataggtgtatttgcgcactcgcgacggttgatgcatcggtaaatatagctgtatctaatgttctagtcggtatttcatcatttcgctgtctaataatagcgttttctctatctgtttccattacagctgcctgaagtttattggtcggataatatgtaaaataataagaaatacatacgaataacaaaaataaaataagatataataaagatgccatttagagatctaattttgtttaacttgtccaaattcctacttacagaagatgaggaatcgttggagatagtgtcttccttatgtagaggatttgaaatatcttataatgacttgataacttactttccagataggaaataccataaatatatttataaagtatttgaacatgtagatttatcggaggaattaagtatggaattccatgatacaactctgagagatttagtctatcttagattgtacaagtattccaagtgtatacggccgtgttataaattaggagataatctaaaaggcatagttgttataaaggacaggaatatttatattagggaagcaaatgatgacttgatagaatatctcctcaaggaatacactcctcagatttatacatattctaatgagcgcgtccccataactggttcaaaattaattctttgtggattttctcaagttacatttatggcgtatacaacgtcgcatataacaacaaataaaaaggtagatgttctcgtttccaaaaaatgtatagatgaactagtcgatccaataaattatcaaatacttcaaaatttatttgataaaggaagcggaacaataaacaaaatactcaggaagatattttattcggtaacaggtggccaaactccataggtagctttttctatttcggattttagaatttccaaattcaccagcgatttatcggttttggtgaaatccaaggatttattaatgtccacaaatgccatttgttttgtctgtggattgtatttgaaaatggaaacgatgtagttagatagatgcgctgcaaagtttcctattagggttccgcgctttacgtcacccagcatacttgaatcaccatcctttaaaaaaaatgataagatatcaacatggagtatatcatactcggattttaattcttctactgactcactgacattttcacaaatactacaatacggtttaccgaaaataatcagtacgttcttcatttatgggtatcaaaaacttaaaatcgttactgctggaaaataaatcactgacgatattagatgataatttatacaaagtatacaatggaatatttgtggatacaatgagtatttatatagccgtcgccaattgtgtcagaaacttagaagagttaactacggtattcataaaatacgtaaacggatgggtaaaaaagggagggcatgtaaccctttttatcgatagaggaagtataaaaattaaacaagacgttagagacaagagacgtaaatattctaaattaaccaaggacagaaaaatgttagaattagaaaagtgtacatccgaaatacaaaatgttaccggatttatggaagaagaaataaaggcagaaatgcaattaaaaatcgataaactcacatttcaaatatatttatctgattctgataacataaaaatatcattgaatgagatactaacacatttcaacaataatgagaatgttacattattttattgtgatgaacgagacgcagaattcgttatgtgtctcgaggctaaaacacatttctctaccacaggagaatggccgttgataataagtaccgatcaggatactatgctatttgcatctactgataatcatcctaagatgataaaaaacttaactcaactgtttaaatatgttccctctgcagaggataactatttagcaaaattaacggcgttagtgaatggatgtgatttctttcctggactctatggggcatctataacacccaccaacttaaacaaaatacaattgtttagtgattttacaatcgataatatagtcactagtttggcaattaaaaattattatagaaagactaactctaccgtagacgtgcgtaatattgttacgtttataaacgattacgctaatttagacgatgtctactcgtatattcctccttgtcaatgcactgttcaagaatttatattttccgcattagatgaaaaatggaatgaatttaaatcatcttatttagagaccgttccgttaccctgtcaattaatgtacgcgttagaaccacgtaaggagattgatgtttcagaagttaaaactttatcatcttatatagatttcgaaaatactaaatcagatatcgatgttataaaatctatatcctcgatcttcggatattctaacgaaaactgtaacacgatagtattcggcatctataaggataatttactactgagtataaataattcattttactttaacgatagtctgttaataaccaatactaaaagtgataatataataaatataggttactagattaaaaatggtgttccaactcgtgtgctctacgtgcggcaaagatatttctcacgaacgatataaattgattatacgaaaaaaatcattaaaggatgtactcgtcagtgtaaagaacgaatgttgtaggttaaaattatctacacaaatagaacctcaacgtaacttaacagtgcaacctctattggatataaactaatatggatccggttaattttatcaagacatatgcgcctagaggttctattatttttattaattataccatgtcattaacaagtcatttgaatccatcgatagaaaaacatgtgggtatttattatggtacgttattatcggaacacttggtagttgaatcaacatatagaaaaggagttcgaatagtcccattggatagtttttttgaaggatatcttagtgcaaaagtatacatgttagagaatattcaagttatgaaaatagcagctgatacgtcattaactttattgggtattccgtatggatttggtcataatagaatgtattgttttaaattggtagctgactgttataaaaatgccggtattgatacatcgtctaaacgaatattaggtaaagatatttttctgagccaaaacttcacagacgataatagatggataaagatatatgattctaataatttaacattttggcaaattgattaccttaaagggtgagttaatatgcataactactcctccgttgttttttccctcgttctttttcttaacgttgtttgccatcactctcataatgtaaagatattctaaaatggtaaacttttgcatatcggacgcagaaattggtataaatgttgtaattgtattatttcccgtcaatggactagtcacagctccatcagttttatatcctttagagtatttctcactcgtgtctagcattctagagcattccatgatctgtttatcgttgatattggccggaaagatagattttttattttttattatattactattggcaattgtagatataacttctggtaaatatttttctaccttttcaatctcttctattttcaagccggctatatattctgctatattgttgctagtatcaataccttttcttgctaagaagtcatatgtggtattcactatatcagttttaactggtagttccattagcctttccacttctgcagaataatcagaaattggttctttaccagaaaatccagctactataataggctcaccgatgatcattggcaaaatcctatattgtaccagattaatgagagcatatttcatttccaataattctgctagttcttgagacattgatttatttgatgaatctagttggttctctagatactctaccatttctgccgcatacaataacttgttagataaaatcagggttatcaaagtgtttagcgtggctagaatagtgggcttgcatgtattaaagaatgcggtagtatgagtaaaccgttttaacgaattatatagtctccagaaatctgtggcgttacatacatgagccgaatgacatcgaagattgtccaatatttttaatagctgctctttgtccattatttctatatttgactcgcaacaattgtagataccattaatcaccgattcctttttcgatgctggacaatagcacaattgtttagctttggactctatgtattcagaattaatagatatatctctcaatacagattgcactatacattttgaaactatgtcaaaaattgtagaacgacgctgttctgcagccatttaactttaaataatttacaaaaatttaaaatgagcatccgtataaaaatcgataaactgcgccaaattgtggcatatttttcagagttcagtgaagaagtgtctataaatgtagactcgacggatgagttaatgtatatttttgccgccttgggcggatctgtaaacatttgggcaattatacctctaagtgcatcagtgttttaccgaggagccgaaaatattgtgtttaatcttcctgtgtccaaggtaaaatcgtgtttgtgtagttttcacaatgatgccatcatagatatagaacctgatctggaaaataatctagtaaaactttctagttatcatgtagtaagtgtcgattgtaacaaggaactgatgcctattaggacagatactactatttgtctaagtatagatcaaaagaaatcttacgtgtttaattttcacaagtatgaagaaaaatgttgtggtagaaccgtcattcatctagaatggttgttgggctttatcaagtgtattagtcagcatcagcatctggctattatgtttaaagatgacaatattattatgaagactcctggtaatactgatgcgttttccagggaatattctatgactgaatgttctcaagaactacaaaagttttctttcaaaatagctatctcgtctctcaacaaactacgaggattcaaaaagagagtcaatgtttttgaaactagaatcgtaatggataatgacgataacattttaggaatgttgttttcggatagagttcaatcctttaagatcaacatctttatggcgtttttagattaatactttcaatgagataaatatgggtggcggagtaagtgttgagctccctaaacgggatccgcctccgggagtacccactgatgagatgttattaaacgtggataaaatgcatgacgtgatagctcccgctaagcttttagaatatgtgcatataggaccactagcaaaagataaagaggataaagtaaagaaaagatatccagagtttagattagtcaacacaggacccggtggtctttcggcattgttaagacaatcgtataatggaaccgcacccaattgctgtcgcacttttaatcgtactcattattggaagaaggatggaaagatatcagataagtatgaagagggtgcagtattagaatcgtgttggccagacgttcacgacactggaaaatgcgatgttgatttattcgactggtgtcagggggatacgttcgatagaaacatatgccatcagtggatcggttcagcctttaataggagtaatagaactgtagagggtcaacaatcgttaataaatctgtataataagatgcaaacattatgtagtaaagatgctagtgtaccaatatgcgaatcatttttgcattatttacgcgcacacaatacagaagatagcaaagagatgatcgattatattctaagacaacagtctgcggactttaaacagaaatatatgagatgtagttatcccactagagataagttagaagagtcattaaaatatgcggaacctcgagaatgttgggatccagagtgttcgaatgccaatgttaatttcttactaacacgtaattataataatttaggactttgcaatattgtacgatgtaataccagcgtgaacaacttacagatggataaaacttcctcattaagattgtcatgtggattaagcaatagtgatagattttctactgttcccgtcaatagagcaaaagtagttcaacataatattaaacactcgttcgacctaaaattgcatttgatcagtttattatctctcttggtaatatggatactaattgtagctatttaaatgggtgccgcggcaagcatacagacgacggtgaatacactcagcgaacgtatctcgtctaaattagaacaagaagcgaacgctagtgctcaaacaaaatgtgatatagaaatcggaaatttttatatccgacaaaaccatggatgtaacctcactgttaaaaatatgtgctctgcggacgcggatgctcagttggatgctgtgttatcagccgctacagaaacatatagtggattaacaccggaacaaaaagcatacgtgccagctatgtttactgctgcgttaaacattcagacgagtgtaaacactgttgttagagattttgaaaattatgtgaaacagacttgtaattctagcgcggtcgtcgataacaaattaaagatacaaaacgtaatcatagatgaatgttacggagccccaggatctccaacaaatttggaatttattaatacaggatctagcaaaggaaattgtgccattaaagcgttgatgcaattgacgactaaggccactactcaaatagcacctagacaagttgctggtacaggagttcagttttatatgattgttatcggtgttataatattggcagcgttgtttatgtactatgccaagcgtatgttgttcacatccaccaatgataaaatcaaacttattttagccaataaggaaaacgtccattggactacttacatggacacattctttagaacttctccgatggttattgctaccacggatatgcaaaactgaaaatatattgataatattttaatagattaacatggaagttatcgctgatcgtctagacgatatagtgaaacaaaatatagcggatgaaaaatttgtagattttgttatacacggtctagagcatcaatgtcctgctatacttcgaccattaattaggttgtttattgatatactattatttgttatagtaatttatatttttacggtacgtctagtaagtagaaattatcaaatgttgttggtggtgctagtcatcacattaactattttttattactttatactataatagtactagactgacttctaacaaacatctcacctgccataaataaatgcttgatattaaagtcttctatttctaacactattccatctgtggaaaataatactctgacattatcgctaattgacacatcggtgagtgatatgcctataaagtaataatcttctttgggcacatataccagtgtaccaggttctaacaacctatttactggtgctcctgtagcatactttttctttaccttgagaatatccatcgtttgcttggtcaatagcgatatgtgattttttatcaaccactcaaaaaagtaattggagtgttcatatcctctacgggctattgtctcatggccgtgtatgaaatttaagtaacacgactgtggtagatttgttctatagagccgattgccgcaaatagatagaactaccaatatgtctgtacaaatgttaaacattaattgattaacagaaaaaacaatgttcgttctgggaatagaaaccagatcaaaacaaaattcgttagaatatatgccacgtttatacatggaatataaaataactacagtttgaaaaataacagtatcatttaaacatttaacttgcggggttaatctcacaactttactgtttttgaactgttcaaaatatagcatcgatccgtgagaaatacgtttagccgcctttaatagaggaaatcccaccgcctttctggatctcaccaacgacgatagttctgaccagcaactcatttcttcatcatccacctgttttaacatataataggcaggagatagatatccgtcattgcaatattccttctcgtaggcacacaatctaatattgataaaatctccattctcttctctgcatttattatcttgtctcggtggctgattaggctgtggtcttggtttaggctttggtatatcgttgttgaatctattttggtcattaaatctttcatttcttcctggtatatttttatcacctcgtttggttggatttttgtctatattatcgtttgtaacatcggtacgggtattcatttatcacaaaaaaaacttctctaaatgagtctactgctagaaaacctcatcgaagaagataccatattttttgcaggaagtatatctgagtatgatgatttacaaatggttattgccggcgcaaaatccaaatttccaagatctatgctttctatttttaatatagtacctagaacgatgtcaaaatatgagttggagttgattcataacgaaaatatcacaggagcaatgtttaccacaatgtataatataagaaacaatttgggtctaggagatgataaactaactattgaagccattgaaaactatttcttggatcctaacaatgaagttatgcctcttattattaataatacggatatgactgccgtcattcctaaaaaaagtggtaggagaaagaataagaacatggttatcttccgtcaaggatcatcacctatcttgtgcattttcgaaactcgtaaaaagattaatatttataaagaaaatatggaatccgcgtcgactgagtatacacctatcggagacaacaaggctttgatatctaaatatgcgggaattaatgtcctgaatgtgtattctccttccacatccataagattgaatgccatttacggattcaccaataaaaataaactagagaaacttagtactaataaggaactagaatcgtatagttctagccctcttcaagaacccattaggttaaatgattttctgggactattggaatgtgttaaaaagaatattcctctaacagatattccgacaaaggattgattactataaatggagaatgttcctaatgtatactttaatcctgtgtttatagagcccacgtttaaacattctttattaagtgtttataaacacagattaatagttttatttgaagtattcgttgtattcattctaatatatgtattttttagatctgaattaaatatgttcttcatgcctaaacgaaaaatacccgatcctattgatagattacgacgtgctaatctagcgtgtgaagacgataaattaatgatctatggattaccatggatgacaactcaaacatctgcgttatcaataaatagtaaaccgatagtgtataaagattgtgcaaagcttttgcgatcaataaatggatcacaaccagtatctcttaacgatgttcttcgcagatgatgattcattttttaagtatttggctagtcaagatgatgaatcttcattatctgatatattgcaaatcactcaatatctagactttctgttattattattgatccaatcaaaaaataaattagaagctgtgggtcattgttatgaatctctttcagaggaatacagacaattgacaaaattcacagactttcaagattttaaaaaactgtttaacaaggtccctattgttacagatggaagggtcaaacttaataaaggatatttgttcgactttgtgattagtttgatgcgattcaaaaaagaatcctctctagctaccaccgcaatagatcctgttagatacatagatcctcgtcgtgatatcgcattttctaacgtgatggatatattaaagtcgaataaagtgaacaataattaattctttattgtcatcatgaacggcggacatattcagttgataatcggccccatgttttcaggtaaaagtacagaattaattagacgagttagacgttatcaaatagctcaatataaatgcgtgactataaaatattctaacgataatagatacggaacgggactatggacgcatgataagaataattttgaagcattggaagcaactaaactatgtgatgtcttggaatcaattacagatttctccgtgataggtatcgatgaaggacagttctttccagacattgttgaattctgtgagcgtatggcaaacgaaggaaaaatagttatagtagccgcactcgatgggacatttcaacgtaaaccgtttaataatattttgaatcttattccattatctgaaatggtggtaaaactaactgctgtgtgtatgaaatgctttaaggaggcttccttttctaaacgattgggtgaggaaaccgagatagagataataggaggtaatgatatgtatcaatcggtgtgtagaaagtgttacatcgactcataatattatattttttatctaaaaaactaaaaataaacattgattaaattttaatataatacttaaaaatggatgttgtgtcgttagataaaccgtttatgtattttgaggaaattgataatgagttagattacgaaccagaaagtgcaaatgaggtcgcaaaaaaactaccgtatcaaggacagttaaaactattactaggagaattattttttcttagtaagttacagcgacacggtatattagatggtgccaccgtagtgtatataggatctgctcccggtacacatatacgttatttgagagatcatttctataatttaggagtgatcatcaaatggatgctaattgacggccgccatcatgatcctattttaaatggattgcgtgatgtgactctagtgactcggttcgttgatgaggaatatctacgatccatcaaaaaacaactgcatccttctaagattattttaatttctgatgtgagatccaaacgaggaggaaatgaacctagtacggcggatttactaagtaattacgctctacaaaatgtcatgattagtattttaaaccccgtggcatctagtcttaaatggagatgcccgtttccagatcaatggatcaaggacttttatatcccacacggtaataaaatgttacaaccttttgctccttcatattcagctgaaatgagattattaagtatttataccggtgagaacatgagactgactcgagttaccaaattagacgctgtaaattatgaaaaaaagatgtactaccttaataagatcgtccgtaacaaagtagttgttaactttgattatcctaatcaggaatatgactattttcacatgtactttatgctgaggaccgtgtactgcaataaaacatttcctactactaaagcaaaggtactatttctacaacaatctatatttcgtttcttaaatattccaacaacatcaactgaaaaagttagtcatgaaccaatacaacgtaaaatatctagcaaaaattctatgtctaaaaacagaaatagcaagagatccgtacgcggtaataaatagaaacgtactactgagatatactaccgatatagagtataatgatttagttactttaataaccgttagacataaaattgattctatgaaaactgtgtttcaggtatttaacgaatcatccataaattatactccggttgatgatgattatggagaaccaatcattataacatcgtatcttcaaaaaggtcataacaagtttcctgtaaattttctatacatagatgtggtaatatctgacttatttcctagctttgttagactagatactacagaaactaatatagttaatagtgtactacaaacaggcgatggtaaaaagactcttcgtcttcccaaaatgttagagacggaaatagttgtcaagattctctatcgccctaatataccattaaaaattgttagatttttccgcaataacatggtaactggagtagagatagccgatagatctgttatttcagtcgctgattaatcaattagtagagatgagataagaacattataataatcaataatatatcttatatcttatatcttatatcttatatcttgtttagaaaaatgctaatattaaaatagctaacgctagtaatccaatcggaagccatttgatatctataatagggtatctaatttcctgatttaaatagcggacagctatattctcggtagctactcgtttggaatcacaaacattatttacatctaatttactatctgtaatggaaacgtttcccaatgaaatggtacaatccgatacattgcattttgttatatttttttttaaagaggctggtaacaacgcatcgcttcgtttacatggctcgtaccaacaataatagggtaatcttgtatctattcctatccgtactatgcttttatcaggataaatacatttacatcgtatatcgtctttgttagcatcacagaatgcataaatttgttcgtccgtcatgataaaaatttaaagtgtaaatataactattatttttatagttgtaataaaaagggaaatttgattgtatactttcggttctttaaaagaaactgacttgataaaaatggctgtaatctctaaggttacgtatagtctatatgatcaaaaagagattaatgctacagatattatcattagtcatgttaaaaatgacgacgatatcggtaccgttaaagatggtagactaggtgctatggatggggcattatgtaagacttgtgggaaaacggaattggaatgtttcggtcactggggtaaagtaagtatttataaaactcatatagttaagcctgaatttatttcagaaattattcgtttactgaatcatatatgtattcactgcggattattgcgttcacgagaaccgtattccgacgatattaacctaaaagagttatcgggacacgctcttaggagattaaaggataaaatattatccaagaaaaagtcatgttggaacagtgaatgtatgcaaccgtatcaaaaaattactttttcaaagaaaaaggtttgtttcgtcaacaagttggatgatattaacgttcctaattctctcatctatcaaaagttaatttctattcatgaaaagttttggccattattagaaattcatcaatatccagctaacttattttatacagactactttcccatccctccgttgattattagaccggctattagtttttggatagatagtatacccaaagagaccaatgaattaacttacttattaggtatgatcgttaagaattgtaacttgaatgctgatgaacaggttatccagaaggcggtaatagaatacgatgatattaaaattatttctaataacactaccagtatcaatttatcatatattacatccggcaaaaataatatgattagaagttatatcgtcgcccgacgaaaagatcagaccgctagatctgtaattggtcccagtacatctatcaccgttaatgaggtaggaatgcccgcatatattagaaatacacttacagaaaagatatttgttaatgcctttacagtggataaagttaaacaactattagcgtcaaaccaagttaaattttactttaataaacgattaaaccaattaacaagaatacgccaaggaaagtttattaaaaataaaatacatttattgcctggtgattgggtagaagtagctgttcaagaatatacaagtattatttttggaagacagccgtctctacatagatacaacgtcatcgcttcatctatcagagctaccgaaggagatactatcaaaatatctcccggaattgccaactctcaaaatgctgatttcgacggggatgaggaatggatgatattagaacaaaatcctaaagctgtaattgaacaaagtattcttatgtatccgacgacgttactcaaacacgatattcatggagcccccgtttatggatctattcaagatgaaatcgtagcagcgtattcattgtttaggatacaagatctttgtttagatgaagtattgaacatcttggggaaatatggaagagagttcgatcctaaaggtaaatgtaaattcagcggtaaagatatctatacttacttgataggtgaaaagattaattatccgggtctcttaaaggatggtgaaattattgcaaacgacgtagatagtaattttgttgtggctatgaggcatctgtcattggctggactcttatccgatcataagtcgaacgtggaaggtatcaactttattatcaagtcatcttatgtttttaagagatatctatctatttacggttttggggtgacattcaaagatctgagaccaaattcgacgttcactaataaattggaggccatcaacgtagaaaaaatagaacttatcaaagaagcatacgccaaatatctcaacgatgtaagagacgggaaaatagttccattatctaaagctttagaggcggactatgtggaatccatgttatccaacttgacaaatcttaatatccgagagatagaagaacatatgagacaaacgctgatagatgatccagataataacctcctgaaaatggccaaagcgggttataaagtaaatcccacagaactaatgtatattctaggtacgtatggacaacaaaggattgatggtgaaccagcagagactcgagtattgggtagagttttaccttactatcttccagactctaaggatccagaaggaagaggttatattcttaattctttaacaaaaggattaacgggttctcaatattacttttcgatgctggttgcaagatctcaatctactgatatcgtctgtgaaacatcacgtaccggaacactggctagaaaaatcattaaaaagatggaggatatggtggtcgacggatacggacaagtagttataggtaatacgctcatcaagtacgccgccaattataccaaaattctaggctcagtatgtaaacctgtagatcttatctatccagatgagtccatgacttggtatttggaaattagtgctctgtggaataaaataaaacagggattcgtttactctcagaaacagaaacttgcaaagaagacattggcgccgtttaatttcctagtattcgtcaaacccaccactgaggataatgctattaaggttaaggatctgtacgatatgattcataacgtcattgatgatgtgagagagaaatacttctttacggtatctaatatagattttatggagtatatattcttgacgcatcttaatccttctagaattagaattacaaaagaaacggctatcactatctttgaaaagttctatgaaaaactcaattatactctaggtggtggaactcctattggaattatttctgcacaggtattgtctgagaagtttacacaacaagccctgtccagttttcacactactgaaaaaagtggtgccgtcaaacaaaaacttggtttcaacgagtttaataacttgactaatttgagtaagaataagaccgaaattatcactctggtatccgatgatatctctaaacttcaatctgttaagattaatttcgaatttgtatgtttgggagaattaaatccagacatcactcttcgaaaagaaacagataggtatgtagtagatataatagtcaatagattatacatcaagagagcagaaataaccgaattagtcgtcgaatatatgattgaacgatttatctcctttagcgtcattgtaaaggaatggggtatggagacattcattgaggacgaggataatattagatttactgtctacctaaatttcgttgaaccggaagaattgaatcttagtaagtttatgatggttcttccgggtgccgccaacaagggaaagattagtaaattcaagattcctatctctgactatacgggttatgacgacttcaatcaaacaaaaaagctcaataagatgactgtagaactcatgaatctaaaagaattgggttctttcgatttggaaaacgtcaacgtgtatcctggagtatggaatacatacgatatcttcggtatcgaggccgctcgtgaatacttgtgcgaagccatgttaaacacctatggagaagggttcgattatctgtatcagccttgtgatcttctcgctagtttactatgtgctagttacgaaccagaatcagtgaataaattcaagttcggcgcagctagtactcttaagagagctacgttcggagacaataaagcattgttaaacgcggctcttcataaaaagtcagaacctattaacgataatagtagctgccacttttttagcaaggtccctaatataggaactggatattacaaatactttatcgacttgggtcttctcatgagaatggaaaggaaactatctgataagatatcttctcaaaagatcaaggaaatggaagaaacagaagacttttaattcttatcaataacatatttttctatgatctgtcttttaaacgatggattttccacaaatgcgcctctcaagtccctcatagaatgatacacgtataaaaaatatagcataggcgatgactccttatttttagacattagatatgccaaaatcatagccccgcttctatttactcccgcagcacaatgaaccaacacgggctcgtttcgttgatcacatttagataaaaaggcggttacgtcgtcaaaatatttactaatatcggtagttgtatcatctaccaacggtatatgaataatattaatattagagttaggtaatgtatatttatccatcgtcaaatttaaaacatatttgaacttaacttcagatgatggtgcatccatagcatttttataatttcccaaatacacattattggttacccttgtcattatagtgggagatttggctctgtgcatatctccagttgaacgtagtagtaagtatttatacaaacttttcttatccatttataacgtacaaatggataaaactactttatcggtaaacgcgtgtaatttagaatacgttagagaaaaggctatagtaggcgtacaagcagccaaaacatcaacacttatattctttgttattatattggcaattagtgcgctattactctggtttcagacgtctgataatccagtctttaatgaattaacgagatatatgcgaattaaaaatacggttaacgattggaaatcattaacggatagcaaaacaaaattagaaagtgatagaggtagacttctagccgctggtaaggatgatatattcgacttcaaatgtgtggatttcggcgcctattttatagctatgcgattggataagaaaacatatctgccgcaagctattaggcgaggtactggagacgcgtggatggttaaaaaggcggcaaaggtcgatccatctgctcaacaattttgtcagtatttgataaaacacaagtctaataatgttattacttgtggtaatgagatgttaaatgaattaggttatagcggttattttatgtcaccgcattggtgttccgattttagtaatatggaatagtgttagataaatgcggtaacgaatgttcctgtaaggaaccataacagcttagatttaacgttaaagatgagcataaacataataaacaaaattacaatcaaacctataacattaatatcaaacaatccaaaaaatgaaatcagtggagtagtaaacgcgtacataactcctggataacgtttagcagctgccgttcctattctagaccaaaaattcggtttcatgttttcgaaacggtattctgcaacaagtcgaggatcgtgttctacatatttggcggcgttatccagtatctgcctattgatcttcatttcgttttcgattctggctatttcaaaataaaatcccgatgatagacctccagactttataatttcatctacgatgttcagcgccgtagtaactctaataatataggctgataagctaacatcataccctcctgtatatgtgaatatggcatgatttttgtccattacaagctcggttttaactttattgcctgtaataatttctctcatctgtaggatatctatttttttgtcatgcattgccttcaagacgggacgaagaaacgtaatatcctcaataacgttatcgttttctacaataactacatattctacctttttattttctaactcggtaaaaaaattagaatcccatagggctaaatgtctagcgatatttcttttcgtttcttctgtacacatagtgttacaaaaccctgaaaagaagtgagtatacttgtcatcatttctaatgtttcctccagtccactgtataaacgcataatccttgtaatgatctggatcatccttgactaccacaacatttcttttttctggcataacttcgttgtcctttacatcatcgaacttctgatcattaatatgctcatgaacattaggaaatgtttctgatggaggtctatcaataactggcacaacaataacaggagttttcaccgccgccatttagttattgaaattaatcatatacaactctttaatacgagttatattttcgtctatccattgtttcacattgacatatttcgacaaaaagatataaaatgcgtattccaatgcttctctgtttaatgaattactaaaatatacaaacacgtcactgtctggcaataaatgatatcttagaatattgtaacaatttattttgtattgcacatgttcgtgatctatgagttcttcttcgaatggcataggatctccgaatctgaaaacgtataaataggagttagaataataatatttgagagtattggtaatatataaactctttagcggtataattagtttttttctctcaatttctatttttagatgtgatggaaaaatgactaattttgtagcattagtatcatgaactctaatcaaaatcttaatatcttcgtcacacgttagctctttgaagtttttaagagatgcatcagttggttctacagatggagtaggtgcaacaattttttgttctacacatgtatgtactggagccattgttttaactataatggtgcttgtatcgaaaaactttaatgcagatagcggaagctcttcgccgcgactttctacgtcgtaattgggttctaacgccgatctctgaatggatactagttttctaagttctaatgtgattctctgaaaatgtaaatccaattcctccggcattatagatgtgtatacatcggtaaataaaactatagtatccaacgatcccttctcgcaaattctagtcttaaccaaaaaatcgtatataaccacggagatggcgtatttaagagtggattcttctaccgttttgttcttggatgtcatataggaaactataaagtccgcactactgttaagaatgattactaacgcaactatatagtttaaattaagcattttggaaacataaaataactctgtagacgatacttgactttcgaataagtttgcagacaaacgaagaaagaacagacctctcttaatttcagaagaaaactttttttcgtattcctgacgtctagagtttatatcaataagaaagttaagaattagtcggttaatgttgtatttcattacccaagtttgagatttcataatattatcaaaagacatgataatattaaagataaagcgctgactatgaacgaaatagctatatggttcgctcaagaatatagtcttgttaaacgtggaaacgataactgtatttttaatcacgtcagcggcatctaaattaaatataggtatatttattccacacactctacaatatgccacaccatcttcataataaataaattcgttagcaaaattattaattttagtgaaatagttagcgtcaactttcatagcttccttcaatctaatttgatgctcacacggtgcgaattccactctaacatcccttttccatgcctcaggttcatcgatctctataatatctagttttttgcgtttcacaaacacaggctcgtctctcgcgatgagatctgtatagtaactatgtaaatgataactagatagaaagatgtagctatatagatgacgatcctttaagagaggtataataactttaccccaatcagatagactgttgttatggtcttcggaaaaagaatttttataaatttttccagtattttccaaatatacgtacttaacatctaaaaaatccttaatgataataggaatggataatccgtctattttataaagaaatacatatcgcacattatacttttttttggaaatgggaataccgatgtgtctacataaatatgcaaagtctaaatattttttagagaatcttagttggtccaaattcttttccaagtacggtaatagatttttcatattgaacggtatcttcttaatctctggttctagttccgcattaaatgatgaaactaagtcactatttttataactaacgattacatcacctctaacatcatcatttaccagaatactgatcttcttttgtcgtaaatacatgtctaatgtgttaaaaaaaagatcatacaagttatacgtcatttcatctgtggtattcttgtcattgaaggataaactcgtactaatctcttctttaacagcctgttcaaatttatatcctatatacgaaaaaatagcaaccagtgtttgatcatccgcgtcaatattctgttctatcgtagtgtataacaatcgtatatcttcttctgtgatagtcgatacgttataaaggttgataacgaaaatatttttatttcgtgaaataaagtcatcgtaggattttggacttatattcgcgtctagtagatatgcttttatttttggaatgatctcaattagaatagtctctttagagtccatttaaagttacaaacaactaggaaattggtttatgatgtataatttttttagtttttatagattctttattctatacttaaaaaatgaaaataaatacaaaggttcttgagggttgtgttaaattgaaagcgagaaataatcataaattatttcattatcgcgatatccgttaagtttgtatcgtaatggcgtggtcaattacgaataaagcggatactagtagcttcacaaagatggctgaaatcagagctcatctaaaaaatagcgctgaaaataaagataaaaacgaggatattttcccggaagatgtaataattccatctactaagcccaaaaccaaacgagccactactcctcgtaaaccagcggctactaaaagatcaaccaaaaaggaggaagtggaagaagaagtagttatagaggaatatcatcaaacaactgaaaaaaattctccatctcctggagtcagcgacattgtagaaagcgtggccgctgtagagctcgatgatagcgacggggatgatgaacctatggtacaagttgaagctggtaaagtaaatcatagtgctagaagcgatctctctgacctaaaggtggctaccgacaatatcgttaaagatcttaagaaaattattactagaatctctgcagtatcgacggttctagaggatgttcaagcagctggtatctctagacaatttacttctatgactaaagctattacaacactatctgatctagtcaccgagggaaaatctaaagttgttcgtaaaaaagttaaaacttgtaagaagtaaatgcgtgcacttttttataaagatggtaaactctttaccgataataattttttaaatcctgtatcagacgataatccagcgtatgaggttttgcaacatgttaaaattcctactcatttaacagatgtagtagtatatgaacaaacgtgggaggaggcgttaactagattaatttttgtgggaagcgattcaaaaggacgtagacaatacttttacggaaaaatgcatgtacagaatcgcaacgctaaaagagatcgtatttttgttagagtatataacgttatgaaacgaattaattgttttataaacaaaaatataaagaaatcgtccacagattccaattatcagttggcggtttttatgttaatggaaactatgttttttattagatttggtaaaatgaaatatcttaaggagaatgaaacagtagggttattaacactaaaaaataaacacatagaaataagtcccgatgaaatagttatcaagtttgtaggaaaggacaaagtttcacatgaatttgttgttcataagtctaatagactatataaaccgctattgaaactgacggatgattctagtcccgaagaatttctgttcaacaaactaagtgaacgaaaggtatacgaatgtatcaaacagtttggtattagaatcaaggatctccgaacgtatggagtcaattatacgtttttatataatttttggacaaatgtaaagtccatatctcctcttccgtcaccaaaaaagttaatagcgttaactatcaaacaaactgctgaagtggtaggtcatactccatcaatttcaaaaagagcttatatggcaacgactattttagaaatggtaaaggataaaaattttttagatgtagtatctaaaactacgttcgatgaattcctatctatagtcgtagatcacgttaaatcatctacggatggatgatatagatctttacacaaataattacaagaccgataaatggaaatggataagcgtataaaatctctcgcaatgaccgctttctttggggagctaagcacattagatattatggcattgataatgtctatatttaaacgccatccaaacaataccattttttcagtggataaggatggtcagtttatgattgatttcgaatacgataattataaggcttctcaatatttggatctgaccctcactccgatatttggagatgaatgcaagactcacgcatcgagtatagccgaacaattggcgtgtgcggatattattaaagaggatattagcgaatacatcaaaactactccccgtcttaaacgatttataaaaaaataccgcaatagatcagatactcgtatcagtcgagatacagaaaagcttaaaatagctctagctaaaggcatagattacgaatatataaaagacgcttgttaataagtaaatgaaaaaaaactagtcgtttataataaaacacgatatggatgccaacgtagtatcatcttctactattgcgacgtatatagacgctttagcgaagaatgcttcagaattagaacagaggtctaccgcatacgaaataaataatgaattggaactagtatttattaagccgccattgattactttgacaaatgtagtgaatatctctacgattcaggaatcgtttattcgatttaccgttactaataaggaaggtgttaaaattagaactaagattccattatctaaggtacatggtctagatgtaaaaaatgtacagttagtagatgctatagataacatagtttgggaaaagaaatcattagtgacggaaaatcgtcttcacaaagaatgcttgttgagactatcgacagaggaacgtcatatatttttggattacaagaaatatggatcctctatccgactagaattagtcaatcttattcaagcaaaaacaaaaaactttacgatagactttaagctaaaatattttctaggatccggtgcccaatctaaaagttctttgttgcacgctattaatcatccaaagtcaaggcctaatacatctctggaaatagaattcacacctagagacaatgaaacagttccatatgatgaactaataaaggaattgacgactctctcgcgtcatatatttatggcttctccagagaatgtaattctttctccgcctattaacgcgcctataaaaacctttatgttgcctaaacaagatatagtaggtttggatctggaaaatctatatgccgtaactaagactgacggcattcctataactatcagagttacatcaaacgggttgtattgttattttacacatcttggttatattattagatatcctgttaagagaataatagattccgaagtagtagtctttggtgaggcagttaaggataagaactggaccgtatatctcattaagctaatagagcccgtgaatgctatcagtgatagactagaagaaagtaagtatgttgaatctaaactagtggatatttgtgatcggatagtattcaagtcaaagaaatacgaaggtccgtttactacaactagtgaagtcgtcgatatgttatctacatatttaccaaagcaaccagaaggtgttattctgttctattcaaagggacctaaatctaacattgattttaaaattaaaaaggaaaatactatagaccaaactgcaaatgtagtatttaggtacatgtccagtgaaccaattatctttggagaatcgtctatctttgtagagtataagaaatttagcaacgataaaggctttcctaaagaatatggttctggtaagattgtgttatataacggcgttaattatctaaataatatctattgtttggaatatattaatacacataatgaagtgggtattaagtccgtggttgtacctattaagtttatagcagaattcttagttaatggagaaatacttaaacctagaattgataaaaccatgaaatatattaactcagaagattattatggaaatcaacataatatcatagtcgaacatttaagagatcaaagcatcaaaataggagatatctttaacgaggataaactatcggatgtgggacatcaatacgccaataatgataaatttagattaaatccagaagttagttattttacgaataaacgaactagaggaccgttgggaattttatcaaactacgtcaagactcttcttatttctatgtattgttccaaaacatttttagacgattccaacaaacgaaaggtattggcgattgattttggaaacggtgctgacctggaaaaatacttttatggagagattgcgttattggtagcgacggatccggatgctgatgctatagctagaggaaatgaaagatacaacaaattaaactctggaattaaaaccaagtactacaaatttgactacattcaggaaactattcgatccgatacatttgtctctagtgtcagagaagtattctattttggaaagtttaatatcatcgactggcagtttgctatccattattcttttcatccgagacattatgctaccgtcatgaataacttatccgaactaactgcttctggaggcaaggtattaatcactaccatggacggagacaaattatcaaaattaacagataaaaagacttttataattcataagaatttacctagtagcgaaaactatatgtctgtagaaaaaatagctgatgatagaatagtggtatataatccatcaacaatgtctactccaatgactgaatacattatcaaaaagaacgatatagtcagagtgtttaacgaatacggatttgttcttgtagataacgttgatttcgctacaattatagaacgaagtaaaaagtttattaatggcgcatctacaatggaagatagaccgtctacaaaaaactttttcgaactaaatagaggagccattaaatgtgaaggtttagatgtcgaagacttacttagttactatgttgtttatgtcttttctaagcggtaaataataatatggtatgggttctgatatccccgttctaaatgcattaaataattccaatagagcgatttttgttcctataggaccttccaactgtggatactctgtattgttaatagatatattaatacttttgtcgggtaacagaggttctacgtcttctaaaaataaaagttttataacatctggcctgttcataaataaaaacttggcgattctatatatactcttattatcaaatctagccattgtcttatagatgtgagctactgtaggtgtaccatttgattttctttctaatactatatatttctctcgaagaagttcttgcacatcatctgggaataaaatactactgttgagtaaatcagttattttttttatatcgatattgatggacatttttatagttaaggataataagtatcccaaagtcgataacgacgataacgaagtatttatacttttaggaaatcacaatgactttatcagattaaaattaacaaaattaaaggagcatgtatttttttctgaatatattgtgactccagatacatatggatctttatgcgtcgaattaaatgggtctagttttcagcacggtggtagatatatagaggtggaggaatttatagatgctggaagacaagttagatggtgttctacatccaatcatatatctaaagatatacccgaagatatgcacactgataaatttgtcatttatgatatatacacttttgacgctttcaagaataaacgattggtattcgtacaggtacctccgtcgttaggagatgatagtcatttgactaatccgttattgtcaccgtattatcgtaattcagtagccagacaactggtcaataatatgatttttaatcaagattcatttttaaaatatttattagaacatctgattagaagccactatagagtttctaaacatataacaatagttagatacaaggataccgaagaattaaatctaacgagaatatgttataatagagataagtttaaggcgtttgtattcgcttggtttaacggcgtttcggaaaatgaaaaggtactagatacgtataaaaaggtatctaatttgatataatgaattcagtgactgtatcacacgcgccatatactattacttatcacgatgattgggaaccagtaatgagtcaattggtagagttttataacgaagtagctagttggctgctacgagacgagacgtcgcctattcctgataagttctttatacagttgaaacaaccgcttagaaataaacgagtatgtgtgtgcggtatagatccgtatccgaaagatggaactggtgtaccgttcgaatcaccaaattttacaaaaaaatcaattaaggagatagcttcatctatatctagattaaccggagtaattgattataaaggttataaccttaatataatagacggggttataccctggaattattacttaagttgtaaattaggagaaacaaaaagtcacgcgatctactgggataaaatttctaagttactgctgcagcatataactaaacacgttagtgttctttattgtttgggtaaaacagatttctcgaatatacgggccaagttagaatccccggtaactaccatagtcggatatcatccagcggctagagaccgccaattcgagaaagatagatcatttgaaattatcaacgttttactggaattagacaacaaggcacctataaattgggctcaagggtttatttattaatgctttagtgaaattttaacttgtgttctaaatggatgcggctattagaggtaatgatgttatctttgttcttaagactataggtgtcccgtcagcgtgcagacaaaatgaagatccaagatttgtagaagcatttaaatgcgacgagttagaaagatatattgagaataatccagaatgtacactattcgaaagtcttagggatgaggaagcatactctatagtcagaattttcatggatgtagatttagacgcgtgtctagacgaaatagattatttaacggccattcaagattttattatcgaggtgtcaaactgtgtagctagattcgcgtttacagaatgcggcgccattcatgaaaatgtaataaaatccatgagatctaatttttcattgactaagtctacaaatagagataaaacaagttttcatattatctttttagatacgtataccactatggatacattgatagctatgaaacgaacactattagaattaagtagatcatctgaaaatccactaaccagatcgatagacactgccgtatataggagaaaaacaactcttcgggttgtaggtactaggaaaaatccaaattgcgacactattcatgtaatgcaaccaccgcatgataatatagaagattacctattcacttacgtggatatgaacaacaatagttattacttttctctacaacaacgattggaggatttagttcctgataagttatgggaaccagggtttatttcattcgaagacgctataaaaagagtttcaaaaatattcattaattctataataaactttaatgatctcgatgaaaataattttacaacggtaccactggtcatagattacgtaacaccttgtgcattatgtaaaaaacgatcgcataaacatccgcatcaactatcgttggaaaatggtgctattagaatttacaaaactggtaatccacatagttgtaaagttaaaattgttccgttggatggtaataaactgtttaatattgcacaaagaattttagacactaactctgttttattaaccgaacgaggagaccatatagtttggattaataattcatggaaatttaacagcgaagaacccttgataacaaaactaattttgtcaataagacatcaactacctaaggaatattcaagcgaattactctgtccgaggaaacgaaagactgtagaagctaacatacgagacatgttagtagattcagtagagaccgatacctatccggataaacttccgtttaaaaatggtgtattggacctggtagacggaatgttttactctggagatgatgctaaaaaatatacgtgtactgtatcaaccggatttaaatttgacgatacaaagttcgtcgaagacagtccagaaatggaagagttaatgaatatcattaacgatatccaaccattaacggatgaaaataagaaaaatagagagctatatgaaaaaacattatctagttgtttatgcggtgctaccaaaggatgtttaacattcttttttggagaaactgcaactggaaagtcgacaaccaaacgtttgttaaagtctgctatcggtgacctgtttgttgagacgggtcaaacaattttaacagatgtattggataaaggacctaatccatttatcgctaacatgcatttgaaaagatctgtattctgtagcgaactacctgattttgcatgtagtgggtcaaagaaaatcagatctgataatattaaaaagttgacagaaccttgtgtcattggaagaccgtgtttctccaataaaattaataatagaaaccatgcgacaatcattatcgatactaattacaaacctgtttttgataggatagataacgcattaatgagaagaattgccgtcgtgcgattcagaacacacttttctcaaccttctggtagagaggctgctgaaaataatgacgcgtacgataaagtcaaactattagacgaggggttagatggtaaaatacaaaataatagatatagatttgcatttctatacttgttggtgaaatggtacagaaaatatcatgttcctattatgaaactatatcctacaccggaagagattcctgactttgcattctatctcaaaataggtactctgttagtatctagctctgtaaagcatattccattaatgacggacctctccaaaaagggatatatattgtacgataatgtggtcactcttccgttgactactttccaacagaaaatatccaagtattttaattctagactatttggacacgatatagagagcttcatcaatagacataagaaatttgccaatgttagtgatgaatatctgcaatatatattcatagaggatatttcatctccgtaaatatatgctcatatatttatagaagatatcacatatctaaatgaataccggaatcatagatttatttgataatcatgttgatagtataccaactatattacctcatcagttagctactctagattatctagttagaactatcatagatgagaacagaagcgtgttattgttccatattatgggatcaggtaaaacaataatcgctttgttgttcgccttggtagcttccagatttaaaaaggtttacattctagtgccgaacatcaacatcttaaaaattttcaattataatatgggtgtagctatgaacttgtttaatgacaaattcatagctgagaatatctttattcattccacaacaagtttttattctcttaattataacgataacgtcattaattataacggattatctcgctacaataactctatttttatcgttgatgaggcacataatatctttgggaataatactggagaacttatgaccgtgataaaaaataaaaacaagattccttttttactattgtctggatctcccattactaacacacctaatactctgggtcatattatagatttaatgtccgaagagacgatagattttggtgaaattattagtcgtggtaagaaagtaattcagacacttcttaacgaacgcggtgtgaatgtacttaaggatttgcttaaaggaagaatatcatattacgaaatgcctgataaagatctaccaacgataagatatcacggacgtaagtttctagatactagagtagtatattgtcacatgtctaaacttcaagagagagattatatgattactagacgacagctatgttatcatgaaatgtttgataaaaatatgtataacgtgtcaatggcagtattgggacaacttaatctgatgaataatttagatactttatttcaggaacaggataaggaattgtacccaaatctgaaaataaataatggcgtgttatacggagaagaattggtaacgttaaacattagttccaaatttaaatactttattaatcggatacagacactcaacggaaaacattttatatacttttctaattctacatatggcggattggtaattaaatatatcatgctcagtaatggatattctgaatataatggttctcagggaactaatccacatatgataaacggcaaaccaaaaacatttgctatcgttactagtaaaatgaaatcgtctttagaggatctattagatgtgtataattctcctgaaaacgatgatggtagtcaattgatgtttttgttttcgtcaaacattatgtccgaatcctatactctgaaagaggtaaggcatatttggtttatgactatcccagatactttttctcaatacaaccaaattcttggacgatctattagaaaattctcttacgccgatatttctgaaccagttaatgtatatcttttagccgccgtatattccgatttcaatgacgaagtgacgtcattaaacgattacacacaggatgaattaattaatgttttaccatttgacatcaaaaagctgttatatctaaaatttaagacgaaagaaacgaatagaatatactctattcttcaagagatgtctgaaacgtattctcttccaccacatccatcaattgtaaaagttttattgggagaattggtcagacaatttttttataataattctcgtattaagtataacgataccaagttacttaaaatggttacatcagttataaaaaataaagaagacgctaggaattacatagatgatattgtaaacggtcacttctttgtatcgaataaagtatttgataaatctcttttatacaaatacgaaaacgatattattacagtaccgtttagactttcctacgaaccatttgtttggggagttaactttcgtaaagaatataacgtggtatcttctccataaaactgatgagatatataaagaaataaatgtcgagctttgttaccaatggatacctttccgttacattggaacctcatgagctgacgttagacataaaaactaatattaggaatgccgtatataagacgtatctccatagagaaattagtggtaaaatggccaagaaaatagaaattcgtgaagacgtggaattacctctcggcgaaatagttaataattctgtagttataaacgttccgtgtgtaataacctacgcgtattatcacgttggggatatagtcagaggaacattaaacatcgaagatgaatcaaatgtaactattcaatgtggagatttaatctgtaaactaagtagagattcgggtactgtatcatttagcgattcaaagtactgcttttttcgaaatggtaatgcgtatgacaatggcagcgaagtcactgccgttctaatggaggctcaacaaggtatcgaatctagttttgtttttctcgcgaatatcgtcgactcataagaaagagaatagcggtaagtataaacacgaatactatggcaataattgcgaatgttttattctcttcgatatatttttgataatatgaaaaacatgtctctctcaaatcggacaaccatctcataaaatagttctcgcgcgctggagaggtagttgccgctcgtataatctccccagaataatatacttgcgtgtcgtcgttcaatttatacggatttctatagttctctgttatataatgcggttttccatcatgattagacgacgacaatagtgttctaaatttagatagttgatcagaatgaatgtttattggcgttggaaaaattatccatacagcgtctgcagagtggttgatagttgttcctagatatgtaaaataatccaacttactaggcagcaaattgtctagataaaatactgaatcaaacggtgcagacgtattggcggatctaatggaatccaattgattaactatcttttgaaaatatacatttttatgatccaatacttgtaagaatatagaaataatgataagtccatcatcgtgtttttttgcctcttcataagaactatattttttcttattccaatgaacaagattaatctctccagagtatttgtacacatctatcaagtgattggatccataatcgtcttcctttccccaatatatatgtagtgatgataacacatattcattggggagaaaccctccacttatatatcctcctttaaaattaatccttactagttttccagtgttctggatagtggttggtttcgactcattataatgtatgtctaacggcttcaatcgcgcgttagaaattgcttttttagtttctatattaataggagatagttgttgcggcatagtaaaaatgaaatgataactgtttaaaaatagctcttagtatgggaattacaatggatgaggaagtgatatttgaaactcctagagaattaatatctattaaacgaataaaagatattccaagatcaaaagacacgcatgtgtttgctgcgtgtataacaagtgacggatatccgttaataggagctagaagaacttcattcgcgttccaggcgatattatctcaacaaaattcagattctatctttagagtatccactaaactattacggtttatgtactacaatgaactaagagaaatctttagacggttgagaaaaggttctatcaacaatatcgatcctcactttgaagagttaatattattgggtggtaaactagataaaaaggaatctattaaagattgtttaagaagagaattaaaagaggaaagtgatgaacgtataacagtaaaagaatttggaaatgtaattctaaaacttacaacacgggataaattatttaataaagtatatataagttattgcatggcgtgttttattaatcaatcgttggaggatttatcgcatactagtatttacaatgtagaaattagaaagattaaatcattaaatgattgtattaacgacgataaatacgaatatctgtcttatatttataatatgctagttaatagtaaatgaacttttacagatctagtataattagtcagattattaagtataatagacgactagctaagtctattatttgcgaggatgactctcaaattattacactcacggcattcgttaaccaatgcctatggtgtcataaacgagtatccgtgtccgctattttattaactactgataacaaaatattagtatgtaacagacgagatagttttctctattctgaaataattagaactagaaacatgtttagaaagaaacgattatttctgaattattccaattatttgaacaaacaggaaagaagtatactatcgtcatttttttctctagatccagctactactgataatgatagaatagacgctatttatccgggtggcatacccaaaaggggtgagaatgttccagagtgtttatccagggaaattaaagaagaagttaatatagacaattcttttgtattcatagacactcggttttttattcatggcatcatagaagataccattattaataaattttttgaggtaatcttctttgtcggaagaatatctctaacgagtgatcaaatcattgatacatttaaaagtaatcatgaaatcaaggatctaatatttttagatccgaattcaggtaatggactccaatacgaaattgcaaaatatgctctagatactgcaaaacttaaatgttacggccatagaggatgttattacgaatcattaaaaaaattaactgaggatgattgattagaaaatataaattaatttaccatcgtgtatttttataacgggattgtccggcatatcatgtagatagttaccgtctacatcgtatactcgaccatctacgcctttaaatcctctatttattgacattaatctattagaattggaataccaaatattagtaccctcaattagtttattggtaatattttttttagacgatagatcgatggctcttgaaaccaaggttttccaaccggactcattgtcgatcggtgagaagtctttttcattagcatgaatccattctaatgatgtatgtttaaacactctaaacaattggacaaattcttttgatttgctttgaatgatttcaaataggtcttcgtctacagtaggcataccattagataatctagccattataaagtgcacgtttacatatctacgttctggaggagtaagaacgtgactattgagacgaatggctcttcctactatctgacgaagagacgcctcgttccatgtcatatctaaaatgaagatatcattaattgagaaaaaactaataccctcgcctccactagaagagaatacgcatgttttaatgcattctccgttagtgtttgattcttggttaaactcagccaccgccttgattctagtatcttttgttctagatgagaactctatattagagataccaaagactttgaaatatagtaataagatttctattcctgactgattaacaaatggttcaaagactagacatttaccatgggatgctaatattcccaaacatacatctataaatttgacgcttttctcttttaattcagtaaatagagagatatcagccgcactagcatcccctttcaatagttctccctttttaaaggtatctaatgcggatttagaaaactctctatctcttaatgaatttttaaaatcattatatagtgttgctatctcttgcgcgtattcgcccggatcacgattttgtctttcaggaaagctatcgaacgtaaacgtagtagccatacgtctcagaattctaaatgatgatatacctgtttttatttcagcgagtttagccttttgataaatttcttcttgctttttcgacatattaacgtatcgcattaatactgttttcttagcgaatgatgcagacccttctacgtcatcaaaaatagaaaactcgttattaactatatacgaacatagtcctcctagtttggagactaattctttttcatcgactagacgtttattctcaaatagtgattggtgttgtaaggatcctggtcgtagtaagttaaccaacatggtgaattcttgcacactattgacgataggtgtagccgataaacaaatcatcttatggttttttaacgcaatggtcttagataaaaaattatatactgaacgagtaggacggatcttaccatcttctttgattaatgatttagaaatgaagttatgacattcatcaatgatgacgcatattctactcttggaattaatagttttgatattagtaaaaaatttatttctaaaattttgatcatcgtaattaataaaaatacaatccttcgttatctctggagcgtatctgagtatagtgttcatccaaggatcttctatcaaagcctttttcaccaataagataatagcccaattcgtataaatatccttaagatgtttgagaatatatacagtagtcattgttttaccgacacccgtttcatggaacaataaaagagaatgcatactgtctaatcctaagaaaactcttgctacaaaatgttgataatccttgaggcgtactacgtccgaccccatcatttcaacgggcatattagtagttctgcgtaaggcataatcgatataggccgcgtgtgatttactcatttatgagtgataagtaataactatgttttaaaaatcacagcagtagtttaactagtcttctctgatgtttgttttcgatactttttgaatcagaagtcatactagaataaagcaacgagtgaacgtaatagagagcttcgtatactctattcgaaaactctaagaacttattaatgaattccgtatccactggattgtttaaaatactaaattgaacactgttcacatccttccaagaagaagacttagtgacggacttaacatgagacataaataaatccaaattttttttacaaacatcactagccaccataatggcgctatctttcaaccagctatcgcttacgcattttagcagtctaacatttttaaagagactacaatatattctcatagtatcgattacacctctaccgaataaagttggaagtttaataatacaatatttttcgtttacaaaatcaaataatggtcgaaacacgtcgaaggttaacatcttataatcgctaatgtatagattgttttcagtgagatgattattagatttaatagcatctcgttcacgtttgaacagtttattgcgtgcgctgaggtcggcaactacggcgtccgctttagtactcctcccataatactttacgctattaatctttaaaatttcatagactttatctagatcgctttctggtaacatgatatcatgtgtaaaaagttttaacatgtcggtcggcattctatttagatcattaactctagaaatctgaagaaagtaattagctccgtattccagactaggtaatgggcttttacctagagacagattaagttctggcaatgtttcataaaatggaagaaggacatgcgttccctcccggatattttttacaatttcatccatttacaactctatagtttgttttcattattattagttattatctcccataatcttggtaatacttaccccttgatcgtaagataccttatacaggtcattacatacaactaccaattgtttttgtacataatagattggatggttgacatccatggtggaataaactactcgaacagatagtttatctttccccctagatacattagccgtaatagttgtcggcctaaagaatatctttggtgtaaagttaaaagttagggttcttgttccattattgctttttgtcagtagttcattataaattctcgagatgggtccgttctctgaatatagaacatcatttccaaatctaacttctagtctagaaataatatcggtcttattcttaaaatctattcccttgatgaagggatcgttaatgaacaaatccttggcctttgattcggctgatctattatctccgttatagacgttacgttgactagtccaaagacttacaggaatagatgtatcgatgatgttgatactatgtgatatgtgagcaaagattgttctcttagtggcatcactatatgttccagtaatggcggaaaactttttagaaatgttatatataaaagaattttttcgtgttccaaacattagcagattagtatgaagataaacactcatattatcaggaacattatcaatttttacatacacatcagcatcttgaatagaaacgataccatcttctggaacctctacgatctcggcagactccggataaccagtcggtgggccatcgctaacaataactagatcatccaacaatctactcacatatgcatctatataatctttttcatcttgtgagtaccctggatacgaaataaatttattatccgtatttccataataaggtttagtataaacagagagagatgttgccgcatgaacttcagttacagtcgccgttggttggtttatttgacctattactctcctaggtttctctataaacgatggtttaatttgtacattcttaaccatatatccaataaagctcaattcaggaacataaacaaattctttgttgaacgtttcaaagtcgaacgaagagtcacgaataacgatatcggatactggattgaaggttaccgttacggtaatttttgaatcggatagtttaagactgctgaatgtatcttccacatcaaacggagttttaatataaacgtatactgtagatggttctttaatagtgtcattaggagttaggccaatagaaatatcattaagttcactagaatatccagagtgtttcaaagcaattgtattattgatacaattattatataattcttcgccctcaatttcccaaataacaccgttacacgaagagatagatacgtgattaatacatttatatccaacatatggtacgtaactgaatcttcccatacctttaacttctggaagttccaaactcagaaccaaatgattaagcgcagtaatatactgatccctaatttcgaagctagcgatagcctgattgtctggaccatcgtttgtcataactccggatagagaaatatattgcggcatatataaagttggaatttgactatcgactgcgaagacattagaccgtttaatagagtcatccccaccgatcaaagaattaatgatagtattattcattttctatttaaaatggaaaaagcttacaataaactccgtagagaaatatctataatttgtgagttttccttaaagtaacagcttccgtaaacgccgtctttatctcttagtaggtttattgtatttatgaccttttccttatcttcatagaatactaaaggcaacaaagaaatttttggttcttctctaagagctacgtgagacttaaccatagaagccaacgaatccctacatattttagaacagaaataccctacttcaccacccttgtatgtctcaatactaataggtctaaaaaccaaatcttgattacaaaaccaacacttatcaattacactatttgtcttaatagacacatctgccatagatttataatactttggtagtatacaagcgagtgcttcttctttagcgggcttaaagactgctttaggtgctgaaataaccacatctggaaggcttactcgcttagccatttaattacggaactatttttttatacttctaatgagcaagtagaaaacctctcatctacaaaaacgtactcgtgtccataatcctctaccatagttacacgttttttagatctcatatgtgctaaaaagttttcccatactaattggttactattatttttcgtataatttttaacagtttgaggttttagatttttagttacagaagtgatatcgaatattttatccaaaaagaatgaataattaattgtcttagaaggagtgttttcttggcaaaagaataccaagtgcttaaatatttctactacttcattaatcttttctgtactcagattcagtttctcatcttttacttgattgattatttcaaagactaacttataatcctttttatttattctctcgttagccttaagaaaactagatacaaaatttgcatctacatcatccgtggatatttgatttttttccatgatatccaagagttccgagataatttctccagaacattgatgagacaataatctccgcaatacatttctcaaatgaataagtttattagacacgtggaagtttgactttttttgtacctttgtacatttttgaaatacagactcgcaaaaaatacaatattcatatccttgttcagatactataccgttatgtctacaaccgctacataatcgtagattcatgttaacactctacgtatctcgtcgtccaatattttatataaaaacattttatttctagacgttgccagaaaatcctgtaatatttttagttttttgggctgtgaataaagtatcgccctaatatggttaccgtcctccgccaatatagtagttaaattatccgcacatgcagaagaacaccgcttaggcggattcagtacaatgttatatttttcgtaccaactcatttaaatatcataatctaaaatagttctgtaatatgtctagcgctaatatattgatcataatcctgtgcataaattaagatacaacaatgtctcgaaatcatcgacatggcttcttccatagttagaagatcgtcgtcaaagttagcaacgtgattcatcaacatttgctgttttgaggcagcaaatactgaaccgtcgccattcaaccattcataaaaaccatcgtctgaatccattgataatttcttgtactggtttttgagagctcgcatcaatctagcatttctagctcccggattgaaaacagaaagaggatcgtacatccagggtccattttctgtaaatagaatcgtataatgtcccttcaagaagatatcagacgatccacaatcaaagaattggtctccgagtttgtaacaaactgcggactttaacctatacatgataccgtttagcataatttctggtgatacgtcaatcggagtatcatctattagagatctaaagccggtgtaacattctccaccaaacatattcttattctgacgtcgttctacataaaacatcattgctccattaacgataacaggggaatgaacagcactacccatcacattagttcccaatggatcaatgtgtgtaactccagaacatcttccatagcctatgttaggaggagcgaacaccactcttccactattgccatcgaatgccatagaataaatatccttggaattgatagaaatcggactgtcggatgttgtgatcatcttcataggattaacaactatgtatggtgccgcctgaagtttcatatcgtaactgatgccgtttataggtctagccacagaaaccaacgtaggtctaaatccaactatagacaaaatagaagccaatatctgttcctcatctgtcataacttgagagcatccagtatgaataatcttcattagatggggatctaccgcatcatcatcgttacaataaaaaattcccattctaatgttcataattgcttttctaatcatggtatgcatgtttgctctctgaatctctgtggaaattagatctgatacacctgtaatcactatcggattatcctccgtaagacgattaaccaacaacatataattataagactttacttttctaaattcataaagttgctggattaggctataggtgtctccatgtacatacgcgttctcgagcgcaggaagtttaataccgaatagtgccatcagaataggatgaatatagtaattagtttctggttttctataaataaaagacaaatcttgtgaactagacatatcggtaaaatgcatggattggaatcgtgtagtcgacagaagaatatgatgattagatggagagtatattttatctaactctttgagttggtcaccgattctaggactagctcgagaatgaataagtactaaaggatgagtacatttcacagaaacactagcattgttcaatgtgctctttacatgggtaaggagttgaaatagctcgtttctatttgttctgacaatatttagtttattcataatgttaagcatatcctgaatagtaaagttagatgtgtcatacttgttagtagttagatatttagcaattgcattcccatcatttctcaatctcgtactccaatcatgtgtagatgctacttcgtcgatggaaaccatacaatcctttttgataggctgttgagattgatcatttcctgcacgtttaggtttggtacgttgatttctagcccctgcggatataaagtcatcgtctacaatttgggacaatgaattgcatacactacaagacaaagatttatcagaagtgtgaatatgatcttcatctaccaaagaaagagtttgattagtataactagattttagtcctgcgttagatgttaaaaaaacatcgctattgaccacggcttccattatttatattcgtagtttttactcgaaagcgtgattttaatatccaatcttattacttttggaatcgttcaaaacctttgactagttgtagaatttgatctattgccctacgcgtatactcccttgcatcatatacgttcgtcaccagatcgtttgtttcggcctgaagttggtgcatatctctttcaacattcgacatgagatccttaagggccatatcgtctagattttgttgagatgctgctcctggatttggattttgttgtgctgttgtacatactgtaccaccagtaggtgtaggagtacatacagtggccacaataggaggttgagaaagtgtaaccgttggagtagtacaagaaatacttccatccgattgttgtgtacatgtagttgttggtaacgtctgagaaggttgggtagatggcggcgtcgtcgttttttgatctttattaaatttagagataatatcctgaacagcattgctcggcgtcaacgctggaaggagtgaactcgccggcgcatcagtatcttcagacagccaatcaaaaagattagacatatcagatgatgtattagtttgttgtcgtggttttggtgtaggagcagtactactaggtagaagaataggagccgatgtagctgttggaaccggctgtggagttatatgaatagttggttgtagcggttggataggctgtctgctggcggccatcatattatctctagctagttgttctcgcaactgtctttgataatacgactcttgagactttagtcctatttcaatcgcttcatcctttttcgtatccggatccttttcttcagaataatagattgacgactttggtgtagaggattctgccagcctctgtgagaacttgttaaagaagtccatttaaggctttaaaattgaattgcgattataagattaaatggcagacacagacgatattatcgactatgaatccgatgatctcaccgaatacgaggatgatgaagaagaggaagaagatggagagtcactagaaactagtgatatagatcccaaatcttcttataagattgtagaatcagcatccactcatatagaagatgcgcattccaatcttaaacatatagggaatcatatatctgctcttaaacgacgctatactagacgtataagtctatttgaaatagcgggtataatagcagaaagctataacttgcttcaacgaggaagattacctctagtttcagaattttctgacgaaacgatgaagcaaaatatgctacatgtaattatacaagagatagaggagggttcttgtcctatagtcatcgaaaagaacggagaattgttgtcggtaaacgattttgacaaagatggtctaaaattccatctagactatattatcaaaatttggaaacttcaaaaacgatattagaatttatacgaatatcgttctctaaatgtcacaatcaagtctcgcatgttcagcaatttattgtcgtactttatatcgtgttcattaacgatatcttgcaaaatagtaatgattctatcttccttcgatagatattcttcagagattattgtcttatattctttcttgttatcagatatgaatttgataagactttgaacattattgatacccgtctgtttaattttttctacagatattttagttttggcagattctatcgtatctgtcaatagacatccaacatcgacattcgacgtcaattgtctataaatcaacgtataaattttagaaataacattagcgaattgttgtgcgttgatgtcgttattctgaaacagtatgattttaggtagcattttcttaacaaagagaacgtatttattgttactcagttgaacagatgatatatccagattactaacgcatctgattccgtataccaaactttcagaagaaatggtatacaattgtttgtattcattcaatgtctctttttcagaaattagtttagagtcgaatactgcaataattttcaagagatagttttcatcagataagattttatttagtgtagatatgataaaactattgttttgttggagaacttgatacgccgcgttctctgtagtcgacgctctcaaatgggaaacaatctccattatttttttggaatcggatactatatcttcggtatcttgacgcagtctagtatacatagagttaagagagattagagtttgtacattaagcaacatgtctctaaatgtggctacaaacttttcctttttcacatcatctagtttattatataccgatttcacaacggcaccagatttaaggaaccagaatgaaaaactctgataactacaatatttcatcatagttacgattttatcatcttctatagttggtgtaatagcgcatacctttttctccaagactggaaccaacgtcataaaaatgtttaaatcaaaatccatatcaacatctgatgcgctaagaccagtctcgcgttcaagattatctttactaatggtgacgaactcatcgtataaaactctaagtttgtccattatttatttacagatttagttgtttaatttatttgtgctcttccagagttgggatagtatttttctaacgtcggtattatattattaggatctacgttcatatgtatcataatattaatcatccacgttttgataaatctatctttagcttctgaaataacgtatttaaacaaaggagaaaaatatttagctacggcatcagacgcaataacattttttgtaaatgtaacgtatttagacgacagatcttcgttaaaaagttttccatctatgtagaatccatcggttgttaacaccattcccgcgtcagattgaataggagtttgaatagtttgttttggaaatagatccttcaataacttatagttgggtgggaaaaaatcgattttatcactagactctttcttttttactatcattacctcatgaactatttcttgaatgagtatatgtattttctttcctatatcggacgcgttcattggaaaatataccatgtcgttaactataagaatatttttatcctcgtttacaaactgaataatatcagatgtagttcgtaaacgaactatatcatcaccagcacaacatctaactatatgatatccactagtttcctttagccgtttattatcttgttccatattagcagtcattccatcatttaagaaggcgtcaaagataatagggagaaatgacattttggattctgttacgactttaccaaaattaaggatatacggacttactatctttttctcaacgtcaatttgatgaacacacgatgaaaatgtgcttctatgagattgatcatgtagaaaacaacaagggatacaatatttccgcatatcatgaaatatattaagaaatcccaccttattatatttccccaaaggatccatgcacgtaaacattatgccgttatcattaataaagacttctttctcatcggatctgtaaaagttgttactgatttttttcattccaggatctagataattaataatgatgggttttctattcttattctttgtattttggcatatcctagaccagtaaacagtttccactttggtaaaatcagcagacttttgaacgctattaaacatggcattaatggcaataactaaaaatgtaaaatatttttctatgttaggaatatggtttttcactttaatagatatatggtttttggccaaaatgatagatatttttttatccgaggatagtaaaatattattagtcgccgtctctataaaaatgaagctagtctcgatatccaattttattctagaattgataggagtcgccaaatgtaccttatacgttatatctcccttgatgcgttccatttgtgtatctatatcggacacaagatctgtaaatagttttacgttattaatcatcacggtatcgccgtcgctagataacgctaatgtaccatccaagtcccaaatggagagatttaactgttcatcgtttagaataaaatgattaccggtcatattaataaagtgttcatcgtatctagataacaacgacttataattaatgtccaagtcttgaactcgctgaatgatcttttttaacccagttagttttagattggtacgaaatatattgttaaactttgattctacagtaatgtccaaatctagttgtggaaatacttccatcaacattgtttcaaacttgataatattattatctacatcttcgtacgatccaaattccggaatagatgtatcgcacgctctggccacccagataaccaaaaagtcacacgctccaggatatacattgtataaaaagctatcgtttttaagtagggtttttttctgcgtgtatacgaagggattaaaaatagtattatcaacgtaactatattccaaattattcttatgagaatagataataatatcgtccttaatatctaacaaatttcctaaatatccctttaattgagtcattcgaagcgtcaatagaatatgtctcttaactatttccggctgttgtatatttaaatgacttcgtaaaaaataatatatgggcgacttctcatctatgtaatcatatggagtgagatatagggctcgttctacctcctgccccttacccacctgtaataccaattgcggacttactatatatcgcatatttatatcgtggggtaaagtgaaaatctactaccgatgatgtaagtcttacaatgttcgaaccagtaccagatcttaatttggaggcctccgtagaactaggggaggtaaatatagatcaaacaacacctatgataaaggagaatagcggttttatatcccgcagtagacgtctattcgcccatagatctaaggatgatgagagaaaactagcactacgattctttttacaaagactttattttttagatcatagagagattcattatttgttcagatgcgttgacgctgtaaaagacgtcactattaccaaaaaaaataacattatcgtggcgccttatatagcacttttaactatcgcatcaaaaggatgcaaacttacagaaacaatgattgaagcattctttccagaactatataatgaacatagtaagaaatttaaattcaactctcaagtatccatcatccaagaaaaactcggataccagtttggaaactatcacgtttatgattttgaaccgtattactctacagtagctctggctattcgagatgaacattcatctggcatttttaatatccgtcaagagagttatctggtaagttcattatctgaaataacatatagattttatctaattaatctaaaatctgatcttgttcaatggagtgctagtacgggcgctgtaattaatcaaatggtaaatactgtattgattacagtgtatgaaaagttacaactggtcatagaaaatgattcacaatttacatgttcattggctgtggaatcaaaacttccaataaaattacttaaagatagaaatgaattatttacaaaattcattaacgagttaaaaaagaccagttcattcaagataagcaaacgcgataaggatacgctactaaaatattttacttaggactggagttagaatttatagacgactcatttcgtttatcattgttactattattactattactatcattattagtgttggcattattagtattcttcttgtcatcttgttcagaaatatacagcaatgctatacctaatactaaatacattatcatgctcgcaatggctctaacaacaacgaaccaaaatgaatttggtcgtagcttttgttcacaaaaatacataaagaaatgtctacataaatctatggcgccattggctacttgaaatagcgccagtcctcctacagattttaatatagctgtataacatgacatttattcatcatcaaaagagacagagtcaccatctgtcatatttagattttttttcatgtgttcaaagtatcctctactcatttcattataatagtttatcatacttagaattttaggacggatcaatgagtaagacttgactagatcgtcagtagtaatttgtgcatcgtctattctgcatccgcttcgtcgaataatgtatagcatcgctttgagattctccatagctatcaagtctttatacaatgacatggaaatatctgtgaatactttatacttctccaacatcgatgccttaacatcatcgcctactttagcattgaaaatacgttctattgtgtagatggatgtagcaagatttttaaacaacaatgccatcttacacgatgattgcctcaagtctccaatcgtttgtttagaacgattagctacagagtccaatgcttggctgactagcatattattatctttagaaattgtattcttcaatgaggcgtttatcatatctgtgatttcgttagtcatattacagtctgactgggttgtaatgttatccaacatatcacctatggatacggtacacgtaccagcatttgtaataatcctatctaagatgttgtatggcattgcgcagaaaatatcttctcctgtaatatctccactctcgataaatctactcagattattcttaaatgccttattctctggagaaaagatatcagtgtccatcatttcattaatagtatacgcagaaaagataccacgagtatcaattctatccaagatacttatcggttccgagtcacagataatggtttcctctccttcgggagatcctgcatagaaatatctaggacaatagtttctatactgtctgtaactctgataatctctaaagtcactaactgataccatgaaattgagaagatcaaacgctgaagtaattaatttttctgcctcgtttttactacaactagttttcatcaatgtagtgacgatgtattgtttagttacttttggtctaatactgatgatagagatattattgcttcccataatggatcttctagtagtcaccttaaagcccattgatgcgaatagcagatagataaagtcttggtatgactcctttctaatatagtacggactacctttgtcacccaactttatacccacataagccataacaacctctttaatagccgtttcatgaggtttatcagccatgagcctgagtagttggaagaatctcatgaatcccgtctcagaaagtcctatatgcatgatagatttatctttcctgggaaactctcgtatagtcatagatgaaatactctttaaagtttctgaaataagattagtaacagtcttacctccgactactctaggtaacaaacaaactctaataggtgttttctctgcggagataatatcagaaaggatagagcaataagtagtattattgtgattataaagaccgaatacataacaggtagaatttataaacatcatgtcctgaaggtttttagacttgtattcctcgtaatccataccgtcccaaaacatggatttggtaactttgatagccgtagatctttgttccttcgccaacaggttaaagaaattaataaagaatttgttgtttctatttatgtccacaaattgcacgtttggaagcgccacggttacattcactgcagcattttgaggatcgcgagtatgaagtacgatgttattgtttactggtatatctggaaagaaatctaccagtctaggaataagagattgatatcgcatagaaatagtaaagtttataatctcatcatcgaagagcattttgttaccattgtaataaatatccactctgtcatatgtataaatgaagtactgttcaaacatgatgagatgtttatatgttggcatagtagtgagatcgacgtttggtaatggcaatgtattaagattaactccataatgtctagcagcatctgcgatgttataagcgtcgtcaaagcggggtcgatcttgtattgttatatattgtctaacacctataagattatcaaaatcttgtctgcttaatacaccgttaacaatttttgccttgaattcttttattggtgcattaataacatccttatagaggatgttaaacaaataagtgttatcaaagttaagatctggatatttcttttctgctagaacatccattgagtcggagccatctggtttaatataaccaccgataaatctagctctgtattctgtatccgtcaatctaatattaagaaggtgttgagtgaaaggtggaagatcgtaaaagctgtgagtattaatgataggattagtttccgaactaatgttaattggggtattaataatatctatatttccagcgttaagtgtaacattaaacagttttaattcacgtgacgtggtatcaattaaataattaatgcccaatttggatatagcagcctgaagctcatcttgtttagttacggatcctaatgagttattaagcaatatatcgaacggatgaacgaaggttgttttaagttggtcacatactttgtaatctagacatagatgcggaagaacggtagaaactatacgaaataaatattcagagtcctctaattgatcaagagtaactattgacttaataggcatcatttatttagtattaaatgacgaccgtaccagtgacggatatacaaaacgatttaattacagagttttcagaagataattatccatctaacaaaaattatgaaataactcttcgtcaaatgtctattctaactcacgttaacaacgtggtagatagagaacataatgccgccgtagtgtcatctccagaggaaatatcctcacaacttaatgaagatctatttccagatgatgattcaccggccactattatcgaacgagtacaacctcatactactattattgacgatactccacctcctacgtttcgtagagagttattaatatcggaacaacgtcaacaacgagaaaaaagatttaatattacagtatcgaaaaatgctgaagcaataatggaatctagatctatgataacttctatgccaacacaaacaccatccttgggagtagtttatgataaagataaaagaattcagatgttagaggatgaagtggttaatcttagaaatcaacgatctaatacaaaatcatctgataatttagataattttaccaaaatactatttggtaagactccgtacaaatcaacagaagttaataagcgtatagccatcgttaattatgcaaatttgaacgggtcccccttatcagtcgaggacttggatgtttgttcggaggatgaaatagatagaatctataaaacgattaaacaatatcacgaaagtagaaaacgaaaaattatcgtcactaacgtgattattattgtcataaacattatcgagcaggcattgctaaaactcggatttgaagaaatcaaaggactgagtaccgatatcacttcagaaattatcgatgtggagatcggagatgactgcgatgctgtagcatctaaactaggaatcggtaacagtccggttcttaatattgtattgtttatactcaagatattcgttaaacgaattaaaattatttaatttaatacattcccatatccagacaacaatcgtctggattaatctgttcctgtcgtctcataccggacgacatattaatctttttattagtgggcatctttttagatggtttctttttcccagcattaactgagtcgatacctagaagatcgtgattgatctctccgaccattccacgaacttctaattggccgtctctgacggtaccataaactattttaccagcattagtaacagcttggacaatctgaccatccatcgcattgtacgatgtagtagtaactgttgttctacgtctaggagcaccagaagtatttttggagcccttggatgttgatgtagaagaagacgaggattttgattttggtttacatgtaatacattttgaactctttgattttgtatcacatgcgccggcagtcacatctgtttgagaattaagattattgttgcctcctttgacggctgcatctccaccgatttgcgctagtagatttttaagctgtggtgtaatcttattaactgtttcgatataatcatcgtaactgcttctaacggctaaattttttttatccgccatttagaagctaaaaatatttttatttatgcagaagatttaactagattatacaatgaactaatatgatccttttccagattatttacaaacttggtattttttggttctggaggaggcgaatttaaattcggacttggattcggattttgtaagttcttgatcttattatacatcgagtataggatggcgacagtaactgctacacaaataccgatcaaaagaagaataccaatcatttattgacaataacttcactattgatcaagtatgcaatatatcatcttttcactaaataagtagtaataatgattcaacaatgtcgagatatatggacgataataatttagttcatggaaatatcgctatgattggtgtgaatgactccgctaactctgtggggtgcgcagtgctttccccacatagaataaattagcattccgactgtgataataataccaagtataaacgccataatactcaatactttccatgtacgagtgggactggtagacttactaaagtcaataaaggcgaagatacacgaaagaatcaaaagaatgattccagcgattagcacgccggaaaaataatttccaatcataagcatcatgtccatttaactaataaaaattttaaatcgccgaatgaacaaagtggaatataaaccatataaaaacaatagtttgtactgcaaaaataatatctatttttgttttcgaagatatggtaaaattaaatagtagtacacagcatgttataactaacagcagcaacggctcgtaattacttatcatttactagacgaaaaggtggtgggatattttcttgctcaaataatacgaatatatcacccatccattttatgcgatgtttatatactctaatctttaatagatctatagacgacgggtttaccaacaatatagattttatcgattcatctaatttaaacccttccttaaacgtgaatgatctattatctggcataacgatgaccctacctgatgaatcggacaatgtactgggccatgtagaataaattatcaacgaattatcgtctacgaacatttatatcatttgttttaattttaggacgcgaataaatggatataaaatagaaaataacagatattacaaccagtgttatggccgcgcccaaccaggtaggcagttttattttatcttttactacaggttctcctggatgtacgtcaccaacggcggacgtagttctagtacaattagacgtaagttccgcttgggaattttttaacgctaaagagttaacgttaatcgtgcacccaacgtatttacatctagttcgttgaacatcttgattataatataaccattttctatctctagattcgtcagtgcactcatgtaaccaacataccctaggtcctaaatatttatctccggaattagattttggataattcgcgcaccaacaatttctatttcctttatgatcgttacaaaagacgtataatgccgtatccccaaaagtaaaataatcaggacgaataattctaataaactcagaacaatatctcgcatccatatgtttggagcaaatatcggaataagtagacatagccggtttccgttttgcacgtaaccattctaaacaattggggtttccaggatcgtttctacaaaatccagtcatgaaatcgtcacaatgttctgtcttgtaattattattaaatatttttggacagtgtttggtatttgtcttagaacaacattttgccacgctatcactatcgcccaggagataatccttttttataaaatgacatcgttgcccggatgctatataatcagtagcgtgttttaaatccttaatatattcaggagttacctcgttctgataatagattaatgatccaggacgaaatttgaaagaactacatggttctccatgaattaatacatattgtttagcaaattcaggaactataaaactactacaatgatctatcgacataccatctatcaaacaaaacttgggtttaatttctcccggagatgtttcataatagtacgtataactttcttctgcaaacttaacagctctattatattcaggataattaaaacctaattccatatatttgtctcgtatatctgctattcctggtgctattttgattctattaagagtaacagctgcccccattcttaataatcgtcagtatttaaactgttaaatgttggtatatcaacatctaccttatttcccgcagtataaggtttgttgcaggtatactgttcaggaatggttacatttatacttcttctatagtcctgtctttcgatgttcatcacatatgcaaagaacagaataaacaaaataatgtaagaaataatattaaatatctgtgaattcgtaaatacattgattgccataataattacagcagctacaatacacacaatagacattcccacagtgttgccattacctccacgatacatttgagttactaagcaataggtaataactaagctagtaagaggcaatagaaaagatgagataaatatcatcaatatagagattagaggagggctatatagagccaagacgaacaaaatcaaaccgagtaacgttctaacatcattatttttgaagattcccaaataatcattcattcctccataatcgttttgcatcatacctccatctttaggcataaacgattgctgctgttcctctgtaaataaatctttatcaagcactccagcacccgcagagaagtcgtcaagcatattgtaatatcttaaataactcatttatatattaaaaaatgtcactattaaagatggagtataatctttatgccgaactaaaaaaaatgacttgtggtcaacccctaagtctttttaacgaagacggggatttcgtagaagttgaaccgggatcatcctttaagtttctgatacctaagggattttacgcctctccttccgtaaagacgagtctagtattcgagacattaacaacgaccgataataaaatcactagtatcaatccaacaaatgcgccaaagttatatcctcttcaacgcaaagtcgtatctgaagtagtttctaatatgaggaaaatgatcgaatcaaaacgtcctctatacattactcttcacttggcgtgtggatttggtaagactattaccacgtgttatcttatggctacacacggtagaaaaaccgtcatttgcgtacccaataaaatgttaatacatcaatggaagacacaggtagaggcagtcggattggaacataagatatccatagatggagtaagtagtctattaaaggaactaaagactcaaagtccggatgtattaatagtagtcagtagacatctgacaaacgatgccttttgtaaatatatcaataagcattatgatttgttcatcttggatgaatcacatacgtataatctgatgaacaatacagcagttacaagatttttagcgtattatcctccgatgatgtgttattttttaactgctacacctagaccatctaaccgaatttattgtaacagtattattaatattgccaagttatccaatctaaaaaaaactatctatgcagtagatagtttttttgagccatattccacagataatattagacatatggtaaaacgactagatggaccatctaataaatatcatatatataccgagaagttattatctgtagacgagcctagaaatcaacttattcttgataccctggtagaagaattcaagtcaggaactattaatcgcattttagttattactaaactacgtgaacatatggtattattctacaaacgattattagattttttcggaccagaggttgtatttataggagacgcccaaaatagacgtactccagatatggtcaaatcaatcaaggaactaaatagatttatattcgtatccaccttattttattccggtactggtttagatattcctagtttggattcgttgttcatttgctcggcagtaatcaacaatatgcaaatagagcaattactagggagggtatgtcgagaaacagaactattagataggacggtatatgtatttcctaacacatccatcaaagaaataaagtacatgataggaaatttcatgcaacgaattattagtctgtctgtagataaactaggatttaaacaaaaaagttatcggaaacatcaagaatccgatcccacttctgcatgtacaacatcatccagagaagaacgtgtattaaatagaatatttaactcgcaaaatcgttaagaagtttaagcgacgatccgcatgctgcgcaggccagtgtattacccctcatagtattaatataatccaatgatacttttgtgatgtcggaaatcttaaccaatttagactgacaggcagaacacgtcatgcaatcatcatcgtcatcgataactgtagtcttgggcttctttttgcgactcttcattccggaacgcacattggtgctatccatttaggtagtaaaaaataagtcagaatatgccctataacacgatcgtgcaaaacctggtatatcgtctctatctttatcacaatatagtgtatcgacatttttattattattgacctcgtttatcttggaacatggaatgggaacatttttgttatcaacggccatctttgccttaattccagatgttgtaaaattataactaaacagtctatcatcgacacaaatgaaattcttgtttagacgtttgtagtttacgtatgcggctcgttcgcgtctcattttttcagatattgcaggtactataatattaaaaataagaatgaaataacataggattaaaaataaagttatcatgacttctagcgctgatttaactaacttaaaagaattacttagtctgtacaaaagtttgagattttcagattctgcggctatagaaaagtataattctttggtagaatggggaacatctacttactggaaaataggcgtgcaaaaggtagctaatgtcgagacgtcaatatctgattattatgatgaggtaaaaaataaaccgtttaatattgatccgggctattacattttcttaccggtatattttgggagcgtctttatttattcgaagggtaaaaatatggtagaacttggatctggaaactcttttcaaataccagatgatatgcgaagtgcgtgtaacaaagtattagacagcgataacggaatagactttctgagatttgttttgttaaacaatagatggataatggaagatgctatatcaaaatatcagtctccagttaatatatttaaactagctagtgagtacggattaaacatacccaaatatttagaaattgaaatagaggaagacacattatttgacgacgagttatactctattatagaacgctctttcgatgataaatttccaaaaatatccatatcgtatattaagttgggagaacttagacggcaagttgtagactttttcaaattctcattcatgtatattgagtccatcaaggtagatcgtataggagataatatttttattcctagcgttataacaaaatcaggaaaaaagatattagtaaaagatgtagaccatttaatacgatccaaggttagagaacatacatttgtaaaagtaaaaaagaaaaacacattttccattttatacgactatgatggaaacggaacagaaactagaggagaagtaataaaacgaattatagacactataggacgagactattatgttaacggaaagtatttctctaaggttggtagtgcaggcttaaagcaattgactaataaattagatattaatgagtgcgcaactgtcgatgagttagttgatgagattaataaatccggaactgtaaaacgaaaaataaaaaaccaatcagcatttgatttaagcagagaatgtttgggatatccagaagcggattttataacgttagttaataacatgcggttcaaaatagaaaattgtaaggttgtaaatttcaatattgaaaatactaattgtttaaataacccgagtattgaaactatatatggaaactttaaccagttcgtctcaatctttaatgtcgtcaccgatgtcaaaaaaagattattcgagtgaaataatatgcgcctttgatataggtgcaaaaaatcctgccagaactgttttagaagtcaaggataactccgttagggtattggatatatcaaaattagactggagttctgattgggaaaggcgcatagctaaagatttgtcacaatatgaatacactacagttcttctagaacgtcagcctagaaggtcgccgtatgttaaatttatctattttattaaaggctttttatatcatacatcggctgccaaagttatttgcgtctcgcctgtcatgtctggtaattcatatagagatcgaaaaaagagatcggtcgaagcatttcttgattggatggacacattcggattgcgagactccgttccggatagacgcaaattagacgatgtagcggatagtttcaatttggctatgagatacgtattagataaatggaatactaattatacaccttataataggtgtaaatctagaaattacataaaaaaaatgtaataacgttagtaacgccattatggataatctatttacctttctacatgaaatagaagatagatatgccagaactatttttaactttcatctaataagttgcgatgaaataggagatatatatggtcttatgaaagaacgcatttcctcagaggatatgtttgataatatagtgtataataaagatatacatcctgccattaagaaactagtgtattgcgacatccaacttactaaacacattattaatcagaatacgtatccggtatttaacgattcttcacaagtgaaatgttgtcattatttcgacataaactcagataatagcaatattagctctcgtacagtagagatatttgagagggaaaagtcatctcttgtatcatatattaaaactaccaataagaagagaaaggtcaattacggcgaaataaagaaaactgttcatggaggcactaatgcaaattacttttccggtaaaaagtctgacgagtatctgagtactacagttagatccaacattaatcaaccttggatcaaaaccatctctaagaggatgagagttgatatcattaatcactctatagtaacgcgtggaaaaagctctatattacaaactatagaaattatttttactaatagaacatgtgtgaaaatattcaaggattctactatgcacattattctatccaaggacaaggatgaaaaggggtgtatacacatgattgacaaattattctatgtctattataatttatttctgttgttcgaagatatcatccaaaacgagtactttaaagaagtagctaatgttgtaaaccacgtactcacggctacggcattagatgagaaattattcctaattaagaaaatggctgaacacgatgtttatggagttagcaatttcaaaatagggatgtttaacctgacatttattaagtcgttggatcataccgttttcccctctctgttagatgaggatagcaaaataaagttttttaaggggaaaaagctcaatattgtagcattacgatctctggaggattgtataaattacgtgactaaatccgagaatatgatagaaatgatgaaggaaagatcgactattttaaatagcatagatatagaaacggaatcggtagatcgtctaaaagaattgcttctaaaatgaaaaaaaacactaattcagaaatggatcaacgactagggtataagtttttggtgcctgatcctaaagccggagttttttatagaccgttacatttccaatatgtatcgtattctaattttatattgcatcgattgcatgaaatcttgaccgtcaagcggccactcttatcgtttaagaataatacagaacgaattatgatagaaattagcaatgttaaagtgactcctccagattactcacctataatcgcgagtattaaaggtaagagttatgacgcattagccacgttcactgtaaatatctttaaagaggtaatgaccaaagagggtatatccatcactaaaataagtagttatgagggaaaagattctcatttgataaaaattccgctactaataggatacgggaataaaaatccacttgatacagccaagtatcttgttcctaatgtcataggtggagtctttatcaataaacaatctgtcgaaaaagtaggaattaatctagtagaaaagattacaacatggccaaaatttagggttgttaagccaaactcattcactttctcgttttcctccgtatcccctcctaatgtattaccgacaagatatcgccattacaagatatctctggatatatcacaattggaagcgttgaatatatcatcgacaaagacatttataacggtcaatattgttttgctgtctcaatatttatctagagtgagtctagaattcattagacgtagtttatcatacgatatgcctccagaagttgtctatctagtaaacgcgataatagatagtgctaaacgaattactgaatctattactgactttaatattgatacatacattaatgacctggtggaagctgaacacattaaacaaaaatctcagttaacgattaacgagttcaaatatgaaatgctgcataactttttacctcatatgaactatacacccgatcaactaaagggattttatatgatatctttactaagaaagtttctctactgtatcttccacacttctagatatccagatagagattcgatggtttgtcatcgcatcctaacgtacggcaaatattttgagacgttggcacatgatgaattagagaattacataggcaacatccgaaacgatatcatgaacaatcacaagaacagaggcacttacgcggtaaacattcatgtactaacaactcccggacttaatcacgcgttttctagcttattgagtggaaagttcaaaaagtcagacggtagttatcgaacacatcctcactattcatggatgcagaatatttctattcctaggagtgttggattttatccggatcaagtaaagatttcaaagatgttttctgtcagaaaataccatccaagtcaatatctttacttttgttcatcagacgttccggaaagaggtcctcaggtaggtttagtatctcaattgtctgtcttgagttccattacaaatatactaacgtctgagtatttggatttggaaaagaaaatttgtgagtatatcagatcatattataaagatgatataagttactttgaaacaggatttccaatcactatagaaaatgctctagtcgcatctcttaatccaaatatgatatgtgattttgtaactgactttagacgtagaaaacggatgggattcttcggtaacttggaggtaggtattactttagttagggatcacatgaatgaaattcgcattaatattggagcgggaagattagtcagaccattcttggttgtggataacggagagctcatgatggatgtgtgtccggagttagaaagcagattagacgacatgacattctctgacattcagaaagagtttccgcatgtcatcgaaatggtagatatagaacaatttacttttagtaacgtatgtgaatcggttcaaaaatttagaatgatgtcaaaggatgaaagaaagcaatacgatttatgtgactttcctgccgaatttagagatggatatgtagcatcttcactagtgggaatcaatcacaattctggacccagagctattcttggatgtgctcaagctaaacaagctatctcttgtctgagttcggatatacgaaataaaatagacaatggaattcatttgatgtatccagagaggccaatcgtgattagtaaggctttagaaacttcaaagattgcggctaattgcttcggccaacatgttactatagcattaatgtcgtacaaaggtatcaatcaagaggatggaattatcatcaaaaaacaatttattcagagaggcggtctcgatattgttacagccaagaaacatcaagtagaaattccattggaaaactttaataacaaagaaagagataggtctaacgcctattcaaaattagaaagtaatggattagttagactgaatgctttcttggaatccggagacgctatggcacgaaatatctcatcaagaactcttgaagatgattttgctagagataatcagattagcttcgatgtttccgagaaatataccgatatgtacaaatctcgcgttgaacgagtacaagtagaacttactgacaaagttaaggtacgagtattaaccatgaaagaaagaagacccattctaggagacaaatttaccactagaacgagtcaaaagggaacagtcgcgtatgtcgcggatgaaacggaacttccatacgacgaaaatggtatcacaccagatgtcattattaattctacatccatcttctctagaaaaactatatctatgttgatagaagttattttaacagccgcatattctgctaagccgtacaacaataagggagaaaaccgacctgtctgttttcctagtagtaacgaaacatccatcgatacatatatgcaattcgctaaacaatgttatgagcattcaaatccgaaattgtccgatgaagaattatcggataaaatcttttgtgaaaagattctctatgatcctgaaacggataagccttatgcatccaaagtattttttggaccaatttattacttgcgtctgaggcatttaactcaggacaaggcaaccgttagatgtagaggtaaaaagacgaagctcattagacaggcgaatgagggacgaaaacgtggaggaggtatcaagttcggagaaatggagagagactgtttaatagcgcatggtgcagccaatactattacagaagttttgaaagattcggaagaagattatcaagatgtgtatgtttgtgaaaattgtggagacatagcagcacaaatcaagggtattaatacatgtcttagatgttcaaaacttaatctctctcctctcttaacaaaaattgataccacgcacgtatctaaagtatttcttactcaaatgaacgccagaggcgtaaaagtcaaattagatttcgaacgaaggcctccttcgttttataaaccattagataaagttgatctcaagccgtcttttctggtgtaatattctagtttggtagtagatacatatcaatatcatcaaattcgagatccgaattataaaatgggcgtggattgttaactatagaatcggacgtctgatattcgaaaatctgtggagtttcaggttttggtggaggtgtaactgctacttgggatactgaagtctgatattcagaaagctgtggatgttctggttcggcatccaccgatggtgtcacatcactaatcggttcggtaacgtctgtggatggaggtgctacttctacagaacctgtagcctcagttgtcaacggagatacatttttaatgcgagaaaatgtataatttggtaatggtttcttatgtggatctgaagaagaggtaagatatctactagaaagataccgatcacgttctagttctcttttgtagaacttaactttttctttctccgcatctagttgatattccaacctcttcacgttactacgttcagattccaattcacgttcgcatgggttacctccgcagtttttacgagcgatttcacgttcagccttcatgcgtctctccctctctctatcgagtttatcagagcagtctttctgaaggcgatcgaactccataaatttctccaacgctttgattgtttccatagatttccgaagttcagcttttaggactgtgattctttttctttcgaattcacagctggatgtacaaccgtttccattaccgccatctctaagtttcttttctagatcggcaacatttcatccccatgccttttacattcctcgagtctactgtcgtcgaaatatcgttccagctccttttcgacatcaataactttagcacgttgtctctcaagctctcttttgtagttatctgattccctggcacgtttaagatcttcatgcaattgagtcagctcttaacttcctctcttgcttcttcgtcatagtacgcgcaatcactgtgagatccattgttaccacgtctacactcggcgagctcgcgtttaagagattcaatttcccgtttgtattggtccatgtttccattgctaccaccattagatttacaggctgctagttgtcgttcgagatcagaaatacgggttttcttggaattgatttcgtcgatgtacttggcatcgaaacacttattaagttctttttccaattctacgattttatttctttcgcgagtcaattccctcctgtagtaactatctgttttgtcagattcacgctctctacgtagactttcttgcaagttactaatttgttccctagcacgtccgagtttagttttatatgctgaatagagttctgattcatcctttgagcagatctctagcgatcgtttaagattcctaattctagtctttagcctatttacctcctcagaagatgttccgttaccgttgcgtttacactcgttaagctgtctatcaagatccatgattctatctctaagacgttgcatctctctttccatatcagcattgctttcattattacgtctgcagtcactcaactgtctttcaatatctgagattctatctctaagacgtcgcatctctctctgtttcggcattggtttcattattacgtttacagtcgttcaactgtctttcaagatctgatattctagattggagtctgctaatctctgtagcattttcacggcattcactcagttgtctttcaagatctgaaattttagattggagtctgctaatctctgtaagatttcctcctccgctctcgatgcagtcggtcaacttattctctagttctctaatacgcgaacgcagtgcatcaacttcttgcgtgtcttcctggttgcgtgtacattcatcgagtctagattcgagatctctaacgcgtcgtcgttcttcctcaagttctctgcgtactacagaaagcgtgtccttatcttgttgatatttagcaatttctgattctagagtactgattttgcttacgtagttactaatatttgtcttggccttatcaagatcctccttgtatttgtcgcattccttgatatccctacgaagtctggacagttcccattcgacattacgacgtttatcgatttcagctcggagatcgtcatcgcgttgttttagccacatacgactgagttcaagttctcgttgacaagatccatctacttttccattcctaatagtatccagttccttttctagttctgaacgcatttctcgttccctatcaagcgattctctcaattctcggatagtcttcttatcaatttctaataaatctgaaccatcatctgtcccattttgaatatccctgtgttctttgatctcttttgtaagtcggtcgattctttcggttttataaacagaatccctttccaaagtcctaatcttactgagtttatcactaagttctgcattcaattcggtgagttttctcttggcttcttccaactctgttttaaactctccactatttccgcattcttcctcgcatttatctaaccattcaattagtttattaataactagttggtaatcagcgattcctatagccgttcttgtaattgtgggaacataattaggatcttctaatggattgtatggcttgatagcatcatctttatcattattagggggatggacaaccttaattggttggtcctcatctcctccagtagcgtgtggttcttcaataccagtgttagtaataggcttaggcaaatgcttgtcgtacgcgggcacttcctcatccatcaagtatttataatcgggttctacttcagaatattcttttctaagagacgcgacttcgggagttagtagaagaactctgtttctgtatctatcaacgctggaatcaatactcaagttaaggatagcgaatacctcatcgtcatcatccgtatcttctgaaacaccatcatatgacatttcatgaagtctaacgtattgataaatagaatcagatttagtattaaacagatccttaacctttttagtaaacgcatatgtatattttagatctccagatttcataatatgatcacatgccttaaatgtcagtgcttccatgatataatctggaacactaatgggtgacgaaaaagatacagcaccatatgctacgttgataaataaatctgaaccactaagtagataatgattaatgttaagaaagaggaaatattcagtgtataggtatgtcttggcgtcatatcttgtactaaacacgctaaacagtttgttaatgtgatcaatttccaatagattaattagagcagcgggaataccaacaaacatattaccacatccgtattttctatgaatatcacatatcatgttaaaaaatcttgatagaagagcgaatatctcgtctgacttaatgagtcgtagttcagcagcaacataagtcataactgtaaatagaacatactttcctgtagtgttgattctagactccacatcaacaccattattaaaaatagttttatatacatctttaatctgctctccgttaatcgtcgaacgttctagtatacggaaacactttgatttcttatctgtagttaatgacttagtgatatcacgaagaatattacgaattacatttcttgtttttcttgagagacctgattcagaactcaactcatcgttccatagtttttctacctcagtggcgaaatctttggagtgcttggtacatttttcaataaggttcgtgacctccatttattataaaaaatttattcaaaacttaactacaatcgggtaattataaaatcgtagatctcccatgtggcggaatactaccatctatcgcatgtggatggacagtaggtaatggccatgggaacagtaatgtttgcatatttatctttcttgccagtattactgcatattgtcccaatgtttcgatgtgatgttctaacctatcaactgccgctgtatcacaacaatagtgtccgatgaaattaagattatgatccaatgtgtttaatatatgattatcaagtcttatacgatccgcgtcttttttgacaggatcaggttcttctacaggaagaagtttcggcctcttatgatattcatgtctgggaaacggtggtctagggtgaggctccggtatcggagtgggttttggattataatcatcatcgtctatgacatcatcttcgacttcgatatttattttgctatcttgatgatgtcctgtatcagttgcattttcagcactcgactgaatattagcgcattcattgtctattattaccatatttctaaacccaaaatgtatgtgttgaacatcagtactatcgttgatgagtcttatagcatgaattcgcttatcgttatcgggtttatcttctgtcaccttagcaattccttttttattaaactctacataatcatatccatttctattgtttgttctaatataaacgagtatagcatcattgctaaatttttcaatagtatcaaaaacagaatatcctaaaccatataatatatattcaggaacactcaaactaaatgtccaggattctcctaaatacgtaaactttaatagtgcgaaatcattcaaaaatctaccacttatagatagatagtacataaatgcgtatagtagtctacctatctctttattatgaaaaccggcattacgatcatatatgtcgtgatatacctgtgatccgtttacgttaaaccataaatacatgggtgatcctataaacatgaatttatttctaattctcagagctatagttaattgaccgtgtaatatttgcttacatgcatacttgatacgcttattaataagatttttatcattgctcgttatttcagaatcgtatatataaggagtaccatcgtgattcttaccagatattatacaaaatactatatataaaatatattgacccacgttagtaatcatataaatgtttaacgttttaaattttgtattcaatgatccattatcatacgctatcatggtcttgtaatattcattctttaaaatataatattgtgttagccattgcattggagctcctaatggagattttctattctcatccattttaggataggctttcataaagtccctaataacttcgtgaataatgtttctatgttttctactgatgcatgtatttgcttcgatttttttatcccatgtttcatctatcatagatttaaacgcagtaatgctcgcaacattaacatcttgaaccgttggtacaattccgttccataaatttataatgttcgccatttatataactcattttttgaatatacttttaattaacaaaagagttaagttactcatatggacgccgtccagtctgaacatcaatctttttagccagagatatcatagccgctcttagagtttcagcgtgattttccaacctaaatagaacttcatcgttgcgtttacaacacttttctatttgttcaaactttgttgttacattagtaatctttttttccaaattagttagccgttgtttgagagtttcctcattgtcgtcttcatcggctttaacaattgcttcgcgtttagcctctggctttttagcagcctttgtagaaaaaaattcagttgctggaattgcaagatcgtcatctccggggaaaagagttccgtccatttaaagtacagattttagaaactgacactctgcgttatttatatttggtacaacacatggattataaatattgatgttaataacatcagaaaatgtaaagtctatacattgttgcatcgtgttaaattttctaatggatctagtattattgggtccaacttctgcctgaaatccaaatatggaagcggatacaaaaccgtttcctggataaaccacacatctccacttttgctttacatcagaaattgtgtcgttgacatcttgaactctcctatctaatgccggtgttccacctatagattttgaatattcgaatgctgcatgagtagcattaaattccttaatattgccataattttcatatattgagtaaccctggataaaaagtaaacacaccgcagccgtcgctaccacaataaaaaaaattgatagagagttcatttataatctattagaagctgacaaaatttttttacacgcatcagacaatgctttaataaatagttcaacatctacttttgtcatatcgaaccgatggtatgattctaacctagaattacatccgaaaaagttgactatgttcatagtcattaagtcattaacaaacaacattccagactctggattataagacgatactgtttcgtcacaattacctaccttaatcatgtgattatgaatattggctattagagcaccttctaagaaatctataatatctttgaaacacgatttaaaatcaaaccacgaatatacttctacgaagaaagttagtttacccataggagaaataactataaatggagatctaaatacaaaatccggatctatgatagttttaacattattatattctctattaaatacctccacatctaaaaatgttaattttgaaactatgtcttcgtttattaccgtacctgaactaaacgctataagctctattgtttgagaactctttaaacgatattcttgaaatacatgtaacaaagtttcctttaactcggtcggtttatctaccatagttacagaatttgtatccttatctataatataataatcaaaatcgtataaagttatataattatcgcgttcagattgggatcttttcaaatagactaaaaaccccatttctctagtaagtatcttatgtatatgtttgtaaaatatcttcatggtgggaatatgctctaccgcagttagccattcctcattgacagcggtagatgtattagacaaaactattccaatgtttaacaagggccattttacgagattattaaatccttgtttgataaatgtagccaatgagggttcgagttcaacgacgattgaattctcttcccgcggatgctgcatgatgaacgacgggatgttgttcgattgatttggaattctttttcgactttttgtttatattaaatattttaaaatttatagcggatagcaattcatgtaccacggataatgtagacgcgtattgcgcatcgatatctttattattagataaatttatcaataaatgtgagaagtttgcctcgttaaggtcttccatttaaatattatataaacatttgtgtttgtaacttattcgtcttttatggaatagttttttactagtaaagctgcaattacacactttgtccgtaaaacataaatataaacaccagcttttatcaatcgttccaaaaagtcgacggcggacatttttaacatggcatctattttaaatacacttaggtttttggaaaaaacatcattttataattgtaacgattcaataactaaagaaaagattaagattaaacataagggaatgtcatttgtattttataagccaaagcattctaccgttgttaaatacttgtctggaggaggtatatatcatgatgatttggttgtattggggaaggtaacaattaataatctaaagatgatgctattttacatggatttatcatatcatggagtgacaagtagtggagcaatttacaaattgggatcgtctatcgatagactttctctaaataggactattgttacaaaagttaataattatgatgatacattttttgacgacgatgattgatcgctattgcacaattttgtttttgtactttctaatatagtgtttaggttctttttcatatgagaatattgatttactaaaatatctatgtttaacttttgttctatgacgtccttatcggcggtatcggtacatatacgtaattcaccttcacaaaatacggagtcttcgataataatagccaatcgattattggatctagctgtctgtatcatattcaacatgtttaatatatcctttcgtttcccctttacaggcatcgatcgtagcatattttccgcgtctgatatggaaatgttaaaactacaaaaatgcgtaatgttagcccgtcctaatattggtacgtgtctataagtttggcatagtagaataatagacgtgtttaaatgccttccaaagtttaagaattctattagagtattgcattttgatagtttatcgcctacatcatcaaaaataagtaaaaagtgtgctgattttttatgattttgtgcgacagcaatacatttttctatgttacttttagttcgtatcagattatattctagagattcctgactactaacgaaattaatatgatttggccaaatgtatccatcataatctgggttataaacgggtgtaaacaagaatatatgtttatattttttaactagtgtagaaaacagagatagtaaatagatagtttttccagatccagatcctcctgttaaaaccattctaaacggcatttttaataaattttctcttgaaaattgtttttcttggaaacaattcataattatatttacagttactaaattaatttgataataaatcaaaatatggaaaactaaggttgttagtagggaggagaacaaagaaggcacatcgtgatataaataacatttattatcatgatgacaccagaaaacgacgaagagcagacatctgtgttctccgctactgtttacggagacaaaattcagggaaagaataaacgcaaacgcgtgattggtctatgtattagaatatctatggttatttcactactatctatgattaccatgtccgcgtttctcatagtgcgcctaaatcaatgcatgtctgctaacgaggctgctattactgacgccgctgttgccgttgctgctgcatcatctactcatagaaaggttgcgtctagcactacacaatatgatcacaaagaaagctgtaatggtttatattaccagggttcttgttatatattacattcagactaccagttattctcggatgctaaagcaaattgcactgcggaatcatcaacactacccaataaatccgatgtcttgactacctggctcattgattatgttgaggatacatggggatctgatggtaatccaattacaaaaactacatccgattatcaagattctgatgtatcacaagaagttagaaagtatttttgtgttaaaacaatgaactaatatttatttttgtacattaataaatgaaatcgcttaatagacaaactgtaagtaggtttaagaagttgtcggtgccggccgctataatgatgatactctcaaccattattagtggcataggaacatttctgcattacaaagaagaactgatgcctagtgcttgcgccaatggatggatacaatacgataaacattgttatttagatactaacattaaaatgtctacagataatgcggtttatcagtgtcgtaaattacgagctagattgcctagacctgatactagacatctgagagtattgtttagtattttttataaagattattgggtaagtttaaaaaagaccaatgataaatggttagatattaataatgataaagatatagatattagtaaattaacaaattttaaacaactaaacagtacgacggatgctgaagcgtgttatatatacaagtctggaaaactggttaaaacagtatgtaaaagtactcaatctgtactatgtgttaaaaaattctacaagtgacaacaaaaaatgaattaataataagtcgttaacgtacgccgccatggacgccgcgtttgttattactccaatgggtgtgttgactataacagatacattgtatgatgatctcgatatctcaatcatggactttataggaccatacattataggtaacataaaaactgtccaaatagatgtacgggatataaaatattccgacatgcaaaaatgctactttagctataagggtaaaatagttcctcaggattctaatgatttggctagattcaacatttatagcatttgtgccgcatacagatcaaaaaataccatcatcatagcatgcgactatgatatcatgttagatatagaagataaacatcagccattttatctattcccatctattgatgtttttaacgctacaatcatagaagcgtataacctgtatacagctggagattatcatctaatcatcaatccttcagataatctgaaaatgaaattgtcgtttaattcttcattctgcatatcagacggcaatggatggatcataattgatgggaaatgcaatagtaattttttatcataaaagttgtaaagtaaataataaaacaataaatattgaactagtagtacgtatattgagcaatcagaaatgatgctggtacctcttatcacggtgaccgtagttgcgggaacaatattagtatgttatatattatatatttgtaggaaaaagatacgtactgtctataatgacaataaaattatcatgacaaaattaaaaaagataaagagttctaattccagcaaatctagtaaatcaactgatagcgaatcagactgggaggatcactgtagtgctatggaacaaaacaatgacgtagataatatttctaggaatgagatattggacgatgatagcttcgctggtagtttaatatgggataacgaatccaatgttatggcgcctagcacagaacacatttacgatagtgttgctggaagcacgctgctaataaataatgatcgtaatgaacagactatttatcagaacactacagtagtaattaatgaaacggagactgttgaagtacttaatgaagataccaaacagaatcctaactattcatccaatcctttcgtaaattataataaaaccagtatttgtagcaagtcaaatccgtttattacagaacttaacaataaatttagtgagaataatccgtttagacgagcacatagcgatgattatcttaataagcaagaacaagatcatgaacacgatgatatagaatcatcggtcgtatcattggtgtgattagtttcctttttataaaattgaagtaatatttagtattattgctgccgtcacgttgtacaaatggagatattccctgtattcggcatttctaaaattagcaattttattgctaataatgactgtagatattatatagatacagaacatcaaaaaattatatctgatgagatcaatagacagatggatgaaacggtacttcttaccaacatcttaagcgtagaagttgtaaatgacaatgagatgtaccatcttattcctcatagattatcgacgattatactctgtattagttctgtcggaggatgtgttatctctatagataatgacatcaatggcaaaaatattctaacctttcccattgatcatgctgtaatcatatccccactgagtaaatgtgtcgtagttagcaagggtcctacaaccatattggttgttaaagcggatatacctagcaaacgattggtaacatcgtttacaaacgacatactatatgtaaacaatctgtcactgattaattatttgccgttgtctgtattcattattagacgagtcaccgactatttggatagacacatatgcgatcagatatttgctaataataagtggtattcccttataaccatcgacgataagcaatatcctattccatcaaactgtataggtatgtcctctgccaagtacataaattctagcatcgagcaagatactttaatccatgtttgtaacctcgagcatccgttcgactcagtatacaaaaaaatgcagtcgtacaattctctacctatcaaggaacaaatattgtacggtagaattgataatataaatatgagcattagtatttctgtggattaatagatttctagtatggggatcattaatcatctctaatctctaaatacctcataaaacgaaaaaaaagctattatcaaatactgtacggaatggattcattctcttctctttttatgaaactctgttgtatatctactgataaaactggaagcaaaaaatctgatagaaagaataagaataagatcaaggattatatggaacacgattattataaaataacaatagttcctggttcctcttccacgtctactagctcgtggtattatacacatgcctagtaatagtctctttgcgttgacggaaagcagactagaaataacaggctaaaatgttcagacaccataatagttcccaacccagataataacagagttccatcaacacattcctttaaactcaatcccaaacccaaaaccgttaaaatgtatccggccaattgatagtagataatgaggtgtacagcgcatgataatttacacagtaaccaaaatgaaaacactttagtaattataagaaatatagacggtaatgtcatcatcaacaatccgataatatgcctgagagtaaacattgatggataaaacaaaaatgctccgcataactctatcatggcaataacacaaccaaacacttgtaaaattcctaaattagtagaaaatacaacggatatcgatgtataagtgatctcgagaaataataagaataaagtaatgcccgtaaagataaacatcaacattgtttggtaatcattaaaccaattagtatgaagttgaactaatttcacagtagattttattccagtgttatcctcgcatgtataagtacctggtaagatatctttatattccataatcaatgagacatcactatccgataacgaatgaagtctagcactagtatgccatttacttaatattgtcgtcttggaagttttattataagttaaaatatcatggttatccaatttccatctaatatactttgtcggattatctatagtacacggaataatgatggtatcattacatgctgtatactctatagtctttgtagttgttataacaaccaacgtatagaggtatatcaacgatattctaactcttgacattttttatttatttaaaatgatacctttgttatttattttattctattttgctaacggtattgaatggcataagtttgaaacgagtgaagaaataatttctacttacttattagacgacgtattatacacgggtgttaatggggcggtatacacattttcaaataataaactaaacaaaactggtttaactaataataattatataacaacatctataaaagtagaggatgcggataaggatacattagtatgcggaaccaataacggaaatcccaaatgttggaaaatagacggttcagacgacccaaaacatagaggtagaggatacgctccttatcaaaatagcaaagtaacgataatcagtcacaacggatgtgtactatctgacataaacatatcaaaagaaggaattaaacgatggagaagatttgacggaccatgtggttatgatttatacacggcggataacgtaattccaaaagatggtttacgaggagcattcgtcgataaagatggtacttatgacaaagtttacattcttttcactgatactatcggctcaaagagaattgtcaaaattccgtatatagcacaaatgtgcctaaacgacgaaggtggtccatcatcattgtctagtcatagatggtcgacgtttctcaaagtcgaattagaatgtgatatcgacggaagaagttatagacaaattattcattctagaactataaaaacagataatgatacgatactatatgtattcttcgatagtccttattccaagtccgcattatgtacctattctatgaataccattaaacaatctttttctacgtcaaaattggaaggatatacaaagcaattgccgtctccagctcctggtatatgtctaccagctggaaaagttgttccacataccacgtttgaagtcatagaaaaatataatgtactagatgatattataaagcctttatctaaccaacctatcttcgaaggaccgtctggtgttaaatggttcgatataaaggagaaggaaaatgaacatcgggaatatagaatatacttcataaaagaaaattctatatattcgttcgatacaaaatctaaacaaactcgtagctcgcaagtcgatgcgcgactattttcagtaatggtaactgcgaaaccgttatttatagcagatatagggataggagtaggaatgccacaaatgaaaaaaatacttaaaatgtaatcttaatcgagtacaccacacgacaatgaacaaacataagacagattatgctggttatgcttgctgcgtaatatgcggtctaattgttggaattatttttacagcgacactattaaaagttgtagaacgtaaattagttcatacaccatcaatagataaaacgataaaagatgcatatattagagaagattgtcctactgactggataagctataataataaatgtatccatttatctactgatcgaaaaacctgggaggaaggacgtaatgcatgcaaagctctaaattcaaattcggatctaattaagatagagactccaaacgagttaagttttttaagaagccttagacgaggctattgggtaggagaatccgaaatattaaaccagacaaccccatataattttatagctaagaatgccacgaagaatggaactaaaaaacggaaatatatttgtagcacaacgaatactcccaaactgcattcgtgttacactatataacaattacactacatttttatcataccactacttcggttagatgttttagaaaaaaataaatatcgccgtaccgttcttgtttttataaaaataacaattaacaattatcaaattttttctttaatattttacgtggttgaccattcttggtggtaaaataatctcttagtgttggaatggaatgctgtttaatgtttccacactcatcgtatattttgacgtatgtagtcacatcgtttacgcaatagtcagactgtagttctatcatgcttcctacatcagaaggaggaacagttttaaagtctcttggttttaatctattaccgttagttttcatgaaatcctttgttttatccacttcacattttaaataaatgtccactatacattcttttgttaattttactagatcgtcatgggtcatagaatttataggttccgtagtccatggatccaaactagcaaacttcgcgtatacggtatcgcgattagtgtatacaccaactgtatgaaaattaagaaaacagtttaatagatcaacagaaatatttaatcctccgtttgatacagatgcgccatatttatggatttcggattcacacgttgtttgtctgaggtgttcgtctagcgttgcttctacgtaaacttcgattcccatatattctttattgtcagaatcgcataccgatttatcatcatacactgtttgaaaactaaatggtatacacatcaaaataataaatactaacgagtacattctgcaatattgttatcgtaattggaaaattagtgttcgagtgagtcggattatgtgagtactggattttatattttgtaataagaataaaatgctaatgtcaagtcttattaaaaacatatataataaataacaatggctgaatggcataaaattatcgaggatatctcaaaaaataataagttcgaggatgccgccatcgttgattacaagactacaaagaatgttctagctgctattcctaacagaacatttgccaagattaatccgggtgaaattattcctctcatcactaatcgtaatattctaaaacctcttattggtcagaaatattgtattgtatatactaactctctaatggatgagaacacgtatgctatggagttgcttactgggtacgcccctgtatctccgatcgttatagcgagaactcataccgcacttatatttttgatgggtaagccaacaacatccagacgtgacgtgtatagaacgtgtagagatcacgctacccgtgtacgtgcaactggtaattaaaataaaaagtaatattcatatgtagtgtcaattttaaatgatgatgatgaaatggataatatccatattgacgatgtcaataatgccggtattggcatacagttcatcgatttttagatttcattcagaggatgtggaattatgttatgggcatttgtattttgataggatctataatgtagtaaatataaaatataatccgcatattccatatagatataattttattaatcgcacgttaaccgtagatgaactagacgataatgtcttttttacacatggttattttttaaaacacaaatatggttcacttaatcctagtttgattgtctcattatcaggaaacttaaaatataatgatatacaatgctcagtaaatgtatcgtgtctcattaaaaatttggcaacgagtacatctactatattaacatctaaacataagacttattctctacatcggtccacgtgtattactataataggatacgattctattatatggtataaagatataaatgacaagtataatgacatctatgattttactgcaatatgtatgctaatagcgtctacattgatagtgaccatatacgtgtttaaaaaaataaaaatgaactcttaattatgctatgctattagaaatggataaaatcaaaattacggttgattcaaaaattggtaatgttgttaccatatcgtataacttggaaaagataactattgatgtcacacctaaaaagaaaaaagaaaaggatgtattattagcgcaatcagttgctgtcgaagaggcaaaagatgtcaaggtagaagaaaaaaatattatcgatattgaagatgacgatgatatggatgtagaaagcgcgtaatacgatctataaaaataagtatataaatactttttatttactgtactcttactgtgtagtggtgataccctactcgattatttttttaaaaaaaaaatacttattctgattcttctagccatttccgtgttcgtttgaatgccacatcgacgtcaaagataggggagtagttgaaatctagttctgcattgttggtacgcacctcaaatgtagtgttggatatcttcaacgtatagttgttgagtagtgatggttttctaaatagaattctcttcatatcattcttgcacgcgtacatttttagcatccatcttggaatcctagatccttgttctattcccaatggtttcatcaatagaagattaaacatatcgtacgaacacgatggagagtaatcgtagcaaaagtaagcatttcctttaatcttagatcccggatactggatatattttgcagccaacacgtgcatccatgcagcatttcctacatatacccggctatgcaccgcgtcatcatcgactgtacgatacataatgttaccgtgttgcttacattgctcgtaaaagactttcatcaatttgtctccttctccgtaaattccagtgggtcttaggcaacaagtatacaattttgctccattcatgattacggaattattggctttcataaccagttgctcggccatacgtttactttttgcgtatacatgtcctggtgatatatcataaagggtatgctcatggccgatgaatggatcaccgtgtttattgggtcctattgcttccatgctactagtatagatcaaatacttgattcctaggtccacacaagctgccaaaatagtctgtgttccataatagtttactttcatgatttcattatcggtgtattttccaaatacatccactagagcagccgtatgaataatcagatttaccccatctagcgcttctctcaccttatcaaagtcgtttatatcacattgtatatagtttataaccttaactttcgaggttattggttgtggatcttctacaatatctatgactctgatttcttgaacatcatctgcactaattaacagttttactatatacctgcctagaaatccggcaccaccagtaaccgcgtacacggccattgctgccactcataatatcagactacttattctattttactaaataatggctgtttgtataatagaccacgataatatcagaggagttatttactttgaaccagtccatggaaaagataaagttttaggatcagttattggattaaaatccggaacgtatagtttgataattcatcgttacggagatattagtcaaggatgtgattccataggcagtccagaaatatttatcggtaacatctttgtaaacagatatggtgtagcatatgtttatttagatacagatgtaaatatatttacaattattggaaaggcgttatctatttcaaaaaatgatcagagattagcgtgtggagttattggtatttcttacataaatgaaaagataatacattttcttacaattaacgagaatggcgtttgatatatcagttaatgcgtctaaaacaataaatgcattagtttacttttctactcagcaaaataaattagtcatacgtaatgaagttaatgatacacactacactgtcgaatttgatagggacaaagtagttgacacgtttatttcatataatagacataatgacaccatagagataagaggggtgcttccagaggaaactaatattggttgcgcggttagtatgacttacttgtataataagtatagttttaaactgattttagcagaatatataagacacagaaatactatatccggcaatatttattcggcattgatgacactagatgatttggctattaaacagtatggagacattgatctattatttaatgagaaacttaaagtagactccgattcgggactatttgactttgtcaactttgtaaaggatatgatatgttgtgattctagaatagtagtagctctatctagtctagtatctaaacattgggaattgacaaataaaaaatataggtgtatggcattagccgaacatatatctgatagtattccaatatctgagctatctagactacgatacaatctatgtaagtatctacgcggacacactgagagcatagaggataaatttgattattttgaagacgatgattcgtctacatgttctgccgtaaccgacagggaaacggatgtataattttttttatagcgtgaaggatatgataaaaaatataattgttgtatttatcccattccaatcaccttatatgattctgtaacacaataaaggagtcttatagatgtatagaggtcagatactggtttgataaactgtttattccacataagtatgtttgactttatggttagacccgcatactttaacaaatcactgaaaattggagttaggtattgacctctcagaatcagttgccgttctggaacattaaatgtattttttatgatatactccaacgcatttatgtgggcatacaacaagtcattactaatggagtattccaagagttttagttgtctagtatttaacaagagaagagatttcaacagactgtttatgaactcgaatgccgcctcattgtcgcttatattgatgatgtcgaattctcccaatatcatcaccgatgagtagctcatcttgttatcgggatccaagttttctaaagatgtcattaaaccctcgatcatgaatggatttatcatcatcgtttttatgttggacatgagcttagtccgtttgtccacatctatagacgacgatttctgaattatttcatatatctctctctttaactccaggaacttgtcaggatggtctactttaatatgttctcgtctaagagatgaaaatctttggatggttgcacgcgacttttctctaaaggatgacgttgcccaagatcctctcttaaatgaatccatcttatccttggacaagatggacagtctattttccttagatggtttaatatttttgttacccatgatctataaaggtagacctaatcgtctcggatgaccatatatttattttcagttttattatacgcataaattgtaaaaaatatgttaggtttacaaaaatgtctcgtggggcattaatcgtttttgaaggattggacaaatctggaaaaacaacacaatgtatgaacatcatggaatctataccggcaaacacgataaaatatcttaactttcctcagagatccactgtcactggaaaaatgatagatgactatctaactcgtaaaaaaacctataatgatcatatagttaatctattattttgtgcaaatagatgggagtttgcatcttttatacaagaacaactagaacagggaattactttaatagttgatagatacgcattttctggagtagcgtatgccgccgctaaaggcgcgtcaatgactctcagtaagagttatgaatctggattgcctaaacccgacttagttatattcttggaatctggtagcaaagaaattaatagaaacgtcggtgaggaaatttatgaagatgttacattccaacaaaaggtattacaagaatataaaaaaatgattgaagaaggagatattcattggcaaattatttcttctgaattcgaggaagatgtaaagaaggagttgattaagaatatagttatagaggctatacacacggttactggaccagtggggcaactgtggatgtaatagtgaaattacattttttataaatagatgttagtacagtgttataaatggatgaagcatattactctggcaacttggaatcagtactcggatacgtgtccgatatgcataccgaactcgtatcaatatctcaattagttattgccaagatagaaactatagataatgatatattaaacaaggacattgtaaattttatcatgtgtagatcaaacttggataatccatttatctctttcctagatactgtatatactattatagatcaagagaactatcagactgagttgattaattcattagacgacaatgaaattatcgattgtatagttaataagtttatgagcttttataaggataacctagaaaatatagtagatgctatcatcactctaaaatatataatgaataatccagattttaaaactacgtatgcagaagtactcggttccagaatagcggatatagatattaaacaagtgatacgtgagaatatactacaattgtctaataatatccgcgaacgatatttgtgaaaaatattaaaaaaaaatactttttttattaaatgacgtcgcttcgcgaatttagaaaattatgctgtgatatatatcacgcatcaggatataaagaaaaatctaaattaattagagactttataacagatagggatgataaatatttgatcattaagctattgcttcccggattagacgatagaatttataacatgaacgataaacaaattataaaattatatagtataatatttaaacaatctcaggaagatatgctacaagatttaggatacggatatataggagacactattaggactttcttcaaagagaacacagaaatccgtccacgagataaaagcattttaactttagaagaagtggatagtttcttaactacgttatcatccgtaactaaagaatcgcatcaaataaaattattgactgatatcgcatccgtttgtacatgtaatgatttaaaatgtgtagtcatgcttattgataaagatctaaaaattaaagcgggtcctcggtacgtacttaacgctattagtcctcatgcctatgatgtgtttagaaaatctaataacttgaaagagataatagaaaattcatctaaacaaaatctagactctatatctatttctgttatgactccaattaatcccatgttagcggaatcgtgtgattctgtcaataaggcgtttaaaaaatttccatcaggaatgtttgcggaagtcaaatacgatggtgaaagagtacaagttcataaaaataataacgagtttgccttctttagtagaaacatgaaaccagtactctctcataaagtggattatctcaaagaatacataccgaaagcatttaaaaaagctacgtctatcgtattggattctgaaattgttcttgtagacgaacataatgtaccgctcccgtttggaagtttaggaatacacaaaaagaaagaatataaaaactctaacatgtgtttgttcgtgtttgactgtttgtactttgatggattcgatatgacggacattccattgtacgaacgaagatcttttctcaaagatgttatggttgaaatacccaatagaatagtattctcagagttgacgaatattagtaacgagtctcagttaactgacgtattggatgatgcactaacgagaaaattagaaggattggtcttaaaagatattaatggagtatacgaaccgggaaagagaagatggttaaaaataaagcgagactatttgaacgagggttccatggcagattctgccgatttagtagtactaggtgcctactatggtaaaggagcaaagggtggtatcatggcagtctttctaatgggttgttacgacgatgaatccggtaaatggaagacggttaccaagtgttcaggacacgatgataatacgttaagggagttgcaagaccaattaaagatgattaaaattaacaaggatcccaaaaaaattccagagtggttagtagttaataaaatctatattcccgattttgtagtagaggatccgaaacaatctcagatatgggaaatttcaggagcagagtttacatcttccaagtcccataccgcaaatggaatatccattagatttcctagatttactaggataagagaggataaaacgtggaaagaatctactcatctaaacgatttagtaaacttgactaaatcttaatagttacatacaaactgaaaattaaaataacactatttagttggtggtcgccatggatggtgttattgtatactgtctaaacgcgctagtaaaacatggcgaggaaataaatcatataaaaaatgatttcatgattaaaccatgttgtgaaagagtttgtgaaaaagtcaagaacgttcacatcggcggacaatctaaaaacaatacagtgattgcagatttgccatatctggataatgctgtatcggatgtatgcaattcactgtataaaaagaatgtatcaagaatatccagatttgctaatttgataaagatagatgacgatgacaagactcctactggtgtatataattattttaaacctaaagatgccattcctgttattatatctataggaaaggatagagatgtctgtgaactattaatctcatcagacatatcgtgtgcatgcgtggagttaaattcatatcacgtagccattcttcccatggatgtttccttttttaccaaaggaaatgcatcattgattattctcctgtttgatttctctatcgatgcggcacctctcttaagaagtgtaaccgataataatgttattatatctagacaccagcgtctacatgacgagcttccgagttccaattggttcaagttttacataagtataaagtccgactattgttctatattatatatggttgttgatggatctgtgatgcatgcgatagctgataatagaactcacgcaattattagcaaaaatatattagacaatactacgattaacgatgagtgtagatgctgttattttgaaccacagattaggattcttgatagagatgagatgctcaatggatcatcgtgtgatatgaacagacattgtattatgatgaatttacctgatgtaggcgaatttggatctagtatgttggggaaatatgaacctgacatgattaagattgctctttcggtggctggtaatttaataagaaatcgagactacattcccgggagacgaggatatagctactacgtttacggtatagcctctagataatttttttaagcacgaaataaaaaacataattttaaaccaatctatttcatactattttgtgtgatcaccatggacataaagatagatattagtatttctggtgataaatttacggtgactactaggagggaaaatgaagaaagaaaaaaatatctacctctccaaaaagaaaaaactactgatgttatcaaacctgattatcttgagtacgatgacttgttagatagagatgagatgtctactattctagaggaatattttatgtacagaggtctattaggcctcagaataaaatatggacgactctttaacgaaattaaaaaattcgacaatgatgcggaagaacaattcggtactatagaagaactcaagcagaaacttagattaaattctgaagagggagcagataactttatagattatataaaggtacaaaaacaggatatcgtcaaacttactgtatacgattgcatatctatgataggattgtgtgcatgcgtggtagatgtttggagaaatgagaaactgttttctagatggaaatattgtttacgagcgattaaactgtttattaatgatcacatgcttgataagataaaatctatactgcagaatagactagtatatgtggaaatgtcatagaaagttaaaagttaatgagagcaaaaatatataaggttgtattccatatttgttattttttctgtaatagttaaaaaatacattcgatggtctatctatcagattattatgtgttataaggtactttttctcataataaactagagtatgagtaagatagtgtttttcaaaacatataaatctaaaattgatggatgagatatacagctattaatttcgaaaatatattttaatctgataactttaaacatggatttttgatggtggtttaacgttttaaaaaaagattttgttattgtagtatatgataatattaaaagatggatataaagaatttgctgactgcatgtactattttttacattactacattggctacggcagatatacctacttcgtcactgccacacgctccggtaaacggggcatgtgacgagggagaatatcttgataagaggcataatcaatgttgtaatcagtgtccacctggagaatttgccaaggtcagatgtaatggtaacgataacacaaaatgtgaacgctgcccacctcatacatataccgcaatccccaattactctaatggatgtcatcaatgtagaaaatgcccaacaggatcatttgataaggtaaagtgtaccggaacacagaacagtaaatgttcgtgtcttcctggttggtattgcgctactgattcttcacagactgaagattgtcgagattgtataccaaaaaggagatgtccatgcggatactttggtggaatagatgaacaaggaaatcctatttgtaaatcgtgttgtgttggtgaatattgcgactacctacgtaattatagacttgatccatttcctccatgcaaactatctaaatgtaattaattatgattttgatgataatgttaccatacattatatcgctacttggttagtgtattattcagtatgaagacctattaataattacttatcttttgacgatcttgttataattataatataaaaacttatggcatagtaacttataattgctgacgcgataaattcgtaataatctgttttgttcaaaggaatctacaggcataaaaataaaaatataatttataatatactcttacagcgcgccatcatgaataacagcagtaaattaattgctgttattaatggatttagaaatagtggacgattttgtgatattaatatagttattaatgatgaaaggataaacgctcacagactcatcctatctggagcctccgaatatttttccattctgttttccaataattttatcgattctaatgaatacgaagttaatctaagtcatttagattatcaaagcgtaaacgatttgatcgattacatttatgggatacctttgagcctaactaacgataacgtgaaatatattctttcaaccgctgattttttacaaattggatctgctattacggagtgtgaaaattacatacttaaaaatctttgttctagaaactgtatcgatttctacatatacgctgataaatataataacaagaaaatagaatcagcgtcgtttaacacaatattacaaaatattttgagactcatcaacgatgaaaactttaaatacttaacagaggaatcaatgataaaaattttaagcgatgatatgttaaatataaaaaatgaggatttcgccccactaattctcattaaatggttagagagtactcaacaaccatgcaccgtcgagttacttaaatgcctcagaatatcattgctttccccacaagttataaaatcactttatagtcatcgactggttagttcaatctacgaatgtataacattcttaaacaatatagcattcttggatgaatcatttcctagataccatagcatcgagttgatatctatcggtataagtaattcgcatgataagatttccataaactgctacaatcataaaaaaaatacatgggaaatgatatcttcacgtagatataggtgtagtttcgcagtggccgtcctggataatattatttatatgatgggtggatatgatcagtccccgtatagaagttcaaaggttatagcgtacaatacatgtacaaattcttggatatatgatataccagagctaaaatatcctcgttctaattgtgggggactggctgatgacgaatacatttattgtataggcggcatacgcgatcaggattcatcgttgacatctagtattgatagatggaagccatcaaaaccatattggcagaagtatgctaaaatgcgcgaaccaaaatgtgatatgggggttgcgatgttaaacggattaatatatgttataggtggaatcgttaaaggtgacacgtgtaccgacgcactagagagtttatcagaagatggatggatgaagcatcaacgtcttccaataaaaatgtccaatatgtcgacgattgttcatgatggcaagatttatatatctggaggttacaacaatagtagtgtagttaatgtaatatcgaatttagtccttagctataattcgatatatgatgaatggaccaaattatcatcattaaacattcctagaattaatcccgctctatggtcagcgcataataaattatatgtaggaggaggaatatctgatgatgttcgaactaatacatctgaaacatacgacaaagaaaaagattgttggacattggataatggtcacgtgttaccacgcaattatataatgtataaatgcgaaccgattaaacataaatatccattggaaaaaacacagtacacgaatgattttctaaagtatttggaaagttttataggtagttgatagaacaaaatacataattttgtaaaaataaatcactttttatactaatatgacacgattaccaatacttttgttactaatatcattagtatacgctacaccttttcctcagacatctaaaaaaataggtgatgatgcaactctatcatgtaatcgaaataatacaaatgactacgttgttatgagtgcttggtataaggagcccaattccattattcttttagctgctaaaagcgacgtcttgtattttgataattataccaaggataaaatatcttacgactctccatacgatgatctagttacaactatcacaattaaatcattgactgctagagatgccggtacttatgtatgtgcattctttatgacatcgcctacaaatgacactgataaagtagattatgaagaatactccacagagttgattgtaaatacagatagtgaatcgactatagacataatactatctggatctacacattcaccggaaactagttctgagaaacctgattatatagataattctaattgctcgtcggtattcgaaatcgcgactccggaaccaattactgataatgtagaagatcatacagacaccgtcacatacactagtgatagcattaatacagtaagtgcatcatctggagaatccacaacagacgagactccggaaccaattactgataaagaagatcatacagtcacagacactgtctcatacactacagtaagtacatcatctggaattgtcactactaaatcaaccaccgatgatacgtacaatgataatgatacagtaccaccaactactgtaggcggtagtacaacctctattagcaattataaaaccaaggactttgtagaaatatttggtattaccgcattaattatattgtcggccgtggcaatattctgtattacgtattatatatgtaataaacgttcacgtaaatacaaaacagagaacaaagtctagatttttgacttacataaatgtctgggatagtaaaatctatcatattgagcgggccatctggtttaggaaagacagccatagccaaaagactatgggaatatatttggatttgtggtgtcccataccactagatttcctcgtcctatggaacgagaaggtgtcgattaccattacgttaacagagaggccatctggaagggaatagccgccggaaactttctagaacatactgagtttttaggaaatatttacggaacttctaaaactgctgtgaatacagcggctattaataatcgtatttgtgtgatggatctaaacatcgatggcgttagaagtcttaaaaatacgtacctaatgccttactcggtgtatataagacctacctctcttaaaatggttgagaccaagcttcgttgtagaaacactgaagcggatgatgagattcatcgtcgtgtgatgttggcaaaaactgacatggatgaggcaggtgaagccggtctattcgacactattatcattgaagatgatgtgaatttagcatatagtaagttaattcagatactacaggaccgtattagaatgtattttaacactaattagagacttaagacttaaaacttgataattaataatataactcgtttttatatgtggctatttcaacgtctaatgtattagttaaatattaaaacttaccacgtaaaacttaaaatttaaaatgatatttcattgacagatagatcacacattatgaactttcaaggacttgtgttaactgacaattgcaaaaatcaatgggtcgttggaccattaataggaaaaggtggattcggtagtatttatactactaatgacaataattatgtagtaaaaatagagcccaaagctaacggatcattatttaccgaacaggcattttatactagagtacttaaaccatccgttatcgaagaatggaaaaaatctcacaatataaagcacgtaggtcttatcacgtgcaaggcatttggtctatacaaatccattaatgtggaatatcgattcttggtaattaatagattaggtgcagatctagatgcggtgatcagagccaataataatagattaccaaaaaggtcggtgatgttgatcggaatcgaaatcttaaataccatacaatttatgcacgagcaaggatattctcacggagatattaaagcgagtaatatagtcttggatcaaatagataagaataaattatatctagtggattacggattggtttctaaattcatgtctaatggcgaacatgttccatttataagaaatccaaataaaatggataacggtactctagaatttacacctatagattcgcataaaggatacgttgtatctagacgtggagatctagaaacacttggatattgtatgattagatggttgggaggtatcttgccatggactaagatatctgaaacaaagaattgtgcattagtaagtgccacaaaacagaaatatgttaacaatactgcgactttgttaatgaccagtttgcaatatgcacctagagaattgctgcaatatattaccatggtaaactctttgacatattttgaggaacccaattacgacaagtttcggcacatattaatgcagggtgtatattattaagtgtggtgtttggtcgataaaaattaaaaaataacttaatttattattgatctcgtgtgtacaaccgaaatcatggcgatgttttacgcacacgctctcggtgggtacgacgagaatcttcatgcctttcctggaatatcatcgactgttgccaatgatgtcaggaaatattctgttgtgtcagtttataataacaagtatgacattgtaaaagacaaatatatgtggtgttacagtcaggtgaacaagagatatattggagcactgctgcctatgtttgagtgcaatgaatatctacaaattggaaatccgatccatgatcaagaaggaaatcaaatctctatcatcacatatcgccacaaaaactactatgctctaagcggaatcgggtacgagagtctagacttgtgtttggaaggagtagggattcatcatcacgtacttgaaacaggaaacgctgtatatggaaaagttcaacatgattattctactatcaaagagaaggccaaagaaatgagtgcacttagtccaggacctatcatcgattaccacgtctggataggagattgtatctgtcaagttactgctgtggacgtacatggaaaggaaattatgaaaatgagattcaaaaagggtgcggtgcttccgatcccaaatctggtaaaagttaaacttggggagaatgatacagaaaatctttcttctactatatcggcgacaccatcgaggtaaccacctctctggaagacagcgtgaataatgtactcatgaaacgtttggaaactatacgccatatgtggtctgttgtatatgatcattttgatattgtgaatggtaaagaatgctgttatgtgcatacgcatttgtctaatcaaaatcttataccgagtactgtaaaaacaaatttgtacatgaagactatgggatcatgcattcaaatggattccatggaagctctagagtatcttagcgaactgaaggaatcaggtggatggagtcccagaccagaaatgcaggaatttgaatatccagatggagtggaagacactgaatcaattgagagattggtagaggagttcttcaatagatcagaacttcaggctggtgaatcagtcaaatttggtaattctattaatgttaaacatacatctgtttcagctaagcaactaagaacacgtatacggcagcagcttccttctatactctcatcttttaccaacacaaagggtggatatttgttcattggagttgataataatacacacaaagtatttggattcacggtgggttacgactacctcagactgatagagaatgatatagaaaagcatatcaaaagactttgtgttgtgtatttctgtgagaagaaagaggacatcaagtacgcgtgtcgattcatcaaggtatataaacctggggatgaggctacctcgacatacgtgtgcgctatcaaagtggaaagatgctgttgtgctgtgtttgcagattggccagaatcatggtatatggatactaatggtatcaagaagtattctccagatgaatgggtgtcacatataaaattttaattaatgtaactatagagaacaaataataaggttgtaatatcatatagacaataactaacaattaattagtaactgttatctcttttttaattaaccaactaactatatacctattaatacatcgtaattatagttcttaacatctattaatcattaattcgcttctttaattttttataaactaacattgttaattgaaaagggataacatgttacagaatataaattatatatggatttttttaaaaaggaaatacttgactggagtatatatttatctcttcattatatagcacgcgtgttttccaatttttccacatcccatataatacaggattataatctcgttcgaacatacgagaaagtggataaaacaatagttgattttttatctaggttgccaaatttattccatattttagaatatggggaaaatattctacatatttattctatggatgatgctaatacgaatattataattttttttctagatagagtattaaatattaataagaacgggtcatttatacacaatctcgggttatcatcatccattaatataaaagaatatgtatatcaattagttaataatgatcatccagataataggataagactaatgcttgaaaatggacgtagaacaagacattttttgtcctatatatcagatacagttaatatctatatatgtattttaataaatcatggattttatatagatgccgaagacagttacggttgtacattattacatagatgtatatatcactataagaaatcagaatcagaatcatacaatgaattaattaagatattgttaaataatggatcagatgtagataaaaaagatacgtacggaaacacaccttttatcctattatgtaaacacgatatcaacaacgtggaattgtttgagatatgtttagagaatgctaatatagactctgtagactttaatagatatacacctcttcattatgtctcatgtcgtaataaatatgattttgtaaagttattaatttctaaaggagcaaatgttaatgcgcgtaataaattcggaactactccattttattgtggaattatacacggtatctcgcttataaaactatatttggaatcagacacagagttagaaatagataatgaacatatagttcgtcatttaataatttttgatgctgttgaatctttagattatctattatccagaggagttattgatattaactatcgtactatatacaacgaaacatctatttacgacgctgtcagttataatgcgtataatacgttggtctatctattaaacaaaaatggtgattttgagacgattactactagtggatgtacatgtatttcggaagcagtcgcaaacaacaacaaaataataatggaagtactattgtctaaacgaccatctttgaaaattatgatacagtctatgatagcaattactaaacataaacagcataatgcagatttattgaaaatgtgtataaaatatactgcgtgtatgaccgattatgatactcttatagatgtacagtcgctacagcaatataaatggtatattttaagatgtttcgatgaaatagatatcatgaagagatgttatataaaaaataaaactgtattccaattagttttttgtatcaaagacattaatactttaatgagatacggtaaacatccttctttcgtgaaatgcactagtctcgacgtatacggaagtcgtgtacgtaatatcatagcatctattagatatcgtcagagattaattagtctattatccaagaagctggatcctggagataaatggtcgtgttttcctaacgaaataaaatataaaatattggaaaactttaacgataacgaactatccacatatctaaaaatcttataaacattattaaaatataaaatctaagtaggataaaatcacactacatcattgtttccttttagtgctcgacagtgtatactatttttaacgctcataaataaaaatgaaaacgatttccgttgttacgttgttatgcgtactacctgctgttgtttattcaacatgtactgtacccactatgaataacgctaaattaacgtctaccgaaacatcgtttaatgataaccagaaagttacgtttacatgtgatcagggatatcattctttggatccaaatgctgtctgtgaaacagataaatggaaatacgaaaatccatgcaaaaaaatgtgcacagtttctgattatgtctctgaactatataataaaccgctatacgaagtgaattccaccatgacactaagttgcaacggcgaaacaaaatattttcgttgcgaagaaaaaaatggaaatacttcttggaatgatactgttacgtgtcctaatgcggaatgtcaacctcttcaattagaacacggatcgtgtcaaccagttaaagaaaaatactcatttggggaatatataactatcaactgtgatgttggatatgaggttattggtgcttcgtacataagttgtacagctaattcttggaatgttattccatcatgtcaacaaaaatgtgatatgccgtctctatctaatggattaatttccggatctacattttctatcggtggcgttatacatcttagttgtaaaagtggttttacactaacggggtctccatcatccacatgtatcgacggtaaatggaatcccgtactcccaacatgtgtacgatctaacgaaaaatttgatccagtggatgatggtcccgacgatgagacagatttgagcaaactctcgaaagacgttgtacaatatgaacaagaaatagaatcgttagaagcaacttatcatataatcatagtggcgttaacaattatgggcgtcatatttttgatctccgttatagtattagtttgttcctgtgacaaaaataatgaccaatataagttccataaattgctaccgtaaatataaatccgttaaaataattaataacgaacaagtatcaaaagattaaagacttatagctagaatcaattgagatgtcttcttcagtggatgttgatatctacgatgccgttagagcatttttactcaggcactattatgacaagagatttattgtgtatggaagaagtaacgccatattacataatatatacaggctatttacaagatgcgccgttataccgttcgatgatatagtacgtactatgccaaatgaatcacgtgttaaacaatgggtgatggatacacttaatggtataatgatgaatgaacgcgatattactgtatgtgtgggcaccggactacgattcatggaaatgtttttcgattacaataaaaatagtatcaacaatcaactaatgtatgatataattctagctaatgagagatatagaagcgcttttaacgacgatggtatatacatccgtagaaatatgattaacaagttgtacggatacgcatctctaactactattggcacgatcgctggaggtgtttgttattatctgttgatgcatctagttagtttgtataaataattatttcaatatactagttaaaattttaagattttaaatgtataaaaaactaataacgtttttatttgtaataggtgcattagcatcctattcgaataatgagtacactccgtttaataaactgagtgtaaaactctatatagatggagtagataatatagaaaattcatatactgatgataataatgaattggtgttaaattttaaagagtacacaatttctattattacagagtcatgcgacgtcggatttgattccatagatataaatgttataaacgactataaaattattgatatgtataccattgactcgtctactattcaacgcagaggtcacacgtgtagaatatctaccaaattatcatgccattatgataagtacccttatattcacaaatatgatggtgatgagcgacaatattctattactgcagagggaaaatgctataaaggaataaaatatgaaataagtatgatcaacgatgatactctattgagaaaacatactcttaaaattggatctacttatatatttgatcgtcatggacatagtaatacatattattcaaaatatgatttttaaaaatttaaaatatattatcacttcagtgacagtagtcaaataacaaacaacaccatgagatatattataattctcgcagttttgttcattaatagtatacatgctaaaataactagttataagtttgaatccgtcaattttgattccaaaattgaatggactggggatggtctatacaatatatcccttaaaaattatggcatcaagacgtggcaaacaatgtatacaaatgtaccagaaggaacatacgacatatccgcatttccaaagaatgatttcgtatctttctgggttaaatttgaacaaggcgattataaagtggaagagtattgtacgggactatgcgtcgaagtaaaaattggaccaccgactgtaacattgactgaatacgacgaccatatcaatttgtacatcgagcatccgtatgctactagaggtagcaaaaagattcctatttacaaacgcggtgacatgtgtgatatctacttgttgtatacggctaacttcacattcggagattctaaagaaccagtaccatatgatatcgatgactacgattgcacgtctacaggttgcagcatagactttgtcacaacagaaaaagtgtgcgtgacagcacagggagccacagaaaggtttctcgaaaaaattactccatggagttcgaaagtatgtctgacacctaaaaagagtgtatatacatgcgcaattagatccaaagaagatgttcccaatttcaaggacaaaatggccagagttatcaagagaaaatttaatacacagtctcaatcttatttaactaaatttctcggtagcacatcaaatgatgttaccacttttcttagcatgcttaacttgactaaatattcataactaatttttattaatgatacaaaaacgaaataaaactgcatattatacactggttaacgcccttataggctctaaccattttcaagatgaggtccctgattatagtccttctgttcccctctatcatctactccatgtctattagacaatgtgagaagactgaagaggaaacatggggattgaaaatagggttgtgtataattgccaaagatttctatcccgaaagaactgattgcagtgttcatctcccaactgcaagtgaaggattgataactgaaggcaatggattcagggatatacgaaacaccgataaattataaaaaaagcaatgtgtccgctgtttccgttaataatactattttcgtaactggcggattattcataaataactctaatagcacgatcgtggttaacaatatggaaaaacttgacatttataaagacaaacaatggtcgattatagaaatgcctatggctagggtatatcacggcatcgactcgacatttggaatgttatattttgccggaggtctatccgttaccgaacaatatggtaatttagagaaaaacaacgagatatcttgttacaatcctagaacgaataagtggtttgatatttcatatactatttataagatatccatatcatcattgtgtaaactaaataacgtcttctatgtatttagtaaggacattggatatgtggaaaagtatgatggtgcatggaagttagtacatgatcgtctccccgctataaaggcattatcaacttctccttattgattgaaaatgaaaatataaatagtttttatgtatagcagtattaccctatagttttattgcttactactaacatggatacagatgttacaaatgtagaagatatcataaatgaaatagatagagagaaagaagaaatactaaaaaatgtagaaattgaaaataataaaaacattaacaagaatcatcccaatgaatatattagagaagcactcgttattaataccagtagtaatagtgattccattgataaagaagttatagaatgtatcagtcacgatgtaggaatatagatcatatctactaatttttataatcgatacaaaacataaaaaacaactcgttattacatagcaggcatggaatccttcaagtattgttttgataacgatggcaagaaatggattatcggaaatactttatattctggtaattcaatactctataaggtcagaaaaaatttcactagttcgttctacaattacgtaatgaagatagatcacaaatcacacaagccattgttgtctgaaatacgattctatatatctgtattggatcctttgactatcgacaactggacacgggaacgtggtataaagtatttggctattccagatctgtatggaattggagaaaccgatgattatatgttcttcgttataaagaattcgggaagagtattcgccccaaaggatactgaatcagtcttcgaagcatgcgtcactatgataaacacgttagagtttatacactctcgaggatttacccatggaaaaatagaaccgaggaatatactgattagaaataaacgtctttcactaattgactattctagaactaacaaactatacaagagtggaaactcacatatagattacaacgaggacatgataacttcaggaaatatcaattatatgtgtgtagacaatcatcttggagcaacagtttcaagacgaggagatttagaaatgttgggatattgcatgatagaatggttcggtggcaaacttccatggaaaaacgaaagtagtataaaagtaataaaacaaaaaaaagaatataaaaaatttatagctactttctttgaggactgttttcctgaaggaaatgaacctctggaattagttagatatatagaattagtatacacgttagattattctcaaactcctaattatgacagactacgtagactgtttatacaagattgaaattatattcttttttttatagagtgtggtagtgttacggatatctaatattaatattagactatctctatcgcgctacacgaccaatatcgattactatggatatcttctatgaaaggagagaatgtattcatttctccagcgtcaatctcgtcagtattgacaatactgtattatggagctaatggatccactgctgaacagctatcaaaatatgtagaaacggaggagaacacggataaggttagcgctcagaatatctcattcaaatccatgaataaagtatatgggcgatattctgccgtgtttaaagattcctttttgagaaaaattggcgataagtttcaaactgttgacttcactgattgtcgcactatagatgcaatcaacaagtgtgtagatatctttactgaggggaaaatcaatccactattggatgaaccattgtctcctagcaattagtgccgtatactttaaagcaaaatggttgacgccattcgaaaaggaatttaccagtgattatcccttttacgtatctccgacggaaatggtagacgtaagtatgatgtctatgtacggcgagctatttaatcacgcatctgtaaaagaatcattcggcaacttttcaatcatagaactgccatatgttggagatactagtatgatggtcattcttccagacaagattgatggattagaatccatagaacaaaatctaacagatacaaattttaagaaatggtgtgactttatggatgctatgtttatagatgttcacattcccaagtttaaggtaacaggttcgtataatctggtggatactctagtaaagtcaggactgacagaggtgttcggttcaactggagattatagcaatatgtgtaatttagatgtgagtgtcgacgctatgatccacaaaacgtatatagatgtcaatgaagagtatacagaagcagctgcagcaacttctgtactagtggcagactgtgcatcaacagttacaaatgagttctgtgcagatcatccgttcatctatgtgattaggcatgttgatggcaaaattcttttcgttggtagatattgctctccaacaactaattgttaaccattttttttaaaaaaaatagaaaaaacatgtggtattagtgcaggtcgttgttcttccaattgcaattggtaagatgacggccaactttagtacccacgtcttttcaccacagcactgtggatgtgacagactgaccagtattgatgacgtcaaacaatgtttgactgaatatatttattggtcgtcctatgcataccgcaacaggcaatgcgctggacaattgtattccacactcctctcttttagagatgatgcggaattagtgttcatcgacattcgcgagctggtaaaaaatatgccgtgggatgatgtcaaagattgtgcagaaatcatccgttgttatataccggatgagcaaaaaaccatcagagagatttcggccatcatcggactttgtgcatatgctgctacttactggggaggtgaagaccatcccactagtaacagtctgaacgcattgtttgtgatgcttgagatgctaaattacgtggattataacatcatattccggcgtatgaattgatgagttgtacatcttgacattttctttcttctcttctccctcttctccctttcccagaaacaaactttttttacccactataaaataaaatgagtatactacctattatatttcttcctatatttttttattcttcattcgttcagacttttaacgcgcctgaatgtatcgacaaagggcaatattttgcatcattcatggagttagaaaacgagccagtaatcttaccatgtcctcaaataaatacgctatcatccggatataatatattagatattttatgggaaaaacgaggagcggataatgatagaattataccgatagataatggtagcaatatgctaattctgaacccgacacaatcagactctggtatttatatatgcattaccacgaacgaaacctactgtgacatgatgtcgttaaatttgacaatcgtgtctgtctcagaatcaaatatagatcttatctcgtatccacaaatagtaaatgagagatctactggcgaaatggtatgtcccaatattaatgcatttattgctagtaacgtaaacgcagatattatatggagcggacatcgacgccttagaaataagagacttaaacaacggacacctggaattattaccatagaagatgttagaaaaaatgatgctggttattatacatgtgttttagaatatatatacagaggtaaaacatataacgtaaccagaattgtaaaattagaggtacgggataaaataataccttctactatgcaattaccagatggcattgtaacttcaataggtagtaatttgactattgcatgcagagtatcgttgagacctcccacaacggacaccgacgtcttttggataagtaatggtatgtattacgaagaagatgatggggacggaaacggtagaataagtgtagcaaataaaatctatatgaccgataagagacgtgttattacatcccggttaaacattaatcctgtcaaggaagaagatgctacaacgtttacgtgtatggcgtttactattcctagcatcagcaaaacagttactgttagtataacgtgaatgtatgttgttacatttccatgtcaattgagtttataagaatttttatacattatcttccaacaagcaattgacgaacgtattgctatgattaactcccacgatactatgcatattattaatcattaacttgcagactatacctagagctattttgacatactcgtgttcttgtgtaattgcagtatctatattattaaagtacgtaaatctagctatagttttattatttaattttagataatataccgtctccttatttttaaaaattgttacatcctttattaaatcatgaatgggaatttctatgtcatcgttagtatattgtgaacaacaagagcagatatctataggaaagggtggaatgcgatacattgatctatgtagttttaaaacacacgcaaactttgaagaatttatataaatcattccatcgatacatccttctatgttgagatgtatatatccaggaattcgtttattaatatcgggaaatgtataaactaaaacattgcccgaaagcggtgcctctatctgcgttatatccgttcttaacttacaaaatgtaaccaatacctttgcatgacttgttttgttcggcaacgttagtttaaacttgacgaatggattaattacaatagcatgatccgcgcatctattaagtttttttactttaacgcccttgtatgtttttacagagactttatctaaatttctagtgcttgtatgtgttataaatataacgggatatagaaccgaatcacctaccttagatacccaattacattttatcagatccagataataaacaaattttgtcgccctaactaattctatattgttatatattttacaattggttatgatatcatgtaataacttggagtctaacgcgcatcgtcgtacgtttatacaattgtgatttagtgtagtatatctacacatgtatttttccgcactatagtattctggactagtgataaaactatcgttatatctgtcttcaatgaactcatcgagatattgctctctgtcatattcatacacctgcataaactttctagacatcttacaatccgtgttattttaggatcatatttacatatttacgggtatatcaaagatgttagattagttaatgggaatcgtctataataatgaatattaaacaattatatgaggacttttaccacaaagcatcataaaaatgagtcgtcgtctgatttatgttttaaatatcaaccgcgaatcaactcataaaatacaagagaatgaaatatatacatattttagtcattgcaatatagaccatacttctacagaacttgattttgtagttaaaaactatgatctaaacagacgacaacctgtaactgggtatactgcactacactgctatttgtataataattactttacaaacgatgtactgaagatattattaaatcatggagtggatgtaacgatgaaaaccagtagcggacgtatgcctgtttatatattgcttactagatgttgcaatatttcacatgatgtagtgatagatatgatagacaaagataaaaaccacttatcgcatagagactattccaacctactactagagtatataaaatctcgttacatgttattgaaggaagaggatatcgatgagaacatagtatccactttattagataagggaatcgatcctaactttaaacaagacggatatacagcgttacattattattatttgtgtctcgcacacgtttataaaccaggtgagtgtagaaaaccgataacgataaaaaaggccaagcgaattatttctttgtttatacaacatggagctaatctaaacgcgttagataattgtggtaatacaccattccatttgtatcttagtattgaaatgtgtaataatattcatatgactaaaatgctgttgacttttaatccgaatttcgaaatatgtaataatcatggattaacgcctatactatgttatataacttccgactacatacaacacgatattcttgttatgttaatacatcactatgaaacaaatgttggagaaatgccgatagatgagcgtcgtatgatcgtattcgagtttatcaaaacatattctacacgtccggcagattcgataacttatttgatgaataggtttaaaaatataaatatttatacccgctatgaaggaaagacattattacacgtagcatgtgaatataataatacacaagtaatagattatcttatacgtatcaacggagatataaatgcgttaaccgacaataacaaacacgctacacaactcattatagataacaaagaaaattccccatataccattaattgtttactgtatatacttagatatattgtagataagaatgtgataagatcgttggtggatcaacttccatctctacctatctttcgtcgcttatcatactagtcatatcctaaatgttgatcatattccaccaaatgattgtgaaagagattgagattaaatcgtctaacaaacaattagtttttatgacattaacatataataaataaattaatcattattgacttaacgatgacgaaagttatcatcatcttaggattcttgattattaatacaaattcattgtctatgaaatgtgaacaaggtgtctcatattataattcacaagaattaaagtgttgtaaactatgtaagccaggaacatattcagatcatcgatgtgataaatacagcgataccatttgtggacattgtccgagtgacacattcacgtcaatatataatcgttctccttggtgtcatagttgtagaggtccatgtggtactaatcgagtagaggtcacaccttgtacacctaccacaaatagaatctgtcattgtgactcgaatagttattgtctccttaaagcttctgatggtaactgtgttacatgtgctcctaaaacaaaatgtggtcgtgggtatggaaagaaaggagaagatgaaatgggtaataccatttgtaagaaatgtcggaagggtacttattcagatattgtatctgactctgatcaatgtaaaccaatgacaagataagacttactcgcatctactggatagacataaaatatcctcctcgtaataatgaaatataaatatacactaattattaatatcaataacaatcgagtattaatatataggtcatttttaaatcccttttgggttccgtcccaaacggcgtttcggtctgcgtcgccgccatggccatgccgagcctctccgcgtgctcctccatcgaggacgacttcaactatggcagctcggtggcgtctgccagcgtgcacatacgaatggcatttctaagaaaagtctacggtatcctttgtctacaatttcttttaacaacggcaacaactgcagtatttttatactttgactgcatgcggacatttatacaagggagtcctgttctaatattggcatcaatgttcggatctataggcttgattttcgcattgactttacacagacataaacatcccctgaatctgtacctgctttgtggatttacactgtcggaatctctaacgctggcctctgttgttactttctatgatgtgcatgtcgttatgcaagctttcatgctgactactgcagcgtttcttgctctgactacatatactctacaatcaaagagagatttcagtaaacttggagcaggattgtttgctgctttgtggattttaattttgtcaggactcttggggatatttgtgcaaaatgagacagtgaagctggtcctgtctgcttttggggcccttgtattctgtggattcattatctatgacacgcactcactaatacataagctctcgcctgaagagtatgtgttagcctctatcaatctctacttggatatcatcaatctgttcttgcatctgttgcagcttttggaagtatctaataagaaataaagtttaaaatagaattaataaaaacatataggtcattttttaaacatggattggaaaccaaggtagttagttaatacacacaagatatatttttttcacatcatccacccatgggtaacaccaaggttgttagttaataatatacaagatattttttctcactctgatccatgtaaaccaaggacgagataagacactctcattcctcatccacaaccccattaaaaaaatggaaattaaagccctctattagcataaacggctacaggtctaccatcaggttaaccttcgtctaccttcacaatggcctctccttgtgcccagttcagaccctgtcattgccactccctgaataccgtggccgacgtcagacattgtctgactgaatacatcctgtgggtttctcatagatggacccatagagaaactgcagggcctctctacaggcttctcatctctttcagaactgatgcaacggagctctttggtggtgagttgaaggagttctcggattcacttccgtgggacaatatcgacaattgcgtggagatcattaaatgtttcatcagaaatgactccatgaaaaccgccgaagaacttcgtgcaatcattggactttgtactcaatcagctatcgtctctggaagagtcttcaacgataagtatatcgacatactacttatgctgcgaaagattctgaacgagaacgactatctcaccctcttggatcatatccgcactgctaaatactaaatctccttcatgctctctcactacactttttatcatcttatgaggaatgattgccttcgtgaaataggaataattagcaccagaatagctatggattgcacatgtattctatgtcgtctactggatgaagatgtgacgtacaaaaaaataaaactagaaattgaaacgtgtcacaacttatcaaaacatatagatagacgaggaaacaatgcgctacattgttacgtctccaataaatgcgatacagacattaagattgttctctcgcggagtcgagagactttgtagaaacaacgaaggattaactccgctaggagcatacagtaagcatagatacgtaaaatctcagattgtgcatctactgatatccagctattcaaattcctctaacgaactcaagtcgaatataaatgatttcgatctgtattcgtataatatcgacttacgtctgctaaaatacctaattgtggataaacggatacgtccgtccaagaatacgaattatgcaatcaatggtctcggattggtggatatatacgtaacgacgcctaatccgagaccagaagtattgctatggcttcttaaatcagaatgttacagcaccggttacgtatttcgtacctgtatgtacgacagtgatatgtgtaagaactctcttcattactatatatcgtctcatagagaatctcaatctctatccaaggatgtaattaaatgtttgatcaataacaatgtttccatccatggcagagacgaaggaggatctttacccatccaatactactggtctttctcaaccatagatatagagattgttaaattattattaataaaggatgtggacacgtgtagagtatacgacgtcagccctatattagaggcgtattatctaaacaagcgatttagagtaaccccatataatgtagacatggaaatcgttaatcttcttattgagagacgtcatactcttgtcgacgtaatgcgtagtattacttcgtacgattccagagaatataaccactacatcatcgataacattctaaagagatttagacaacaggatgtacaagccatgttgataaactacttacattacggcgatatggtaagtatacctatcattcaatgcatgttagataacggagcaaccatggataagacgacggacaacaactatcctctacacgactactttgttaataataatctcgtcgatgtaaacgtcgtaaggtttatcgtggaaaatatggacacgcggctgtaaatcacatatcgaacaatggccgtctatgtatgtacggtctgatattatcgagatttaataattgcgggtatcactgttatgaaaccatactgatagatgtatttgatatactaagcaagtacatggatgatatagatatgatcgataactctactatattacgcggtcgatgtcaataatatacaatttgcaaagcggttattggaatatggagcgagtgtcacaacatcacgctcgataatcaatacggccatccagaaaagcagttaccaaagagaaaacaaaacgaggatagttgatttattactgagttaccatcccactctagagactatgattgacgcatttaatagagatatacgctatctatatcctgaaccattatcggcatgtatcagatacgccttaatcctagatgatgattttccttctaaagtaaagtatgatatcgccggtcgtcataaggaactaaagcgctatagagtagacattaatagaatgaagaatgcctacatatcaggcgtctccatgtttgatatattatttaaacgaagcaaacgccacagattgagatacgcaaagaatccgacatcaaatggtacaaaaaagaactaacgtccatcattacagaaactgtaaagaacaatgagaggatcgactccatagtggacaacattaatacagacgataacttgatttcgaaattacccatggagatactttattactccattaaataatttatcatggagcgataatgtcctgtttcatttgtttccatgacatattacaaaatcgattccgtccaagatgataaaaacatttaccggcatcataaacacggagtttattttatatgtctcgcataaacattactaaaaaaatatattgttcggttttctttcacatctttaattatgaaaaagtaaatcattatgagatggacgagattgtacgcatcgttcgcgacagtatgtggtacatacctaacgtatttatggacgacggtaagaatgaaggtcacgtttctgtcaacaatgtctgtcatatgtattttacgttctttgatgtggatacatcgtctcatctgtttaagctagttattaaacactgcgatctgaataaacgaggtaactctccattacattgctatacgatgaatacacgatttaatccatctgtattaaagatattgttacaccacggcatgcgtaactttgatagcaaggatgaccactatcaatcgataacaagatctttgatatactaacggacaccattgatgactttagtaaatcatccgatctattgctgtgttatcttagatataaattcaatgggagcttaaactattacgttctgtacaaaggatccgaccctaattgcgccgacgaggatgaactcacttctcttcattactactgtaaacacatatccacgttctacgaaagcaattattacaagttaagtcacactaagatgcgagccgagaagcgattcatctacgcgataatagattatggagcaaacattaacgcggttacacacttaccttcaacagtataccaaacatagtcctcgtgtggtgtatgctcttttatctcgaggagccgatacgaggatacgtaataatcttgattgtacacccatcatggaacgattgtgcaacaggtcatattctcataatgttactcaattggcacgaacaaaaggaagaaggacaacatctactttatctattcataaaacataatcaaggatacactctcaatatactacggtatctattagataggttcgacattcagaaagacgaatactataataccgcctttcaaaattgtaacaacaatgttgcctcatacatcggatacgacatcaaccttccgactaaagacggtattcgacttggtgtttgaaaacagaaacatcatatacaaggcggatgttgtgaatgacatcatccaccacagactgaaagtatctctacctatgattaaatcgttgttctacaagatgtctctccctacgacgattactacgtaaaaaagatactagcctactgcctattaagggacgagtcattcgcggaactacatagtaaattctgtttaaacgaggactataaaagtgtatttatgaaaaatatatcattcgataagatagattccatcatcgtgacataagtcgcctcaaagagattcgaatctccgacaccgacctgtatacggtatcacagctatcttaaagccatacattcagacagtcacatttcatttcccatgtacgacgatctcatagaacagtgccatctatcgaaactcgtcgacaaagcactcaataaattagagtctaccatcgatggccaatctagactatcgtatttgcctccggaaattatgcgcaatatcatctaaacagtatgttgtacggaaagaaccattacaaatattatccatgattggagaagtaggaaacaggaacaagacaacgattactacattattaaattatgaagtccgtattatactcgtatatattgtttctctcatgtataataataaacggaagagatatagcaccgcatgcaccatccgatggaaagtgtaaagacaacgaatacaaacgccataatctgtgtccgggaacatacgcttccagattatgcgatagcaagactaacacacgatgtacgccgtgtggttcgggtaccttcacatctcgcaataatcatttacccgcttgtctaagttgtaacggaagacgcgatcgtgtaacacgactcacaatagaatctgtgaatgctctcccggatattattgtcttctcaaaggatcatccggatgcaaggcatgtgtttcccaaacaaaatgtggaataggatacggagtatccggagacgtcatctgttctccgtgtggtctcggaacatattctcacaccgtctcttccgcagataaatgcgaacccgtacccagaaatacgtttaactatatcgatgtggaaattaacctgtatccagttaacgacacgtcgtgtactcggacgaccactaccggtctcagcgaatccatctcaacgtcggaactaactattactatgaatcataaagactgtaatcccgtatttcgtgatggatacttctccgttcttaataaggtagcgacttcaggtttctttacaggagaaaggtgtgcactctgaatttcgagattaaatgcaataacaaagattcttcctccaaacagttaacgaaagcaaagaatgatactatcatgccgcattcggagacagtaactctagtgggcgacatctatatactatatagtaataccaatactcaagactacgaaactgatacaatctcttatcatgtgggtaatgttctcgatgtcgatagccatatgcccggtagttgcgatatacataaactgatcactaattccaaacccacccactttttatagtaagtttttcacccataaataataaatacaataattaatttctcgtaaaagtagaaaatatattctaatttattgcacggtaaggaagtagaatcataaagaacagtactcaatcaatagcaattatgaaacaatatatcgtactggcatgcatgtgcctggcggcagctgctatgcctgccagtcttcagcaatcatcctcatcctcctcctcgtgtacggaagaagaaaacaaacatcatatgggaatcgatgttattatcaaagtcacaaagcaagaccaaacaccgaccaatgataagatttgccaatccgtaacggaaattacagagtccgagtcagatccagatcccgaggtggaatcagaagatgattccacatcagtcgaggatgtagatcctcctaccacttattactccatcatcggtggaggtctgagaatgaactttggattcaccaaatgtcctcagattaaatccatctcagaatccgctgatggaaacacagtgaatgctagattgtccagcgtgtccccaggacaaggtaaggactctcccgcgatcactcatgaagaagctcttgctatgatcaaagactgtgaagtgtctatcgacatcagatgtagcgaagaagagaaagacagcgacatcaagacccatccagtactcgggtctaacatctctcataagaaagtgagttacgaagatatcatcggttcaacgatcgtcgatacaaaatgcgtcaagaatctagagtttagcgttcgtatcggagacatgtgcaaggaatcatctgaacttgaggtcaaggatggattcaagtatgtcgacggatcggcatctgaaggtgcaaccgatgatacttcactcatcgattcaacaaaactcaaagcgtgtgtctgaatcgataactctattcatctgaaattggatgagtagggttaatcgaacgattcaggcacaccacgaattaaaaaagtgtaccggacactatattccggtttgcaaaacaaaaatgttcttaactacattcacaaaaagttacctctcgcgacttcttctttttctgtctcaatagtgtgatacgattatgacactattcctattcctattcctatttcctttcagagtatcacaaaaatattaaacctctttctgatggtctcataaaaaaagttttacaaaaatatttttattctctttctctctttgatggtctcataaaaaaagttttacaaaaatatttttattctctttctctctttgatggtctcataaaaaaagttttacaaaaatatttttattctctttctctctttgatggtctcataaaaaaagttttacaaaaatatttttattctctttctctctttgatggtctcataaaaaaagttttacaaaaatatttttattctctttctctctttgatggtctcataaaaaaagttttacaaaaatatttttattctctttctctctttgatggtctcataaaaaaagttttacaaaaatatttttattctctttctctctttgatggtctcataaaaaaagttttacaaaaatatttttattctctttctctctttgatggtctcataaaaaaagttttacaaaaatatttttattctctttct

SEQ ID NO: 58 - DNA, 188863 bp, Vaccinia virus
  LIVP 5.1.1 strain
cgattaaaactttttttatgagaccatcaaagagagaaagagaataaaaatatttttgtaaaactttttttatgagaccatcaaagagagaaagagaataaaaatatttttgtaaaactttttttatgagaccatcaaagagagaaagagaataaaaatatttttgtaaaactttttttatgagaccatcaaagagagaaagagaataaaaatatttttgtaaaactttttttatgagaccatcaaagagagaaagagaataaaaatatttttgtaaaactttttttatgagaccatcaaagagagaaagagaataaaaatatttttgtaaaactttttttatgagaccatcaaagagagaaagagaataaaaatatttttgtaaaactttttttatgagaccatcaaagagagaaagagaataaaaatatttttgtaaaactttttttatgagaccatcaaagagagaaagagaataaaaatatttttgtaaaactttttttatgagaccatcaaagagagaaagagaataaaaatatttttgtaaaactttttttatgagaccatcaaagagagaaagagaataaaaatatttttgtaaaactttttttatgagaccatcaaagagagaaagagaataaaaatatttttgtaaaactttttttatgagaccatcaaagagagaaagagaataaaaatatttttgtaaaactttttttatgagaccatcaaagagagaaagagaataaaaatatttttgtaaaactttttttatgagaccatcaaagagagaaagagaataaaaatatttttgtaaaactttttttatgagaccatcaaagagagaaagagaataaaaatatttttgtaaaactttttttatgagaccatcaaagagagaaagagaataaaaatatttttgtaaaactttttttatgagaccatcaaagagagaaagagaataaaaatatttttgtaaaactttttttatgagaccatcagaaagaggtttaatatttttgtgatactctgaaaggaaataggaataggaataggaatagtgtcataatcgtatcacactattgagacagaaaaagaagaagtcgcgagaggtaactttttgtgaatgtagttaagaacatttttgttttgcaaaccggaatatagtgtccggtacacttttttaattcgtggtgtgcctgaatcgttcgattaaccctactcatccaatttcagatgaatagagttatcgattcagacacacgctttgagttttgttgaatcgatgagtgaagtatcatcggttgcaccttcagatgccgatccgtcgacatacttgaatccatccttgacctcaagttcagatgattccttgcacatgtctccgatacgaacgctaaactctagattcttgacgcattttgtatcgacgatcgttgaaccgatgatatcttcgtaactcactttcttatgagagatgttagacccgagtactggatgggtcttgatgtcgctgtctttctcttcttcgctacatctgatgtcgatagacacttcacagtctttgatcatagcaagagcttcttcatgagtgatcgcgggagagtccttaccttgtcctggggacacgctggacaatctagcattcactgtgtttccatcagcggattctgagatggatttaatctgaggacatttggtgaatccaaagttcattctcagacctccaccgatgatggagtaataagtggtaggaggatctacatcctcgactgatgtggaatcatcttctgattccacctcgggatctggatctgactcggactctgtaatttccgttacggattggcaaatcttatcattggtcggtgtttggtcttgctttgtgactttgataataacatcgattcccatatgatgtttgttttcttcttccgtacacgaggaggaggatgaggatgattgctgaagactggcaggcatagcagctgccgccaggcacatgcatgccaggacgatatattgtttcataattgctattgattgagtactgttctttatgattctacttccttaccgtgcaataaattagaatatattttctacttttacgagaaattaattattgtatttattatttatgggtgaaaaacttactataaaaagtgggtgggtttggaattagtgatcagtttatgtatatcgcaactaccgggcatatggctatcgacatcgagaacattacccacatgataagagattgtatcagtttcgtagtcttgagtattggtattactatatagtatatagatgtcgcccactagagttactgtctccgaatgcggcatgatagtatcattctttgctttcgttaactgtttggaggaagaatctttgttattgcatttaatctcgaaattcagagtgcacacctttctcctgtaaagaatcctgaagttgctaccttattaagaacggagaagtatccatcacgaaagacgggattacagtctttatgattcatagtaatagttagttccgacgttgagatggattcgctgagaccggtagtggtcgtccgagtacacgacgtgtcgttaactggatacaggttaatttccacatcgatatagttaaacgtatttctgggtacgggttcgcatttatctgcggaagagacggtgtgagaatatgttccgagaccacacggagaacagatgacgtctccggatactccgtatcctattccacattttgtttgggaaacacatgccttgcatccggatgatcctttgagaagacaataatatccgggagagcattcacagattctattgtgagtcgtgttacacgatcgcgtcttccgttacaacttagacaagcgggtaaatgattattgcgagatgtgaaggtacccgaaccacacggcgtacatcgtgtgttagtcttgctatcgcataatctggaagcgtatgttcccggacacaaattatggcgtttgtattcgttgtctttacactttccatcggatggtgcatgcggtgctatatctcttccgtttattattatacatgagagaaacaatatatacgagtataatacggacttcatgatttaataatgtagtaatcgttgtcttgttcctgtttcctacttctccaatcatatagatattttctttctatcatggataatatttgtaatggttctttccgtacaacatactgtttagatgatattgcgcataatttccggaggcaaatacgatagtctagattgaccgatggtagactctaatttattgagtgctttgtcgacgagtttacttttacgctccatcgatagatggcactgttctatgagatcgtcgtacatgggaaatgaaatgtgactgtctgaatgtatggctttaagatagctgtgataccgtatacaggtcggtgtcggagattcgaatctctttgaggcgacttatgtcacgatgatggaatctatcttatcgaatgatatatttttcataaatacacttttatagtcctcgtttaaacagaatttactatgtagttccgcgaatgactcgtcccttaataggcagtaggctagtatcttttttacgtagtaatcgtcgtagggagagacatcttgtagaacaacgatttaatcataggtagagatactttcagtctgtggtggatgatgtcattcacaacatccgccttgtatatgatgtttctgttttcaaacaccaagtcgaataccgtctttagtcggaaggttgatgtcgtatccgatgtatgaggcaacattgttgttacaattttgaaaggcggtattatagtattcgtctttctgaatgtcgaacctatctaatagataccgtagtatattgagagtgtatccttgattatgttttatgaatagataaagtagatgttgtccttcttccttttgttcgtgccaattgagtaacattatgagaatatgacctgttgcacaatcgttccatgatgggtgtacaatcaagattattacgtatcctcgtatcggctcctcgagataaaagagcatacaccacacgaggactatgtttggtatactgttgaaggtaagtgtgtaaccgcgttaatgtttgctccataatctattatcgcgtagatgaatcgcttctcggctcgcatcttagtgtgacttaacttgtaataattgctttcgtagaacgtggatatgtgtttacagtagtaatgaagagaagtgagttcatcctcgtcggcgcaattagggtcggatcctttgtacagaacgtaatagtttaagctcccattgaatttatatctaagataacacagcaatagatcggatgatttactaaagtcatcaatggtgtccgttagtatatcaaagatcttgttatcgattgatagtggtcatccttgctatcaaagttacgcatgccgtggtgtaacaatatctttaatacagatggattaaatcgtgtattcatcgtatagcaatgtaatggagagttacctcgtttattcagatcgcagtgtttaataactagcttaaacagatgagacgatgtatccacatcaaagaacgtaaaatacatatgacagacattgttgacagaaacgtgaccttcattcttaccgtcgtccataaatacgttaggtatgtaccacatactgtcgcgaacgatgcgtacaatctcgtccatctcataatgatttactttttcataattaaagatgtgaaagaaaaacagaacaatatatttttttagtaatgtttatgcgagacatataaaataaactccgtgtttatgatgccggtaaatgtttttatcatcttggacggaatcgattttgtaatatgtcatggaaacaaatgaaacaggacattatcgctccatgataaattatttaatggagtaataaagtatctccatgggtaatttcgaaatcaagttatcgtctgtattaatgttgtccactatggagtcgatcctctcattgttctttacagtttctgtaatgatggacgttagttcttttttgtaccatttgatgtcggattctttgcgtatctcaatttgtggcgtttgcttcgtttaaagaatatatcaaacatggagacgcctgatatgtagacattcttcattctattaatgtctactctatagcgctttagttccttatgacgaccggagatatcatactttactttagaaggaaaatcatcatctaggattaaggcgtatctgatacaggcgaataatggttcaggatatagatagcgtatatctctattaaatgcgtcaatcatagtctctagagtgggatggtagctaagtaataaatcaactatcctcgttttgttttctctttggtaactgcttttctggatggccgtattgattatcgagcgtgacactcgctccatattccaataaccgctttgcaaattgtatattattgacatcgaccgcgtaatatagtagagttatcgatcatatctatatcatccatgtacttgcttagtatatcaaatacatctatcagtatggtttcataacagtgatacccgcaattattaaatctcgataatatcagaccgtacatacatagacggccattgttagatatgtgatttacagccgcgtgtccatattttccacgataaaccttacgacgtttacatcgacgagattattattaacaaagtagtcgtgtagaggatagttgttgtccgtcgtcttatccatggttgctccgttatccaacatgcattgaatgataggtatacttaccatatcgccgtaatgtaagtagtttatcaacatggcttgtacatcctgttgtctaaatctctttagaatgttatcgatgatgtagtggttatattctctggaatcgtacgaagtaatactacgcattacgtcgacaagagtatgacgtctctcaataagaagattaacgatttccatgtctacattatatggggttactctaaatcgcttgtttagataatacgcctctaatatagggctgacgtcgtatactctacacgtgtccacatcctttattaataatttaacaatctctatatctatggttgagcaagaccagtagtattggatgggtaaagatcctccttcgtctctgccatggatggaaacattgttatcgatcaaacatttaattacatccttggatagagattgagattctctatgagacgatatatagtaatgaagagagttcttacacatatcactgtcgtacatacaggtacgaaatacgtaaccggtgctgtaacattctgatttaagaagccatagcaatacttctggtctcggattaggcgtcgttacgtatatatccaccaatccgagaccattgattgcataattcgtattcttggacggacgtatccgtttatccacaattaggtattttagcagacgtaagtcgatattatccgaatacagatcgaaatcatttatattcgacttgagttcgttagaggaattcgaatagctggatatcagtagatgcacaatctgagatttgacgtatctatgcttactgtatgctcctagcggagttaatccttcgttgtttctacaaagtctctcgactccgcgagagagtaacagccgaacaatcttaatgtctgtatcgcatttattgaagacgtaacaatgtagcgcattgtttcctcgtctatctatatgttttgataagttgtgacacgtttcaatctctggttttatttttttgtacgtcacatcttcatccagtagacgacatagaatagtgcactctctaccacaataatccatagctattctggtgctaattattcctatttcacgaaggcaatcattcctcataagatgataaaaagtgtagtgagagagcatgaaggagatttagtatttagcagtgcggatatgatccaagagggtgagatagtcgttctcgttcagaatctttcgcagcataagtagtatgtcgatatacttatcgttgaagactctttataaaagtctatttgtttatatttattgcggatagcagtatttccctataaaaagtatacgtcctgtggtgtctttaatcatgtacatgaatggatggtttatgtagaccttcgtacgatataccatcgaaaagttaatcgtaaatactcctgtaacggccgatgcttctgtatactcctcattaacatctataaacgtcgtatgtagaaatttttctacagtgatagtttcattacacatcttgctaaaatctgcataatatccgaatatattagtaagtcctaaattttctaaaatcggtaccagattatacggttctgtcatttccactttaaactttggcatatacaagtctatacttttagtagataacataccacaccattttttaaatttttcatctgttatatttttttctatgttatatataccttctatgtcgtccggtagtataattaccatactagagtttccctcgtatggaatatcgataatagagaatcctccgaataattcattaatatgtacatattgcaagttattctcggtacccaccatcatatcaacgctggtaactatattcttagaaatataaaacttgtctgtatatgtaagatgtttagaaaatggatatttccacattgctttaaaatggacggcgctaacaactgtcatacgagtattaatggatagcggactagtcaataaggaattaattttaccatttgtcattgtcttaacccattcgttgattagttcctttgtttggttagcattattaaagtttacagtttgaaaatcgtcttttattttttgtaggaaggaggcgtggaactcgatactatcgctaccgtatattttatttgcggtagctagtgtcgcacaatacggaatatctacctccatgtcatcattattgtcatcgggtgtattctcattcatattctctatatattttgatagttgttcagctgtagaaccagctgctccatgatttagaatagataaagtagataaaatggaaactggagaaatcaaaacattttcatcagggtgttttaagattagttctttaaagatatccatggtatagacctaacgataacgatatatatcataaataaataatgttaaatttcaatttatgtttgtaccccgtattcatacttaacaaattggtattgcgtacacaatcaatcatattacataccattaataatgcaagcataaaaaattgttagtagatgtttctaaatataggttccgtaagcaaagaatataagaatgaagcggtaatgataaaatcaatcgttatctaaaatgatcatactcatttattttattctattatattaacacatacatttttaacagcaacacattcaatattgtattgttatttttatattatttacacaattaacaatatattattagtttatattactgaattaataatataaaattcccaatcttgtcataaacacacactgagaaacagcataaacacagaatccatcaaaaatgttgataaattatctgatgttgttgttcgctgctatgataatcagatcattcgccgatagtggtaacgctatcgaaacgacattgccagaaattacaaacgctacaacagatattccagctatcagattatgcggtccagagggagatggatattgtttacacggtgactgtatccacgctagagatattgacggtatgtattgtagatgctctcatggttatacaggcattagatgtcagcatgtagtattagtagactatcaacgttcagaaaacccaaacactacaacgtcatatatcccatctcccggtattatgcttgtattagtaggcattattatgtgttgtctattatctgtttataggttcactcgacgaactaaactacctatacaagatatggttgtgccataatttttataaatttttttatgagtatttttacaaaaatgtataaagtgtatgtcttatgtatatttataaaaatgctaagtatgcgatgtatctatgttatttgtatttatctaaacaatacctctacctctagatattatacaaaaattttttatttcggcatattaaagtaaaatctagttaccttgaaaatgaatacagtgggtggttccgtatcaccagtaagaacataatagtcaaatacagtatccgattgagattttgcatacaatactagtctagaaagaaatttgtaatcatcttctgtgacgggagtccatatatctgtatcatcgtctagtttatcagtgtcccatgctatattcctgttatcatcattagttaatgaaaataactctcgtgcttcagaaaagtcaaatattgtatccatacatacatctccaaaactatcgcttatacgtttatctttaacgatacctatacctagatggttatttactaacagacattttccagatctattgactataactcctatagtttccacatcaaccaagtaatgatcatctattgttatataacaataacataactcttttccatttttatcagtatgtatatctatatcaacgtcgtcgttgtagtgaatagtagtcattgatctattatatgaaacggatatgtctagaacggcaattgttttacgtccagttaacactttcgttgatttaaagtctagagtctttgcaaacataatatccttatccgactttatatttcctgtagggtggtataattttattttgcctccacatatcggtgtttccaaatatattactagacaatattccatatagttattagttaagggtacccaattagaacacgtacgcttattatcatcatttggatcgtatttcataaaagttattgtgttatcgatgtcaacacattctacattttttaatcgtctatatagtatttttctgatattttctataatatcagaattgtcttccatcggaagttgtatactatcggaatcagttacatgtttaaataattctctgatgtcattccttatacaatcaaattcattattaaacagtttaatagtctgtagacctttatcgtcgtaaatatccattgtcttattagttacgcttatttttatgtgtttttacgttgctttattatattttataagaatgattgtttgacgaatcacgagaactattaagacacattattaggtatatattataaaaaagtttttgattacgatgttataagaggaaagaggacacattaacatcatacatcaattaactacattcttataacatcgtaatcaaaagaattgcaattttgatgtataacaactgtcaatgggttatggaattgtatattacatattatacggtatgttggtaacgacaaataccggtcggtaattgtctgccggtgtaatagaattatatatatctatctattacaccggccttgtatacataataataagttgtggtagtatgatctccatatttataatttaggactttgtattcagtatttttggaatcataaaaaataaaaaaaagttttactaatttaaaatttaaaaagtatttacatttttttcactgtttagtcgcggatatggaattcgatcctgccaaaatcaatacatcatctatagatcatgtaacaatattacaatacatagatgaaccaaatgatataagactaacagtatgcattatccgaaatattatatcaatatcacaaaaataaatacacatttggctaatcaatttcgggcttggaaaaaacgtatcgccggaagggactatatgactaacttatctagagatacaggaatacaacaatcaaaacttactgaaactatacgtaactgtcaaaaaaatagaaacatatatggtctatatatacactacaatttagttattaattggataaccgatgtgattatcaatcaatattaagagggttggtaaattggtacatagctaataatacctatacacccaataatacaacaaccatttctgagttggatatcatcaaaatactaaataaatacgaggacgtgtatagagtaagtaaagaaaaagaatgtggaatttgctatgaagttgtttactcaaaacgatagatactttggtttattggattcgtgtactcatatattttgcataacatgcatcaatatatggcatagaacacgaagagaaaccggtgcgtcggataattgtcctatatgccgtacccgttttagaaacataacaatgagcaagttctataagctagttaactaataaataaaaagtttaatttgttgacgacgtatgtcgttattttttctcgtataaaagattaaattcaattcaattcgttgtttctaatataatctgccgtattggatggattctcaagacaattgcatttagattatattatcatgaataaaaatagtagcacacaactacttcagcaaacattctttttataaatgccatctagcgtagcgaggacacaagtgaacctataattatcaaatttattagtatcggttacatgaaggactttacgtagagtgacgattccactatctgtggtacgaacggtttcatcttctttgatgccatcacccagatgttctataaacttggtatcctcgtccgatttcatatcctttgccaaccaatacatatagctaaactcaggcatatgttccacacatcctgaacaatgaaattctccagaagatgttacaatgtctagatttggacatttggtttcaaccgcgttaacatatgagtgaacacacccatacatgaaagcgatgagaaataggattctcatcttgccaaaatatcactagaaaaaatttatttatcagttttaaaggtataaaaaatacttattgttgctcgaatattttgtatttgatggtatacggaagattagaaatgtaggtattatcatcaactgattctatggttttatgtattctatcatgtttcactattgcgttggaaataatatcatatgcttccacatatattttattttgttttaactcataatactcacgtaattctggattattggcatatctatgaataattttagctccatgatcagtaaatattaatgagaacatagtattaccacctaccattatttttttcatctcattcaattcttaattgcaaagatctatataatcattatagcgttgacttatggactctggaatcttagacgatgtacagtcatctataatcatggcatatttaatacattgttttatagcatagtcgttatctacgatgttagatatttctctcaatgaatcaatcacacaatctaatgtaggtttatgacataatagcattttcagcagttcaatgtttttagattcgttgatggcaatggctatacatgtatatccgttatttgatctaatgttgacatctgaaccggattctagcagtaaagatactagagattgtttattatatctaacagccttgtgaagaagtgtttctcctcgtttgtcaatcatgttaatgtctttaagataaggtaggcaaatgtttatagtactaagaattgggcaagcataagacatgtcacaaagacccttttttgtatgtataagtgtaaaaattataacatccatagttggatttacataggtgtccaatcgggatctctccatcatcgagataattgatggcatctcccttccttttttagtagatatttcatcgtgtaagaatcaatattaatatttctaaagtatccgtgtatagcctctttatttaccacagctccatattccactagagggatatcgccgaatgtcatatactcaattagtatatgttggaggacatccgagttcattgttttcaatatcaaagagatggtttccttatcatttctccatagtggtacaatactacacattattccgtgcggctttccattttccaaaaacaatttgaccaaatctaaatctacatctttattgtatctataatcactatttagataatcagccataattcctcgagtgcaacatgttagatcgtctatatatgaataagcagtgttatctattcctttcattaacaatttaacgatgtctatatctatatgagatgacttaatataatattgaagagctgtacaatagtttttatctataaaagacggcttgattccgtgattaattagacatttaacaacttccggacgcacatatgctctcgtatccgactctgaatacagatgagagatgatatacagatgcaatacggtaccgcaatttcgtagttgataatcatcatacgcgtatcagtactcgtcctcataaagaacactgcagccattttctatgaacaaatcaataattttagaaacaggatcattgtcattacataattttctataactgaacgatggttttcacatttaacactcaagtcaaatccatgttctaccaacacctttatcaagtcaacgtctacatttttggatttcatatagctgaatatattaaagttatttatgttgctaaatccagtggcttctagtagagccatcgctatatccttattaactttaacatgtctactatttgtgtattcttctaatggggtaagctgtctccaatttttgcgtaatggattagtgccactgtctagtagtagtttgacgacctcgacattattacaatgctcattaaaaaggtatgcgtgtaaagcattattcttgaattggttcctggtatcattaggatctctgtctttcaacatctgtttaagttcatcaagagccacctcctcattttccaaatagtcaaacattttgactgaatgagctactgtgaactctatacacccacacaactaatgtcattaaatatcatgtcaaaaacttgtacaattattaataaaaataatttagtgtttaaattttaccagttccagattttacacctccgttaatacctccattaaccccactggacgatcctcctccccacattccaccgccaccagatgtataagttttagatcctttattactaccatcatgtccatggataaagacactccacatgccgccactaccccctttagaagacatattaataagacttaaggacaagtttaacaataaaattaatcacgagtaccctactaccaacctacactattatatgattatagtttctatttttacagtaccttgactaaagtttctagtcacaagagcaatactaccaacctacactattatatgattatagtttctatttttataggaacgcgtacgagaaaatcaaatgtctaatttctaacggtagtgttgataaacgattatcgtcaatggatacctcctctatcatgtcgtctattttcttactttgttctattaacttattagcattatatattatttgattataaaacttatattgcttattagcccaatctgtaaatatcggattattaacatatcgtttctttgtaggtttatttaacttgtacatcactgtaagcatgtccttaccatttattttaatttgacgcatatccgcaatttctttttcgcagtcggttataaattctatatatgatggatacatgctacatgtgtacttataatcgactaatatgaagtacttgatacatattttcagtaacgatttattattaccacctatgaataagtacctgtgatcgtctaggtaatcaactgttttcttaatacattcgatggttggtaatttactcagaataatttccaatatcttaatatataattctgctatttctgggatatatttatctgccagtataacacaaatagtaatacatgtaaacccatattttgttattatattaatgtctgcgccattatctattaaccattctactaggctgacactatgcgactcaatacaatgataaagtatactacatccatgtttatctattttgtttatatcattaatatacggcttacaaagttttagtatcgataacacatccaactcacgcatagagaaggtagggaataatggcataatatttattaggttatcatcattgtcattatctacaactaagtttccattttttaaaatatactcgacaactttaggatctctattgccaaatttttgaaaatatttatttatatgcttaaatctatataatgtagctccttcatcaatcatacatttaataacattgatgtatactgtatgataagatacatattctaacaatagatcttgtatagaatctgtatatcttttaagaattgtggatattaggatattattacataaactattacacaattctaaaatataaaacgtatcacggtcgaataatagttgatcaactatataattatcgattttgtgatttttcttcctaaactgtttacgtaaatagttagatagaatattcattagttcatgaccactatagttactatcgaataacgcgtcaaatatttcccgtttaatatcgcatttgtcaagataataatagagtgtggtatgttcacgataagtataataacgcatctctttttcgtgtgaaattaaatagtttattacgtccaaagatgtagcataaccatcttgtgacctagtaataatataataatagagaactgttttacccattctatcatcataatcagtggtgtagtcgtaatcgtaatcgtctaattcatcatcccaattataatattcaccagcacgtctaatctgttctattttgatcttgtatccatactgtatgttgctacatgtaggtattcctttatccaataatagtttaaacacatctacattgggatttgatgttgtagcgtatttttctacaatattaataccatttttgatactatttatttctatacctttcgaaattagtaatttcaataagtctatattgatgttatcagaacatagatattcgaatatatcaaaatcattgatatttttatagtcgactgacgacaataacaaaatcacaacatcgtttttgatattattatttttcttggtaacgtatgcctttaatggagtttcaccatcatactcatataatggatttgcaccactttctatcaatgattgtgcactgctggcatcgatgttaaatgttttacaactatcatagagtatcttatcgttaaccatgattggttgttgatgctatcgcattttttggtttctttcatttcagttatgtatggatttagcacgtttgggaagcatgagctcatatgatttcagtactgtagtgtcagtactattagtttcgatcagatcaatgtctagatctatagaatcaaaacacgataggtcagaagataatgaatatctgtacgcttctttttgtactgtaacttctggttttgttagatggttgcatcgtgctttaacgtcaatggtacaaattttatcctcgctttgtgtatcatattcgtccctactataaaattgtatattcagattatcatgcgatgtgtatacgctaacggtatcaataaacggagcacaccatttagtcataaccgtaatccaaaaatttttaaagtatatcttaacgaaagaagttgtgtcattgtctacggtgtatggtactagatcctcataagtgtatatatctagagtaatgtttaatttattaaatggttgataatatggatcctcgtgacaatttccgaagatggaaataagacataaacacgcaataaatctaattgcggacatggttactccttaaaaaaatacgaataatcaccttggctatttagtaagtgtcatttaacactatactcatattaatccatggactcataatctctatacgggattaacggatgttctatatacggggatgagtagttctcttctttaactttatactttttactaatcatatttagactgatgtatgggtaatagtgtttgaagagctcgttctcatcatcagaataaatcaatatctctgtttttttgttatacagatgtattacagcctcatatattacgtaatagaacgtgtcatctaccttattaactttcaccgcatagttgtttgcaaatacggttaatcctttgacctcgtcgatttccgaccaatctgggcgtataatgaatctaaactttaattgcttgtaatcattcgaaataatttttagtttgcatccgtagttatcccctttatgtaactgtaaatttctcaacgcgatatctccattaataatgatgtcgaattcgtgctgtatacccatactgaatggatgaacgaataccgacggcgttaatagtaatttactttttcatctttacatattgggtactagttttactatcataagtttataaattccacaagctactatggaataagccaaccatcttagtataccacacatgtcttaaagtttattaattaattacatgttgttttatatatatcgctacgaatttaaagagaaattagtttaggaagaaaaattatctatctacatcatcacgtctctgtattctacgatagagtgctactttaagatgcgacagatccgtgtcatcaaatatatactccattaaaatgattattccggcagcgaacttgatattggatatatcacaacctttgttaatatctacgacaatagacagcagtcccatggttccataaacagtgagtttatctttctttgaagagatattttgtagagatcttataaaactgtcgaatgacatcgcatttatatctttagctaaatcgtatatgttaccatcgtaatatctaaccgcgtctatcttaaacgtttccatcgctttaaagacgtttccgatagatggtctcatttcatcagtcatactgagccaacaaatataatcgtgtataacatctttgatagaatcagactctaaagaaaacgaatcggctttattatacgcattcatgataaacttaatgaaaaatgtttttcgttgtttaagttggatgaatagtatgtcttaataattgttattatttcattaattaatatttagtaacgagtacactctataaaaacgagaatgacataactaatcataactagttatcaaagtgtctaggacgcgtaattttcatatggtatagatcctgtaagcattgtctgtattctggagctattttctctatcgcattagtgagttcagaatatgttataaatttaaatcgaataacgaacataactttagtaaagtcgtctatattaactcttttattttctagccatcgtaataccatgtttaagatagtatattctctagttactacgatctcatcgttgtctagaatatcacatactgaatctacatccaattttagaaattggtctgtgttacatatctcttctatattattgttgatgtattgtcgtagaaaactattacgtagaccattttctttataaaacgaatatatagtactccaattatctttaccgatatatttgcacacataatccattctctcaatcactacatctttaagattttcgttgttaagatatttggctaaactatataattctattagatcatcaacagaatcagtatatatttttctagatccaaagacgaactctttggcgtcctctataatattcccagaaaagatattttcgtgttttagtttatcgagatctgatctgttcatatacgccatgattgtacggtacgttatgataaccgcataaaataaaaatccattttcatttttaaccaatactattcataattgagattgatgtaatactttgttactttgaacgtaaagacagtacacggatccgtatctccaacaagcacgtagtaatcaaatttggtgttgttaaacttcgcaatattcatcaatttagatagaaacttatactcatcatctgttttaggaatccatgtattattaccactttccaacttatcattatcccaggctatgtttcgtccatcatcgttgcgcagagtgaataattcttttgtattcggtagttcaaatatatgatccatgcatagatcggcaaagctattgtagatgtgatttttcctaaatctaatataaaactcgtttactagcaaacactttcctgatttatcgaccaagacacatatggtttctaaatctatcaagtggtggggatccatagttatgacgcagtaacatatattattacattcttgactgtcgctaatatctaaatatttattgttatcgtattggattctgcatatagatggcttgtatgtcaaagatatagaacacataaccaatttatagtcgcgctttacattctcgaatctaaagttaagagatttagaaaacattatatcctcggatgatgttatcactgtttctggagtaggatatattaaagtctttacagatttcgtccgattcaaataaatcactaaataatatcccacattatcatctgttagagtagtatcattaaatctattatattttatgaaagatatatcactgctcacctctatatttcgtacatttttaaactgtttgtataatatctctctgatacaatcagatatatctattgtgtcggtagacgataccgttacatttgaattaatggtgttccattttacaacttttaacaagttgaccaattcatttctaatagtatcaaactctccatgattaaatattttaatagtatccattttatatcactacggacacaaagtagctgacataaaccattgtataatttttatgttttatgtttattagcgtacacattttggaagttccggcttccatgtatttcctggagagcaagtagatgatgaggaaccagatagtttatatccgtacttgcacttaaagtctacattgtcgttgtatgagtatgatcttttaaacccgctagacaagtatccgtttgatattgtaggatgtggacatttaacaatctgacacgtgggtggatcggaccattctcctcctgaacacaggacactagagttaccaatcaacgaatatccactattgcaactataagttacaacgcttccatcggtataaaaatcctcgtatccgttatgtcttccgttggatatagatggaggggattggcatttaacagattcacaaataggtgcctcgggattccataccatagatccagtaaatcctaattcacaatacgatttagattcaccgatcaactgatatccgctattacaagagtacgttatactagagccaaagtctactccaccaatatcaagttggccattatcgatatctcgaggcgatgggcatctccgtttaatacattgattaaagagtgtccatccagtacctgtacatttagcatatataggtcccattttttgctttctgtatccaggtagacatagatattctatagtgtctcctatgttgtaattagcattagcatcagtctccacactattcttaaatttcatattaatgggtcgtgacggaatagtacagcatgatagaacgcatcctattcccaacaatgtcaggaacgtcacgctctccaccttcatatttatttatccgtaaaaatgttatcctggacatcgtacaaataataaaaagcccatatatgttcgctattgtagaaattgtttttcacagttgctcaaaaacgatggcagtgacttatgagttacgttacactttggagtctcatctttagtaaacatatcataatattcgatattacgagttgacatatcgaacaaattccaagtatttgattttggataatattcgtattttgcatctgctataattaagatataatcaccgcaagaacacacgaacatctttcctacatggttaaagtacatgtacaattctatccatttgtcttccttaactatatatttgtatagataattacgagtctcgtgagtaattccagtaattacatagatgtcgccgtcgtactctacagcataaactatactatgatgtctaggcatgggagacttttttatccaacgatttttagtgaaacattccacatcgtttaatactacatatttctcatacgtggtataaactccacccattacatatatatcatcgtttacgaataccgacgcgcctgaatatctaggagtaattaagtttggaagtcttatccatttcgaagtgccgtgtttcaaatattctgccacacccgttgaaatagaaaattctaatcctcctattacatataactttccatcgttaacacaagtactaacttctgattttaacgacgacatattagtaaccgttttccattttttcgttttaagatctacccgcgatacggaataaacatgtctattgttaatcatgccgccaataatgtatagacaattatgtaaaacatttgcattatagaattgtctatctgtattaccgactatcgtccaatattctgttctaggagagtaatgggttattgtggatatataatcagagtttttaatgactactatattatgttttataccatttcgtgtcactggctttgtagatttggatatagttaatcccaacaatgatatagcattgcgcatagtattagtcataaacttgggatgtaaaatgttgatgatatctacatcgtttggatttttatgtatccactttaataatatcatagctgtaacatcctcatgatttacgttaacgtcttcgtgggataagatagttgtcagttcatcctttgataattttccaaattctggatcggatgtcaccgcagtaatattgttgattatttctgacatcgacgcattatatagttttttaattccatatcttttagaaaagttaaacatccttatacaatttgtgaaattaatattatgaatcatagtttttacacatagatctactacaggcggaacatcaattattatggcagcaactagtatcatttctacattgtttatggtgatgtttatcttcttccagcgcatatagtctaatagcgattcaaacgcgtgatagtttataccattcaatataatcgcttcatcctttagatggtgatcctgaatgcgtttaaaaaaattatacggagacgccgtaataatttccttattcacttgtataatttccccattgatagaaaatattacgctttccattcttaaagtactataagtaattatagtataatgtaaacgtttatatattcaatatttttataaaaatcattttgacattaattcctttttaaatttccgtctatcatctatagaaacatattctatgaatttataaaatgcttttacgtgtcctatcgtaggcgatagaaccgctaaaaagcctatcgaatttctacaaaagaatctgttatatggtatagggagagtataaaacattaaatgtccgtacttattaaagtattcagtagccaatcctaactctttcgaatacttattaatggctcttgttctgtacgaatctatttttttgaacaacggacctagtggtatatcttgttctatgtatctaaaataatgtctgactagatccgttagtttaatatccgcagtcatcttgtctagaatggcaaatctaactgcgggtttaggctttagtttagtttctatatctacatctatgtctttatctaacaccaaaaatataatagctaatattttattacaatcatccggatattcttctacgatctcactaactaatgtttctttggttatactagtatagtcactatcggacaaataaagaaaatcagatgatcgatgaataatacatttaaattcatcatctgtaagatttttgagatgtctcattagaatattattagggttagtactcattatcattcggcagctattacttattttattatttttcaccatatagatcaatcattagatcatcaaaatatgtttcaatcatcctaaagagtatggtaaatgactcttcccatctaatttctgaacgttcaccaatgtctctagccactttggcactaatagcgatcattcgcttagcgtcttctatattattaactggttgattcaatctatctagcaatggaccgtcggacagcgtcattctcatgttcttaatcaatgtacatacatcgccgtcatctaccaattcatccaacaacataagctttttaaaatcatcattataataggtttgatcgttgtcatttctccaaagaatatatctaataagtagagtcctcatgcttagttaacaactattttttatgttaaatcaattagtacaccgctatgtttaatacttattcatattttagtttttaggattgagaatcaatacaaaaattaatgcatcattaattttagaaatacttagtttccacgtagtcaatgaaacatttgaactcatcgtacaggacgttctcgtacaggacgtaactataaaccggtttatatttgttcaagatagatacaaatccgataactttttttacgaattctacgggatccactttaaaagtgtcataccgggttctttttatttttttaaacagatcaatggtgtgatgttgattaggtcttttacgaatttgatatagaatagcgtttacatattctccataatggtcaatcgccatttgttcgtatgtcataaattctttaattatatgacactgtgtattatttagttcatccttgttcattgttaggaatctatccaaaatggcaattatactagaactataggtgcgttgtatacacatattgatgtgtctgtttatacaatccatgatatttggatccatgctactaccttcgggtaaaattgtagcatcatataccatttctagtactttaggttcattattatccattgcagaggacgtcatgatcgaatcataaaaaaatatattatttttatgttattttgttaaaaataatcatcgaatacttcgtaagatactccttcatgaacataatcagttacaaaacgtttatatgaagtaaagtatctacgatttttacaaaagtccggatgcataagtacaaagtacgcgataaacggaataataatagatttatctagtctatctttttctatagctttcatagttagatacatggtctcagaagtaggattatgtaacatcagcttcgataaaatgactgggttatttagtcttacacattcgctcatacatgtatgaccgttaactacagagtctacactaaaatgattgaacaatagatagtctaccattgtttcgtattcagatagtacagcgtagtacatggcatcttcacaaattatatcattgtctaatagatatttgacgcatcttatggatcccacttcaacagccattttaaaatcggtagaatcatattgctttcctttatcattaataatttctagaacatcatctctatcataaaagatacaaatattaactgtttgatccgtaataacattgctagtcgatagcaatttgttaataagatgcgctgggctcaatgtcttaataagaagtgtaagaggactatctccgaatttgttttgtttattaacatccgttgatggaagtaaaagatctataatgtctacattcttgactgttttagagcatacaatatggagaggtgtatttccatcatgatctggttttgagggactaattcctagtttcatcatccatgagattgtagaagcttttggattgtctgacataagatgtctatgaatatgatttttgccaaatttatccactatcctggcttcgaatccgatggacattatttttttaaacactctttctgaaggatctgtacacgccaacaacggaccacatccttcttcatcaaccgagttgttaatcttggctccatactgtaccaataaatttattctctctatgacttcatcatctgttcccgagagataatatagaggcgttttatgctgtttatcacacgcgtttggatctgcgccgtgcgtcagcagcatcgcgactattctattattattaattttagaagctatatgcaatggataatttccatcatcatccgtctcatttggagagtatcctctatgaagaagttcttcgacaaatcgttcatctagtcctttaattccacaatacgcatgtagaatgtgataattatttccagaaggttcgatagcttgtagcatattcctaaatacatctaaatttttactattatatttggcataaagagatagataatactcggccaacataatgttgtccattgtagtataaaaattaatatttctatttctatttctgtatatttgcaacaatttactctctataacaaatatcataacttagttcttttatgtcaagaaggcactggtttagttcatctataaatgtcacgccataactactacgcatgccatactcagaattatgataaagatatttatccttggggtgtaggtaatggggattaatctttgttggatcagtctctaagttaacacatgtcacacatgatccatttatagttatatcacacgatgatgatttatgaattgattccggaagatcgctatcgtattttgtggttccacaattcatttccatacatgttattgtcacactaatattatgatgaactttatctagccgctgagtggtaaacaacagaacagatagtttattatctttaccaacaccctcagccgctgccacaaatctctgatccgtatccatgatggtcatgtttatttctagtccgtatccagtcaacactatgttagcatttctgtcgatatagctttcactcatatgacactcaccaataatagtagaattaatgtcgtaatttacaccaatagtgagttcggcggcaaagtaccaataccggtaatcttgtcgaggaggacatatagtattcttgtattctaccgaatacccgagagatgcgatacaaaagagtaagactaatttgtaaaccatcttactcaaaatatgtaacaatagtacgatgcaatgagtaagacaataggaaatctatcttatatacacataattattctatcaattttaccaattagttagtgtaatgttaacaaaaatgtgggagaatctaattagtttttctttacacaattgacgtacatgagtctgagttccttgtttttgctaattatttcatccaatttattattcttgacgatatcgagatcttttgtataggagtcagacttgtattcaacatgcttttctataatcattttagctatttcggcatcatccaatagtacattttccagattagcagaatagatattaatgtcgtatttgaacagagcctgtaacatctcaatgtctttattatctatagccaatttaatgtccggaatgaagagaagggaattattggtgtttgtcgacgtcatatagtcgagcaagagaatcatcatatccacgtgtccattttttatagtgatgtgaatacaactaaggagaatagccagatcaaaagtagatggtatctctgaaagaaagtaggaaacaatacttacatcattaagcatgacggcatgataaaatgaagttttccatccagttttcccatagaacatcagtctccaatttttcttaacaaacagttttaccgtttgcatgttaccactatcaaccgcataatacaatgcagtgtttcccttgtcatcaaattgtgaatcatccagtccactgaatagcaaaatctttactattttggtatcttccaatgtggctgcctgatgtaatggaaattcattctctagaagatttttcaatgctccagcgttcaacaacgtacatactagacgcacgttattatcagctattgcataatacaaggcactatgtccatggacatccgccttaaatgtatctttactagagagaaagcttttcagctgcttagacttccaagtattaattcgtgacagatccatgtctgaaacgagacgctaattagtgtatattttttcattttttatcatattgcaccagaattaataatatctctaatagatctgattagtagatacatggctatcgcaaaacaacatatacacatttaataaaaataatatttattaagaaaattcagatttcacgtacccatcaatataaataaaataatgattccttacaccgtacccatattaaggagattccaccttacccataaacaatataaatccagtaatatcatgtctgatgatgaacacaaatggtgtattaaattccagtttttcaggagatgatctcgccgtagctaccataatagtagatgcctctgctacagttccttgttcgtcgacatctatctttgcattctgaaacattttataaatatataatgggtccctagtcatatgtttaaacgacgcattatctggattaaacatactaggagccatcatttcggctatcgacttaatatccctcttattttcgatagaaaatttagggagtttaagattgtacactttattccctaattgagacgaccaatagtctaattttgcagccgtgatagaatctgtgaaatgggtcatattatcacctattgccaggtacatactaatattagcatccttatacggaaggcgtaccatgtcatattctttgtcatcgattgtgattgtatttccttgcaatttagtaactacgttcatcatgggaaccgttttcgtaccgtacttattagtaaaactagcattgcgtgttttagtgatatcaaacggatattgccatatacctttaaaatatatagtattaatgattgcccatagagtattattgtcgagcatattagaatctactacattagacataccggatctacgttctactatagaattaattttattaaccgcatctcgtctaaagtttaatctatataggccgaatctatgatattgttgataatacgacggtttaatgcacacagtattatctacgaaactttgataagttagatcagtgtacgtatatttagatgttttcagcttagctaatcctgatattaattctgtaaatgctggacccagatctctttttctcaaatccatagtcttcaataattctattctagtattacctgatgcaggcaatagcgacataaacatagaaaacgaataaccaaacggtgagaagacaatattatcatcttgaatatttttatacgctactataccggcattggtaaatccttgtagacgataggcggacgctgaacacgctaacgatagtatcaataacgcaatcatgattttatggtattaataattaaccttatttttatgttcggtataaaaaaattattgatgtctacacatccttttgtaattgacatctatatatccttttgtataatcaactctaatcactttaacttttacagttttccctaccagtttatccctatattcaacatatctatccatatgcatcttaacactctctgccaagatagcttcagagtgaggatagtcaaaaagataaatatatagagcataatcattctcgtatactctgccctttattacatcacccgcattgggcaacgaataacaaaatgcaagcatcttgttaacgggctcgtaaattgggataaaaattatgtttttattgtcttatatctattttattcaagagaatattcaggaatttctttttccggttgtatctcgtcgcagtatatatcatttgtacattgtttcatattttttaatagtttacaccttttagtaggactagtatcgtacaattcatagctgtattttgaattccaatcacgcataaaaatatcttccaattgttgacgaagacctaatccatcatccggtgtaatattaatagatgctccacatgtatccgtaaagtaatttcctgtccaatttgaggtacctatataggccgttttatcggttaccatatatttggcatggtttaccctagaatacggaatgggaggatcagcatctggtacaataaatagctttacttctatatttatgtttttagattttagcatagcgatagatcttaaaaagtttctcatgataaacgaagatcgttgccagcaactaatcaatagcttaacggatacttgtctgtctatagcggatcttcttaattcatcttctatataaggccaaaacaaaattttacccgccttcgaataaataatagggataaagttcataacagatacataaacgaatttactcgcatttctaatacatgacaataaagcggttaaatcattggttctttccatagtacatagttgttgcggtgcagaagcaataaatacagagtgtggaacgccgcttacgttaatactaagaggatgatctgtattataatacgacggataaaagtttttccaattatatggtagattgttaactccaagataccagtatacctcaaaaatttgagtgagatccgctgccaagttcctattattgaagatcgcaatacccaattccttgacctgagttagtgatctccaatccatgttagcgcttcctaaataaatatgtgtattatcagatatccaaaattttgtatgaagaactcctcctaggatatttgtaatatctatgtatcgtacttcaactccggccatttgtagtctttcaacatcctttaatggtttgttagatttattaacggctactctaactcgtactcctcttttgggtaattgtacaatctcgtttaatattatcgtgccgaaattcgtacccacttcatccgataaactccaataaaaagatgatatatctagtgtttttgtggtattggatagaatttccctccacatgttaaatgtagacaaatatactttatcaaattgcatacctataggaatagtttctgtaatcactgcgattgtattatccggattcattttatttgttaaaagaataatcctatatcacttcactctattaaaaatccaagtttctatttctttcatgactgattttttaacttcatccgtttccttatgaagatgatgtttggcaccttcataaatttttatttctctattacaatttgcatgttgcatgaaataatatgcacctaaaacatcgctaatcttattgtttgttccctggagtatgagagtcgggggggtgttaatcttggaaattatttttctaaccttgttggtagccttcaagacctgactagcaaatccagccttaattttttcatgattgactaatgggtcgtattggtatttataaactttatccatatctctagatactgattctggacatagctttccgactggcgcatttggtgtgatggttcccataagtttggcagctagcagattcagtcttgaaacagcatctgcattaactagaggagacattagaatcattgctgtaaacaagtttggattatcgtaagaggctagctcccatggaatgacccaataagtagatttaatagttaccacgtgctgtaccaaagtcatcaatcatcattttttcaccattacttcttccatgtccaatatgatcatgtgagaatactaaaattcctaacgatgatatgttttcagctagttcgtcataacgtccagaatgtttaccagctccatgacttatgaatactaatgccttaggatatgtaataggtttccaatatttacaatatatgtaatcattgtccagattgaacatacagtttgcactcatgattcacgttatataactatcaatattaacagttcgtttgatgatcatattatttttatgttttattgataattgtaaaaacatacaattaaatcaatatagaggaaggagacggctactgtcttttgtaagatagtcatggcgactaaattagattatgaggatgctgttttttactttgtggatgatgataaaatatgtagtcgcgactccatcatcgatctaatagatgaatatattacgtggagaaatcatgttatagtgtttaacaaagatattaccagttgtggaagactgtacaaggaattgatgaagttcgatgatgtcgctatacggtactatggtattgataaaattaatgagattgtcgaagctatgagcgaaggagaccactacatcaattttacaaaagtccatgatcaggaaagtttattcgctaccataggaatatgtgctaaaatcactgaacattggggatacaaaaagatttcagaatctagattccaatcattgggaaacattacagatttgatgaccgacgataatataaacatcttgatactttttctagaaaaaaaattgaattgatgatataggggtcttcataacgcataattattacgttagcattctatatccgtgttaaaaaaaattatcctatcatgtatttgagagttttatatgtagcaaacatgatagctgtgatgccaataagctttagatattcacgcgtgctagtgttagggatggtattatctggtggtgaaatgtccgttatataatctacaaaacaatcatcgcatatagtatgcgatagtagagtaaacatttttatagtttttactggattcatacatcgtctacccaattcggttataaatgaaattgtcgccaatcttacacccaaccccttgttatccattagcatagtattaacttcgttatttatgtcataaactgtaaatgattttgtagatgccatatcatacatgatattcatgtccctattataatcattactaactttatcacaatatatgttgataatatctatatatgatctagtctttgtgggcaactgtctatacaagtcgtctaaacgttgtttactcatatagtatcgaacagccatcattacatggtcccgttccgttgatagataatcgagtatgttagtggacttgtcaaatctatataccatattttctggaagtggatatacatagtcgtgatcaacattattgctagcctcatcttctatatcctgtactataccattatctatatcatctacataatctatgatattattacacataaacatcgacaacatactattgtttattatctaagtcctgttgatccaaacccttgatctcctctatttgtactatctagagattgtacttcttccagttctggataatatatacgttgatagattagctgagctattctatctccagtatttacattaaacgtacattttccattattaataagaatgactcctatgtttcccctataatcttcgtctattacaccacctcctatatcaatgccttttagtgacagaccagacctaggagctattctaccatagcagaacttaggcatggacatactaatatctgtcttaattaactgtctttctcctggagggatagtataatcgtaagcgctatacaaatcatatccggcagcacccggcgattgcctagtaggagatttagctctgttagtttccttaacaaatctaactggtgagttaatattcatgttgaacataaaactaatattttatttcaaaattatttaccatcccatatattccatgaataagtgtgatgattgtacacttctatagtatctatatacgatccacgataaaatcctcctatcaatagcagtttattatccactatgatcaattctggattatccctcggataaataggatcatctatcagagtccatgtattgctggattcacaataaaattccgcatttctaccaaccaagaataaccttctaccgaacactaacgcgcatgatttataatgaggataataagtggatggtccaaactgccactgatcatgattgggtagcaaatattctgtagttgtatcagtttcagaatgtcctcccattacgtatataacattgtttatggatgccactgctggattacatctaggtttcagaagactcggcatattaacccaagcagcatccccgtggaaccaacgctcaacagatgtgggatttggtagacctcctactacgtataatttattgttagcgggtatcccgctagcatacagtctggggctattcatcggaggaattggaatccaattgtttgatatataatttaccgctatagcattgttatgtatttcattgttcatccatccaccgatgagatatactacttctccaacatgagtacttgtacacatatggaatatatctataatttgatccatgttcataggatactctatgaatggatacttgtatgatttgcgtggttgtttatcacaatgaaatattttggtacagtctagtatccattttacattatttatacctctgggagaaagataatttgacctgattacatttttgataaggagtagcagatttcctaatttatttcttcgctttatataccacttaatgacaaaatcaactacataatcctcatctggaacatttagttcatcgctttctagaataagtttcatagatagataatcaaaattgtctatgatgtcatcttccagttccaaaaagtgtttggcaataaagtttttagtatgacataagagattggatagtccgtattctatacccatcatgtaacactcgacacaatattcctttctaaaatctcgtaagataaagtttatacaagtgtagatgataaattctacagaggttaatatagaagcacgtaataaattgacgacgttatgactatctatatatacctttccagtatacgagtaaataactatagaagttaaactgtgaatgtcaaggtctagacaaaccctcgtaactggatctttatttttcgtgtatttttgacgtaaatgtgtgcgaaagtaaggagataactttttcaatatcgtagaattgactattatattgcctcctatggcatcaataattgttttgaatttcttagtcatagacaatgctaatatattcttacagtacacagtattgacaaatatcggcatttatgtttctttaaaagtcaacatctagagaaaaatgattatctttttgagacataactcccattttttggtattcacccacacgtttttcgaaaaaattagtttttccttccaatgatatattttccatgaaatcaaacggattggtaacattataaatttttttaaatcccaattcagaaatcaatctatccgcgacgaattctatatatgttttcatcatttcacaattcattcctataagtttaactggaagagccgcagtaagaaattcttgttcaatggatactgcatctgttataatagatctaacggtttcttcactcggtggatgcaataaatgtttaaacatcaaacatgcgaaatcgcagtgcagaccctcgtctctactaattagttcgttggaaaacgtgagtccgggcattaggccacgctttttaagccaaaatatggaagcgaatgatccggaaaagaagattccttctactgcagcaaaggcaataagtctctctccataaccggcgctgtcatgtatccacttttgagcccaatcggccttcttttttacacaaggcatcgtttctatggcattaaagagatagtttttttcattactatctttaacataagtatcgatcaaaagactatacatttccgaatgaatgttttcaatggccatctgaaatccgtagaaacatctagcctcggtaatctgtacttctgtacaaaatcgttccgccaaattttcattcactattccgtcactggctgcaaaaaacgccaatacatgttttataaaatatttttcgtctggtgttagtttattccaatcattgatatctttagatatatctacttcttccactgtccaaaatgatgcttctgcctttttatacatgttccagatgtcatgatattggattgggaaaataacaaatctatttggatttggtgcaaggatgggttccataactaaattaacaataacaataaattttttttcagttatctatatgcctgtacttggatcttttgtacatcgatatcgccgcaatcactacaataattacaagtattattgatagcattgttattagtactatcataattaaattatctacattcatgggtgctgaataatcgttattatcatcattatcattttgtaattgtgacatcatactagataaatcgtttgcgagattgttgtgggaagcgggcatggaggatgcattatcattattatttaacgccttccattcggattcacaaatgttacgcacattcaacattttatggaaactataattttgtgaaaacaaataacaagaaaactcgtcatcgttcaaatttttaacgatagtaaaccgattaaacgtcgagctaatttctaacgctagcgactctgttggatatgggtttccagatatatatcttttcagttcccctacgtatctataatcatctgtaggaaatggaagatatttccatttatctactgttcctaatatcatatgtggtggtgtagtagaaccattaagcgcgaaagatgttatttcgcatcgtattttaacttcgcaataatttctggttagataacgcactctaccagtcaagtcaatgatattagcctttacagatatattcatagtagtcgtaacgatgactccatcttttagatgcgatactcctttgtatgtaccagaatcttcgtacctcaaactcgatatatttaaacaagttaatgagatattaacgcgttttatgaatgatgatatataaccagaagttttatcctcggtggctagcgctataaccttatcattataataccaactagtgtgattaatatgtgacacgtcagtgtgggtacaaatatgtacattatcgtctacgtcgtattcgatacatccgcatacagccaacaaatataaaatgacaaatactctaacgccgttcgtacccatcttgatgcggtttaataaatgttttgatttcaatttattgtaaaaaaagattcggttttatactgttcgatattctcattgcttatattttcatctatcatctccacacagtcaaatccgtggttagcatgcacctcatcaaccggtaaaagactatcggactcttctatcattataactctagaatatttaatttggtcattattaatcaagtcaattatcttatttttaacaaacgtgagtattttactcattttttataaaaacttttagaaatatacagactctatcgtgtgtctatatcttctttttatatccaatgtatttatgtctgatttttcttcatttatcatatataatggtccaaattctacacgtgcttcggattcatccagatcattaaggttcttataattgtaacatccttctcttccctcttctacatcttccttcttattcttattcttagcgtcacagaatctaccacagcaggatcccatgacgagcgtcatattaaactaatccattttcaattataatatatgattagtaatgaccattaaaataaaaaatattcttcataaccggcaagaaagtgaaaagttcacattgaaactatgtcagtagtatacatcatgaaatgatgatatatatatatactctattttggtggaggattatatgatataattcgtggataatcattcttaagacacatttcttcattcgtaaatcttttcacgttaaatgagtgtccatattttgcaatttcttcatatgatggcggtgtacgtggacgaggctgctcctgttcttgttgtagtcgccgactgtcgtgtctgcgtttagatccctccattatcgcgattgcgtagatggagtactattttataccttgtaattaaatttttttattaattaaacgtataaaaacgttccgtatctgtatttaagagccagatttcgtctaatagaacaaatagctacagtaaaaataactagaataattgctacacccactagaaaccacggatcgtaatacggcaatcggttttcgataataggtggaacgtatattttatttaaggacttaacaattgtctgtaaaccacaatttgcttccgcggatcctgtattaactatctgtaaaagcatatgttgaccgggcggagccgaacattctccgatatctaatttctgtatatctataatattattaacctccgcatacgcattacagttcttttctagcttggataccgcactaggtacatcgtctagatctattcctatttcctcagcgatagctcttctatccttttccggaagcaatgaaatcacttcaataaatgattcaaccatgagtgtgaaactaagtcgagaattactcatgcatttgttagttattcggagcgcgcaatttttaaactgtcctataacctctcctatatgaatagcacaagtgacattagtagggatagaatgttgagctaatttttgtaaataactatctataaaaagattatacaaagttttaaactctttagtttccgccatttatccagtctgagaaaatgtctctcataataaatttttccaagaaactaattgggtgaagaatggaaacctttaatctatatttatcacagtctgttttggtacacatgatgaattcttccaatgccgtactaaattcgatatctttttcgatttctggatatgtttttaataaagtatgaacaaagaaatggaaatcgtaataccagttatgtttaactttgaaattgttttttattttcttgttaatgattccagccacttgggaaaagtcaaagtcgtttaatgccgatttaatacgttcattaaaaacaaactttttatcctttagatgaattattattggttcattggaatcaaaaagtaagatattatcgggtttaagatctgcgtgtaaaaagttgtcgcaacagggtagttcgtagattttaatgtataacagagccatctgtaaaaagataaactttatgtattgtaccaaagatttaaatcctaatttgatagctaactcggtatctactttatctgccgaatacagtgctaggggaaaaattataatgtttcctctttcgtattcgtagttagttctcttttcatgttcgaaaaagtgaaacatgcggttaaaatagtttataacattaatattactgttaataactgccggataaaagtgggatagtaatttcacgaatttgatactgtcctttctctcgttaaacgcctttaaaaaaactttagaagaatatctcaatgagagttcctgaccatccatagtttgtatcaataatagcaacatatgaagaacccgtttatacagagtatgtaaaaatgttaatttatagtttaatcccatggcccacgcacacacgattaattttttttcatctccctttagattgttgtatagaaatttgggtactgtgaactccgccgtagtttccatgggactatataattttgtggcctcgaatacaaattttactacatagttatctatcttaaagactataccatatcctcctgtagatatgtgataaaaatcgtcgtttataggataaaatcgtttatccttttgttggaaaaaggatgaattaatgtaatcattctcttctatctttagtagtgtttccttattaaaattcttaaaataatttaacaatctaactgacggagcccaattttggtgtaaatctaattgggacattatattgttaaaatacaaacagtctcctaatataacagtatctgataatctatggggagacatccattgatattcaggggatgaatcattggcaacacccatttattgtacaaaaagccccaatttacaaacgaaagtccaggtttgatagagacaaactattaactattttgtctctgtttttaacacctccacagtttttaatttctttagtaatgaaattattcacaatatcagtatcttctttatctaccagagattttactaacttgataaccttggctgtctcattcaatagggtagtaatatttgtatgtgtgatattgatatctttttgaattgtttcttttagaagtgattctttgatggtgccagcatacgaattacaataatgcagaaactcggttaacatgcaggaattatagtaagccaattccaattgttgcctgtgttgtattagagtgtcaatatgagcaatggtgtccttgcgtttctctgatagaatgcgagcagcgattttggcgttatcatttgacgatatttctggaatgacgaatcctgtttctactaactttttggtaggacaaagtgaaacaatcaagaagatagcttctcctcctatttgtggaagaaattgaactcctctagatgatctactgacgatagtatctccttgacagatattggaccgaattacagaagtacctggaatgtaaagccctgaaaccccctcattttttaagcagattgttgccgtaaatcctgcactatgcccaagatagagagctcctttggtgaatccatctctatgtttcagtttaaccaagaaacagtcagctggtctaaaatttccatctctatctaatacagcatctaacttgatgtcaggaactatgaccggtttaatgttatatgtaacattgagtaaatccttaagttcataatcatcactgtcatcagttatgtacgatccaaacaatgtttctaccggcatagtggatacgaagatgctatccatcagaatgtttccctgattagtattttctatatagctattcttctttaaacgattttccaaatcagtaactatgttcatttttttaggagtaggacgcctagccagtatggaagaggattttctagatcctctcttcaacatctttgatctcgatggaatgcaaaaccccatagtgaaacaaccaacgataaaaataatattgtttttcactttttataattttaccatctgactcatggattcattaatatctttataagagctactaacgtataattctttataactgaactgagatatatacaccggatctatggtttccataattgagtaaatgaatgctcggcaataactaatggcaaatgtatagaacaacgaaattatactagagttgttaaagttaatattttctatgagctgttccaataaattatttgttgtgactgcgttcaagtcataaatcatcttgatactatccagtaaaccgtttttaagttctggaatattattatcccattgtaaagcccctaattcgactatcgaatatcctgctctgatagcagtttcaatatcgacggacgtcaatactgtaataaaggtggtagtattgtcatcatcgtgataaactactggaatatggtcgttagtaggtacggtaactttacacaacgcgatatataactttccttttgtaccatttttaacgtagttgggacgtcctgcagggtattgttttgaagaaatgatatcgagaacagatttgatacgatatttgttggattcctgattattcactataatataatctagacagatagatgattcgataaatagagaaggtatatcgttggtaggataatacatccccattccagtattctcggatactctattgatgacactagttaagaacatgtcttctattctagaaaacgaaaacatcctacatggactcattaaaacttctaacgctcctgattgtgtctcgaatgcctcgtacaaggatttcaaggatgccatagattctttgaccaacgatttagaattgcgtttagcatctgatttttttattaaatcgaatggtcggctctctggtttgctaccccaatgataacaatagtcttgtaaagataaaccgcaagaaaatttatacgcatccatccaaataaccctagcaccatcggatgatattaatgtattattatagattttccatccacaattattgggccagtatactgttagcaacggtatatcgaatagattactcatgtaacctactagaatgatagttcgtgtactagtcataatatctttaatccaatctaaaaaatttaaaattagattttttacactgttaaagttaacaaaagtattacccgggtacgtggatatcatatatggcattggtccattatcagtaatagctccataaactgatacggcgatggtttttatatgtgtttgatctaacgaggaagaaattcgcgcccacaattcatctctagatatgtatttaatatcaaacggtaacacatcaatttcgggacgcgtatatgtttctaaatttttaatccaaatataatgatgacctatatgccctattatcatactgtcaactatagtacacctagggaacttacgatacatctgtttcctataatcgttaaattttacaaatctataacatgctaaaccttttgacgacagccattcattaatttctgatatggaatctgtattctcgataccgtatcgttctaaagccagtgctatatctccctgttcgtgggaacgctttcgtataatatcgatcaacggataatctgaagtttttggagaataatatgactcatgatctatttcgtccataaacaatctagacataggaattggaggcgatgatcttaattttgtgcaatgagtcgtcaatcctataacttctaatcttgtaatattcatcatcgacataatactatctatgttatcatcgtatattagtataccatgaccttcttcatttcgtgccaaaatgatatacagtcttaaatagttacgcaatatctcaatagtttcataattgttagctgttttcatcaaggtttgtatcctgtttaacatgatggcgttctataacgtctctattttctatttttaattttttaaatttttaacgatttactgtggctagatacccaatctctctcaaatatttttttagcctcgcttacaagctgtttatctatactattaaaactgacgaatccgtgattttggtaatgggttccgtcgaaatttgccgaagtgatatgaacatattcgtcgtcgactatcaacaattttgtattattctgaatagtgaaaaccttcacagatagatcattttgaacacacaacgcatctagacttttggcggttgccatagaatatacgtcgttcttatcccaattaccaactagaagtctgatcttaactcctctattaatggctgcttctataatggagttgtaaatgtcgggccaatagtagctattaccgtcgacacgtgtagtgggaactatggccaaatgttcaatatctatactagtcttagctgacctgagtttatcaataactacatcggtatctagatctctagaatatcccaataggtgttccggagaatcagtaaagaacactccacctataggattcttaatatgatacgcagtgctaactggcaaacaacaagccgcagagcataaattcaaccatgaattttttgcgctattaaaggctttaaaagtatcaaatcttctacgaagatctgtggccagcgggggataatcagaatatacacctaacgttttaatcgtatgtatagatcctccagtaaatgacgcgtttcctacataacatctttcatcatctgacacccaaaaacaaccgagtagtagtcccacattattttttttatctatattaacggttataaaatttatatccgggcagtgactttgtagctctcccagatttcttttccctcgttcatctagcaaaactattattttaatccctttttcagatgcctcttttagtttatcaaaaataagcgctcccctagtcgtactcagaggattacaacaaaaagatgctatgtatatatatttcttagctagagtgataatttcgttaaaacattcaaatgttgttaaatgatcggatctaaaatccatattttctggtagtgtttctaccagcctacattttgctcccgcaggtaccgatgcaaatggccacatttagttaacataaaaacttatacatcctgttctatcaacgattctagaatatcatcggctatatcgctaaaattttcatcaaagtcgacatcacaacctaactcagtcaatatattaagaagttccatgatgtcatcttcgtctatttctatatccgtatccattgtagattgttgaccgattatcgagtttaaatcattactaatactcaatccttcagaatacaatctgtgtttcattgtaaatttataggcggtgtatttaagttggtagattttcaattatgtattaatatagcaacagtagttcttgctcctccttgattctagcatcctcttcattattttcttctacgtacataaacatgtccaatacgttagacaacacaccgacgatggcggccgctacagacacgaatatgactaaaccgatgaccatttaaaaacccctctctagctttcacttaaactgtatcgatcattcttttagcacatgtataatataaaaacattattctatttcgaatttaggcttccaaaaatttttcatccgtaaaccgataataatatatatagacttgttaatagtcggaataaatagattaatgcttaaactatcatcatctccacgattagagatacaatatttacattctttttgctgtttcgaaactttatcaatacacgttaatacaaacccaggaaggagatattgaaactgaggctgttgaaaatgaaacggtgaatacaataattcagataatgtaaaatcatgattccgtattctgatgatattagaactgctaatggatgtcgatggtatgtatctaggagtatctattttaacaaagcatcgatttgctaatatacaattatccttttgattaattgttattttattcatattcttaaaaggtttcatatttatcaattcttctacattaaaaatttccatttttaatttatgtagccccgcaatactcctcattacgtttcattttttgtctataatatccattttgttcatctcggtacatagattatccaattgagaagcgcatttagtagttttgtacattttaagtttattgacgaatcgtcgaaaactagttatagttaacattttattatttgataccctgatattaatacccctgccgttactattatttataactgatgtaatccacgtaacattggaattaactatcgatagtaatgcatcgacgcttccaaaattgtctattataaactcaccgataatttttttattgcatgttttcatattcattaggattatcaaatctttaatcttattacgattgtatgcgttgatattacaagacgtcattctaaaagacggaggatctccatcaaatgccagacaatcacgtacaaagtacatggaaataggttttgttctattgcgcatcatagatttatatagaacacccgtagaaatactaatttgttttactctataaaatactaatgcatctatttcatcgttttgtataacgtctttccaagtgtcaaattccaaatttttttcattgatagtaccaaattcttctatctctttaactacttgcatagataggtaattacagtgatgcctacatgccgttttttgaaactgaatagatgcgtctagaagcgatgctacgctagtcacaatcaccactttcatatttagaatatatatatgtaaaaatatagtagaatttcattttgtttttttctatgctataaatgaattctcattttgcatctgctcatactccgttttatattaataccaaagaaggaagatatctggttctaaaagccgttaaagtatgcgatgttagaactgtagaatgcgaaggaagtaaagcttcctgcgtactcaaagtagataaaccctcatcgcccgcgtgtgagagaagaccttcgtccccgtccagatgcgagagaatgaataaccctggaaaacaagttccgtttatgaggacggacatgctacaaaatatgttcgcggctaatcgcgataatgtagcttctagacttttgtcctaaaatactattatatccttttcgatattaataaatccgtgtcgtccaggttttttatctctttcagtatgtgaatagataggtattttatctctattcatcatcgaatttaagagatccgataaacattgtttgtattctccagatgtcagcatctgatacaacaatatatgtgcacataaacctctggcacttatttcatgtaccttccccttatcactaaggagaatagtatttgagaaatatgtatacatgatattatcatgaattagatatacagaatttgtaacactctcgaaatcacacgatgtgtcggcgttaagatctaatatatcactcgataacacattttcatctagatacactagacattttttaaagctaaaatagtctttagtagtaacagtaactatgcgattattttcatcgatgatacatttcatcggcatattattacgcttaccatcaaagactataccatgtgtatatctaacgtattctagcatagttgccatacgcgcattaaacttttcaggatctttggatagatcttccaatctatctatttgagaaaacatttttatcatgttcaatagttgaaacgtcggatccactatatagatattatctataaagattttaggaactacgttcatggtatcctggcgaatattaaaactatcaatgatatgattatcgttttcatcttttatcaccatatagtttctaagatatgggattttacttaatataatattatttcccgtgataaattttattagaaaggccaaatctataagaaaagtcctagaattagtctgaagaatatctatatcgccgtatagtatatttggattaattagatatagagaatatgatccgtaacatatacaacttttattatggcgtctaagatattcttccatcaacttattaacatttttgactagggaagatacattatgacgtcccattacttttgccttgtctattactgcgacgttcatagaatttagcatatctcttgccaattcttccattgatgttacattataagaaattttagatgaaattacatttggagctttaatagtaagaactcctaatatgtccgtgtatgtggtcactaatacagattgtagttctataatcgtaaataatttacctatattatatgtttgagtctgtttagaaaagtagctaagtatacgatcttttatttctgatgcagatgtatcaacatcggaaaaaaatctttttttattcttttttactaaagatacaaatatgtctttgttaaaaacagttattttctgaatatttctagcttgtaattttaacatatgatattcgttcacactaggtactctgcctaaataggtttctataatctttaatgtaatattaggaaaagtattctgatcaggattcctattcattttgaggatttaaaactctgattattgtctaatatggtctctacgcaaactttttcacagagcgatagagtttttgataactcgtttttcttaagaaatataaaactactgtctccagagctcgctctatcttttattttatctaattcgatacaaactcctgatactggttcagaaagtaattcattaattttcagtcctttatagaagatatttaatatagataatacaaaatcttcagtttttgatatcgatctgattgatcctagaactagatatattaataacgtgctcattaggcagtttatggcagcttgataattagatatagtatattccagttcatatttattagataccgcattgcccagattttgatattctatgaattcctctgaaaataaatccaaaataactagacattctattttttgtggattagtgtactctcttccctctatcatgttcactactggtgtccacgatgataaatatctagagggaatataatatagtccataggatgccaatctagcaatgtcgaataactgtaattttattcttcgctcttcattatgaattgattcttgaggtataaacctaacacaaattatattattagacttttcgtatgtaatgtctttcatgttataagtttttaatcctggaatagaatctattttaatgaggcttttaaacgcagagttctccaacgagtcaaagcataatactctgttgtttttcttatatacgatgttacgattttcttctttgaatggaataggtttttgaattagtttataattacaacataatagataaggaagtgtgcaaatagtacgcggaaaaaacataatagctcccctgttttcatccatggttttaagtaaatgatcactggcttctttagtcaatggatattcgaacattaaccgtttcatcatcattggacagaatccatatttcttaatgtaaagagtgatcaaatcattgtgtttattgtaccatcttgttgtaaatgtgtattcggttatcggatctgctcctttttctattaaagtatcgatgtcaatctcgtctaagaattcaactatatcgacatatttcatttgtatacacataaccattactaacgtagaatgtataggaagagatgtaacgggaacagggtttgttgattcgcaaactattctaatacataattcttctgttaatacgtcttgcacgtaatctattatagatgccaagatatctatataattattttgtaagatgatgttaactatgtgatctatataagtagtgtaataattcatgtattttgatatatgttccaactctgtctttgtgatgtctagtttcgtaatatctatagcatcctcaaaaaatatattcgcatatattcccaagtcttcagttctatcttctaaaaaatcttcaacgtatggaatataataatctattttacctcttctgatatcattaatgatatagtttttgacactatcttctgtcaattgattcttattcactatatctaagaaacggatagcgtccctaggacgaactactgccattaatatctctattatagcttctggacataattcatctattataccagaattaatgggaactattccgtatctatctaacatagttttaagaaagtcagaatctaagacctgatgttcatatattggttcatacatgaaatgatctctattgatgatagtgactatttcattctctgaaaattggtaactcattctatatatgctttccttgttgatgaaggatagaatatactcaatagaatttgtaccaacaaactgttctcttatgaatcgtatatcatcatctgaaataatcatgtaaggcatacatttaacaattagagacttgtctcctgttatcaatatactattcttgtgataatttatgtgtgaggcaaatttgtccacgttctttaattttgttatagtagatatcaaatccaatggagctacagttcttggcttaaacagatatagtttttctggaacaaattctacaacattattataaaggactttgggtagataagtgggatgaaatcctattttaattaatgcgatagccttgtcctcgtgcagatatccaaacgcttttgtgatagtatggcattcattgtctagaaacgctctacgaatatctgtgacagatatcatctttagagaatatactagtcgcgttaatagtactacaatttgtattttttaatctatctcaataaaaaaattaatatgtatgattcaatgtataactaaactactaactgttattgataactagaatcagaatctaatgatgacgtacccaagaagtttatctactgccaatttagctgcattatttttagcatctcgtttagattttccatctgccttatcgaatactcttccgtcgatatctacacaggcataaaatgtaggagagttactaggcccaactgattcaatacgaaaagaccaatctctcttagttatttggcagtactcattaataacggtgacagggttagcatctttccaatcaataatttttttagccggaataacatcatcaaaagacttatgatcctctctcattgatttttcgcgggatacatcatctattatgacgtcagccataacatcagcatccggcttatccgcctccgttgtcataaaccaacgaggaggaatatcgtcggagctgtacaccatagcactacgttgaagatcgtacagagctttattaacttctcgcttctccatattaagttgtctagttagttgtgcagcagtagctccttcgattccaatggttttaatagcctcacacacaatctctgcgttagaacgttcgtcgatatagattttagacatttttagagagaactaacacaaccagcaataaaactgaacctactttatcatttttttattcatcatcctctggtggttcgtcgttcctatcaaatgtagctctgattaacccgtcatctataggtgatgctggttctggagattctggaggagatggattattatctggaagaatctctgttatttccttgttttcatgtatcgattgcgttgtaacattaagattgcgaaatgctctaaatttgggaggcttaaagtgttgtttgcaatctctacacgcgtgtctaactagtggaggttcgtcagctgctctagtttgaatcatcatcggcgtagtattcctacttttacagttaggacacggtgtattgtatttctcgtcgagaacgttaaaataatcgttgtaactcacatcctttattttatctatattgtattctactcctttcttaatgcattttataccgaataagagatagcgaaggaattctttttcggtgccgctagtacccttaatcatatcacatagtgttttatattccaaatttgtggcaatagacggtttatttctatacgatagtttgtttctggaatcctttgagtattctataccaatattattctttgattcgaatttagtttcttcgatattagattttgtattacctatattcttgatgtagtactttgatgatttttccatggcccattctattaagtcttccaagttggcatcatccacatattgtgatagtaattctcggatatcagtagcggctaccgccattgatgtttgttcattggatgagtaactactaatgtatacattttccatttataacacttatgtattaactttgttcatttatattttttcattattatgttgatattaacaaaagtgaatatatatatgttaataattgtattgtggttatacggctacaattttataatgagtgaaagtcagtgtccgatgatcaatgacgatagctttactctgaaaagaaagtatcaaatcgatagtgcggagtcaacaataaaaatggataagaagaggataaagtttcagaatagagccaaaatggtaaaagaaataaatcagacaataagagcagcacaaactcattacgagacattgaaactaggatacataaaatttaagagaatgattaggactactactctagaagatatagcaccatctattccaaataatcagaaaacttataaactattctcggacatttcagccatcggcaaagcatcacagaatccgagtaagatggtatatgctctgctgctttacatgtttcccaatttgtttggagatgatcatagattcattcgttatagaatgcatccaatgagtaaaatcaaacacaagatcttctctcctttcaaacttaatcttattagaatattagtggaagaaagattctataataatgaatgcagatctaataaatggaaaataattggaacacaagttgataaaatgttgatagctgaatctgataaatatacaatagatgcaaggtataacctaaaacccatgtatagaatcaagggagaatctgaagaagataccctcttcatcaaacagatggtagaacaatgtgtgacatcccaggaattggtggaaaaagtgttgaagatactgtttagagatttgttcaagagtggagaatacaaagcgtacagatacgatgatgatgtagaaaatggattcattggattggatacactaaaattaaacattgttcatgatatagttgaaccatgtatgcctgttcgtaggccagtggctaagatactgtgtaaagaaatggtaaataaatactttgagaatccgctacatattattggtaaaaatcttcaagagtgcattgactttgttagtgaataggcatttcatctttctccaatactaattcaaattgttaaattaataatggatagtataaatagttattagttataagatagtaaaaataattattagaataagagtgtagtatcatagataactctcttctataaaaatggattttattcgtagaaagtatcttatatacacagtagaaaataatatagattttttaaaggatgatacattaagtaaagtaaacaattttaccctcaatcatgtactagctctcaagtatctagttagcaattttcctcaacacgttattactaaggatgtattagctaataccaatttttttgttttcatacatatggtacgatgttgtaaagtgtacgaagcggttttacgacacgcatttgatgcacccacgttgtacgttaaagcattgactaagaattatttatcgtttagtaacacaatacaatcgtacaaggaaaccgtgcataaactaacacaagatgaaaaatttttagaggttgccgaatacatggacgaattaggagaacttataggcgtaaattatgacttagttcttaatccattatttcacggaggggaacccatcaaagatatggaaatcatttttttaaaactgtttaagaaaacagacttcaaagttgttaaaaaattaagtgttataagattacttatttgggcatacctaagcaagaaagatacaggcatagagtttgcggataatgatagacaagatatatatactctatttcaacaaactggtagaatcgtccatagcaatctaacagaaacgtttagagattatatctttcccggagataagactagctattgggtgtggttaaacgaaagtatagctaatgatgcggatattgttcttaatagacacgccattaccatgtatgataaaattcttagttatatatactctgagataaaacaaggacgcgttaataaaaacatgcttaagttagtttatatctttgagcctgaaaaagatatcagagaacttctgctagaaatcatatatgatattcctggagatatcctatctattattgatgcaaaaaacgacgattggaaaaaatattttattagtttttataaagctaattttattaacggtaatacatttattagtgatagaacgtttaacgaggacttattcagagttgttgttcaaatagatcccgaatatttcgataatgaacgaattatgtctttattctctacgagtgctgcggacattaaacgatttgatgagttagatattaataacagttatatatctaatataatttatgaggtgaacgatatcacattagatacaatggatgatatgaagaagtgtcaaatctttaacgaggatacgtcgtattatgttaaggaatacaatacatacctgtttttgcacgagtcggatcccatggtcatagagaacggaatactaaagaaactgtcatctataaaatccaagagtagacggctgaacttgtttagcaaaaacattttaaaatattatttagacggacaattggctcgtctaggtcttgtgttagatgattataaaggagacttgttagttaaaatgataaaccatcttaagtctgtggaggatgtatccgcattcgttcgattttctacagataaaaaccctagtattcttccatcgctaatcaaaactattttagctagttataatatttccatcatcgtcttatttcaaaggtttttgagagataatctatatcatgtagaagaattcttggataaaagcatccatctaaccaagacggataagaaatatatacttcaattgataagacacggtagatcatagaacagaccaaatatattattaataatttgtatatacatagatataattatcacacatttttgataaatgggaactgctgcaacaattcagactcccaccaaattaatgaataaagaaaatgcagaaatgattttggaaaaaattgttgatcatatagttatgtatattagtgacgaatcaagtgattcagaaaataatcctgaatatattgattttcgtaacagatacgaagactatagatctctcattataaaaagtgatcacgagtttgtaaagctatgtaaaaatcatgcggagaaaagttctccagaaacgcaacaaatgattatcaaacacatatacgaacaatatcttattccagtatctgaagtactattaaaacctataatgtccatgggtgacataattacatataacggatgtaaagacaatgaatggatgctagaacaactctctaccctaaactttaacaatctccgcacatggaactcatgtagcataggcaatgtaacgcgtctgttttatacattttttagttatctgatgaaagataaactaaatatataagtataatcccattctaatactttaacctgatgtattagcatcttattagaatattaacctaactaaaagacataacataaaaactcattacatagttgataaaaagcggtaggatataaatattatggctgccaccgttccgcgttttgacgacgtgtacaaaaatgcacaaagaagaattctagatcaagaaacattttttagtagaggtctaagtagaccgttaatgaaaaacacatatctatttgataattacgcgtatggatggataccagaaactgcaatttggagtagtagatacgcaaacttagatgcaagtgactattatcccatttcgttgggattacttaaaaagttcgagtttctcatgtctctatataaaggtcctattccagtatacgaagaaaaagtaaatactgaattcattgctaatggatctttctccggtagatacgtatcatatcttagaaagttttctgctcttccaacaaacgagtttattagttttttgttactgacttccattccaatctataatatcttgttctggtttaaaaatactcagtttgatattactaaacacacattattcagatacgtctatacagataatgccaaacacctggcgttggctaggtatatgtatcaaacaggagactataagcctttgtttagtcgtctcaaagagaattatatatttaccggtcccgttccaatatgtatcaaagatatagatcaccctaatcttagtagagcaagaagtccatccgattatgagacattagctaatattagtactatattgtactttaccaagtatgatccggtattaatgtttttattgttttacgtacctgggtattcaattactacaaaaattactccagccgtagaatatctaatggataaactgaatctaacaaagagcgacgtacaactgttgtaaattattttatgcttcgtaaaatgtaggttttgaaccaaacattctttcaaagaatgagatgcataaaactttattatccaatagattgactatttcggacgtcaatcgtttaaagtaaacttcgtaaaatattctttgatcactgccgagtttaaaacttctatcgataattgtttcatatgttttaatatttacaagttttttggtccatggtccattaggacaaatatatgcaaaataatatcgttctccaagttctatagtctctggattatttttattatattcagtaaccaaatacatattagggttatctgcggatttataatttgagtgatgcattcgactcaacataaataattctagaggagacgatctactatcaaattcggatcgtaaatctgtttctaaagaacggagaatatctatacatacctgattagaattcatccgtccttcagacaacatctcagacagtctggtcttgtatgtcttaatcatattcttatgaaacttggaaacatctcttctagtttcactagtacctttattaattctctcaggtacagattttgaattcgacgatgctgagtatttcatcgttgtatatttcttcttcgattgcataatcagattcttatataccgcctcaaactctattttaaaattattaaacaatactctattattaatcagtcgttctaactctttcgctatttctatagacttatctacatcttgactgtctatctctgtaaacacggagtcggtatctccatacacgctacgaaaacgaaatctgtaatctataggcaacgatgttttcacaatcggattaatatctctatcgtccatataaaatggattacttaatggattggcaaaccgtaacataccgttagataactctgctccatttagtaccgattctagatacaagatcattctacgtcctatggatgtgcaactcttagccgaagcgtatgagtatagagcactatttctaaatcccatcagaccatatactgagttggctactatcttgtacgtatattgcatggaatcatagatggccttttcagttgaactggtagcctgttttagcatctttttatatctggctctctctgccaaaaatgttcttaatagtctaggaatggttccttctatcgatctatcgaaaattgctatttcagagatgaggttcggtagtctaggttcacaatgaaccgtaatatatctaggaggtggatatttctgaagcaatagctgattatttatttcttcttccaatctattggtactaacaacgacaccgactaatgtttccggagatagatttccaaagatacacacattaggatacagactgttataatcaaagattaatacattattactaaacattttttgttttggagcaaataccttaccgccttcataaggaaacttttgttttgtttctgatctaactaagatagttttagtttccaacaatagctttaacagtggacccttgatgactgtactcgctctatattcgaataccatggattgaggaagcacatatgttgacgcacccgcgtctgtttttgtttctactccataatactcccacaaatactgacacaaacaagcatcatgaatacagtatctagccatatctaaagctatgtttagattataatccttatacatctgagctaaatcaacgtcatcctttccgaaagataatttatatgtatcattaggtaaagtaggacataatagtacgactttaaatccattttcccaaatatctttacgaattactttacatataatatcctcatcaacagtcacataattacctgtggttaaaacctttgcaaatgcagcggctttgcctttcgcgtctgtagtatcgtcaccgatgaacgtcatttctctaactcctctatttaatactttacccatgcaactgaacgcgttcttggatatagaatccaatttgtacgaatccaatttttcaaatttttgaatgaatgaatatagatcgaaaaatatagttccattattgttattaacgtgaaacgtagtattggccatgccgcctactcccttatgactagactgatttctctcataaatacagagatgtacagcttcctttttgtccggagatctaaagataatcttctctcctgttaataactctagacgattagtaatatatctcagatcaaagttatgtccgttaaaggtaacgacgtagtcgaacgttagttccaacaattgtttagctattcgtaacaaaactatttcagaacatagaactagttctcgttcgtaatccatttccattagtgactgtatcctcaaacatcctctatcgacggcttcttgtatttcctgttccgttaacatctcttcattaatgagcgtaaacaataatcgtttaccacttaaatcgatataacagtaacttgtatgcgagattgggttaataaatacagaaggaaacttcttatcgaagtgacactctatatctagaaataagtacgatcttgggatatcgaatctaggtatttttttagcgaaacagttacgtggatcgtcacaatgataacatccattgttaatctttgtcaaatattgctcgtccaacgagtaacatccgtctggagatatcccgttagaaatataaaaccaactaatattgagaaattcatccatggtggcattttgtatgctgcgtttctttggctcttctatcaaccacatatctgcgacggagcattttctatctttaatatctagattataacttattgtctcgtcaatgtctatagttctcatctttcccaacggcctcgcattaaatggaggaggagacaatgactgatatatttcgtccgtcactacgtaataaaagtaatgaggaaatcgtataaatacggtctcaccatttcgacatctggatttcagatataaaaatctgttttcaccgtgactttcaaaccaattaatgcaccgaacatccatttatagaatttagaaatatattttcatttaaatgaatcccaaacattggggaagagccgtatggaccattatttttatagtactttcgcaagcgggtttagacggcaacatagaagcgtgtaaacgaaaactatatactatagttagcactcttccatgtcctgcatgtagacggcacgcgactatcgctatagaggacaataatgtcatgtctagcgatgatctgaattatatttattattttttcatcagattatttaacaatttggcatctgatcccaaatacgcgatcgatgtgacaaaggttaaccctttataaacttaacccattataaaacttatgattagtcacaactgaaataaccgcgtgattattttttggtataattctacacggcatggtttctgtgactatgaattcaacccccgttacattagtgaaatctttaacaaacagcaagggttcgtcaaagacataaaactcattgtttacaatcgaaatagaccccctatcacacttaaaataaaaaatatccttatcctttaccaccaaataaaattctgattggtcaatgtgaatgtattcacttaacagttccacaaatttatttattaactccgaggcacatacatcgtcggtattttttatggcaaactttactcttccagcatccgtttctaaaaaaatattaacgagttccatttatatcatccaatattattgaaatgacgttgatggacagatgatacaaataagaaggtacggtacctttgtccaccatctcctccaattcatgctctattttgtcattaactttaatgtatgaaaacagtacgccacatgcttccatgacagtgtgtaacactttggatacaaaatgtttgacattagtataattgttcaagactgtcaatctataatagatagtagctataatatattctatgatggtattgaagaagatgacaaccttggcatattgatcatttaacacagacatggtatcaacagatagcttgaatgaaagagaatcagtaattggaataagcgtcttctcgatagagtgtccgtataccaacatgtctgatattttgatgtattccattaaattatttagttttttctttttattctcgttaaacagcatttctgtcaacggaccccaacatcgttgaccgattaagttttgattgatttttccgtgtaaggcgtatctagtcagatcgtatagcctatccaataatccatcatctgtgcgtagatcacatcgtacactttttaattctctatagaagagcgacagacatctggagcaattacagacagcaatttctttattctctacagatgtaagatacttgaagacattcctatgatgatgcagaattttggataacacggtattgatggtatctgttaccataattcctttgatggctgatagtgtcagagcacaagatttccaatctttgacaatttttagcaccattatctttgttttgatatctatatcagacagcatggtgcgtctgacaacacagggattaagacggaaagatgaaatgattctctcaacatcttcaatagataccttgctattttttctggcattatctatatgtgcgagaatatcctctagagaatcagtatcctttttgatgatagtggatctcaatgacatgggacgtttaaaccttcttattctatcaccagattgcatggtgatttgtcttctttcttttatcataatgtaatctctaaattcatcggcaaattgtctatatctaaaatcataatatgagatgtttacctctacaaatatctgttcgtccaatgttagagtatttacatcagttttgtattccaaattaaacatggcaacggatttaattttatattcctctattaagtcctcgtcgataataacagaatgtagataatcatttaatccatcgtacatggttggaagatgcttgttgacaaaatctttaattgtcttgatgaaggtgggactatatctaacatcttgattaataaaatttataacattgtccataggatactttgtaactagttttatacacatctcttcatcggtaagtttagacagaatatcgtgaacaggtggtatattatattcatcagatatacgaagaacaatgtccaaatctatattgtttaatatattatatagatgtagcgtagctcctacaggaatatctttaactaagtcaatgatttcatcaaccgttagatctattttaaagttaatcatataggcattgatttttaaaaggtatgtagccttgactacattctcattaattaaccattccaagtcactgtgtgtaagaagattatattctatcataagcttgactacatttggtcccgataccattaaagaattcttatgatataaggaaacagcttttaggtactcatctactctacaagaattttggagagccttaacgatatcagtgacgtttattatttcaggaggaaaaaacctaacattgagaatatcggaattaatagcttccagatacagtgattttggcaatagtccgtgtaatccataatccagtaacacgagctggtgcttgctagacaccttttcaatgtttaatttttttgaaataagctttgataaagccttcctcgcaaattccggatacatgaacatgtcggcgacatgattaagtattgttttttcattatttttatattttctcaacaagttctcaataccccaatagatgatagaatatcacccaatgcgtccatgttgtctatttccaacaggtcgctatatccaccaatagaagtttttccaaaaaagattctaggaacagttctaccaccagtaatttgttcaaaataatcccgcaattcattttcgggtttaaattctttaatatcgacaatttcatacgctcctcttttgaaactaaacttatttagaatatccagtgcatttctacaaaaaggacatgtatacttgacaaaaattgtcactttgttattggccaacctttgttgtacaaattcctcggccattttaatatttaagtgatataaaactatctcgacttatttaactctttagtcgagatatatggacgcagatagctatatgatagccaactacagaaggcaaacgctataaaaaacataattacgacgagcatatttataaatatttttattcagcattacttgatatagtaatattaggcacagtcaaacattcaaccactctcgatacattaactctctcattttctttaacaaattctgcaatatcttcgtaaaaagattcttgaaactttttagaatatctatcgactctagatgaaatagcgttcgtcaacatactatgttttgtatacataaaggcgcccattttaacagtttctagtgacaaaatgctagcgatcctaggatcctttagaatcacatagattgacgattcgtctctcttagtaactctagtaaaataatcatacaatctagtacgcgaaataatattatccttgacttgaggagatctaaacaatctagttttgagaacatcgataagttcatcgggaatgacatacatactatctttaatagaactcttttcatccagttgaatggattcgtccttaaccaactgattaatgagatcttctattttatcattttccagatgatatgtatgtccattaaagttaaattgtgtagcgcttctttttagtctagcagccaatactttaacatcactaatatcgatatacaaaggagatgatttatctatggtattaagaattcgtttttcgacatccgtcaaaaccaattcctttttgcctgtatcatccagttttccatcctttgtaaagaaattattttctactagactattaataagactgataaggattcctccataattgcacaatccaaactttttcacaaaactagactttacaagatctacaggaatgcgtacttcaggttttttagcttgtgattttttcttttgcggacattttcttgtgaccaactcatctaccatttcattgattttagcagtgaaataagctttcaatgcacgggcactgatactattgaaaacgagttgatcttcaaattccgccatttaagttcaccaaacaacttttaaatacaaatatatcaatagtagtagaataagaactataaaaaaaataataattaaccaataccaaccccaacaaccggtattattagttgatgtgactgttttctcatcacttagaacagatttaacaatttctataaagtctgtcaaatcatcttccggagaccccataaatacaccaaatatagcggcgtacaacttatccatttatacattgaatattggcttttctttatcgctatcttcatcatattcatcatcaatatcaacaagtcccagattacgagccagatcttcttctacattttcagtcattgatacacgttcactatctccagagagtccgataacgttagccaccacttctctatcaatgattagtttcttgagcgcgaaagtaatttttgtttccgttccggatctatagaagacgataggtgtgataattgccttggccaattgtctttctcttttactgagtgattctagttcaccttctatagatctgagaatggatgattctccagtcgaaacatattctaccatggatccgtttaatttgttgatgaagatggattcatccttaaatgttttctctgtaatagtttccaccgaaagactatgcaaagaatttggaatgcgttccttgtgcttaatgtttccatagacggcttctagaagttgatacaacataggactagccgcggtaacttttatttttagaaagtatccatcgcttctatcttgtttagatttatttttataaagtttagtctctccttccaacataataaaagtggaagtcatttgactagataaactatcagtaagttttatagagatagacgaacaattagcgtattgagaagcatttagtgtaacgtattcgatacattttgcattagatttactaatcgattttgcatactctataacacccgcacaagtctgtagagaatcgctagatgcagtaggtcttggtgaagtttcaactctcttcttgattaccttactcatgattaaacctaaataattgtactttgtaatataatgatatatattttcactttatctcatttgagaataaaaatgtttttgtttaaccactgcatgatgtacagatttcggaatcgcaaaccaccagtggttttattttatccttgtccaatgtgaattgaatgggagcggatgcgggtttcgtacgtagatagtacattcccgtttttagaccgagactccatccgtaaaaatgcatactcgttagtttggaataactcggatctgctatatggatattcatagattgactttgatcgatgaaggctcccctgtctgcagccatttttatgatcgtcttttgtggaatttcccaaatagttttataaactcgcttaatatcttctggaaggtttgtattctgaatggatccaccatctgccataatcctattcttgatctcatcattccataattttctctcggttaaaactctaaggagatgcggattaactacttgaaattctccagacaatactctccgagtgtaaatattactggtatacggttccaccgactcattatttcccaaaatttgagcagttgatgcagtcggcataggtgccaccaataaactatttctaagaccgtatgttctgattttatcttttagaggttcccaattccaaagatccgacggtacaacattccaaagatcatattgtagaataccgttactggcgtacgatcctacatatgtatcgtatggtccttccttctcagctagttcacaactcgcctctaatgcaccgtaataaatggtttcgaagatcttcttatttagatcttgtgcttccaggctatcaaatggataatttaagagaataaacgcgtccgctaatccttgaacaccaataccgataggtctatgtctcttattagagatttcagcttctggaataggataataattaatatctataattttattgagatttctgacaattactttgaccacatccttcagtttgagaaaatcaaatcgcccatctattacaaacatgttcaaggcaacagatgccagattacaaacggctacctcattagcatccgcatattgtattatctcagtgcaaagattactacacttgatagttcctaaattttgttgattactctttttgttacacgcatccttataaagaatgaatggagtaccagtttcaatctgagattctataatcgctttccagacgactcgagcctttattatagatttgtatctcctttctctttcgtatagtgtatacaatcgttcgaactcgtctccccaaacattgtccaatccaggacattcatccggacacatcaacgaccactctccgtcatccttcactcgtttcataaagagatcaggaatccaaagagctataaatagatctctggttctatgttcctcgtttcctgtattctttttaagatcgaggaacgccataatatcagaatgccacggttccaagtatatggccataactccaggccgtttgtttcctccctgatctatgtatctagcggtgttattataaactctcaacattggaataataccgtttgatataccattggtaccggagatatagcttccactggcacgaatattactaattgatagacctattccccctgccattttagagattaatgcgcatcgttttaacgtgtcatagataccctctatgctatcatcgatcatgttaagtagaaaacagctagacatttggtgacgactagttcccgcattaaataaggtaggagaagcgtgcgtaaaccatttttcagaaagtagattgtacgtctcaatagctgagtctatatcccattgatgaattcctactgcgacacgcattaacatgtgctgaggtctttcaacgatcttgttgtttattttcaacaagtaggatttttccaaagttttaaaaccaaaatagttgtatgaaaagtctcgttcgtaaataataaccgagttgagtttatccttatatttgttaactatatccatggtgatacttgaaataatcggagaatgtttcccatttttaggattaacatagttgaataaatcctccatcacttcactaaatagtttttttgtttccttgtgtagatttgatacggctattctggcggctagaatggcataatccggatgttgtgtagtacaagtggctgctatttcggctgccagagtgtccaattctaccgttgttactccattatatattccttgaataaccttcatagctattttaataggatctatatgatccgtgtttaagccataacataattttctaatacgagacgtgattttatcaaacatgacattttccttgtatccatttcgtttaatgacaaacatttttgttggtgtaataaaaaaattatttaacttttcattaatagggatttgacgtatgtagcgtacaaaatgatcgttcctggtatatagataaagagtcctatatatttgaaaatcgttacggctcgattaaactttaatgattgcatagtgaatatatcattaggatttaactccttgactatcatggcggcgccagaaattaccatcaaaagcattaatacagttatgccgatcgcagttaaaacggttatagcatccaccatttatatctaaaaattagatcaaagaatatgtgacaaagtcctagttgtatactgagaattgacgaaacaatgtttcttacatatttttttcttattagtaactgacttaatagtaggaactggaaagctagacttgattattctataagtatagatacccttccagataatgttctctttgataaaagttccagaaaatgtagaattttttaaaaagttatcttttgctattaccaagattgtgtttagacgcttattattaatatgagtgatgaaatccacaccgcctctagatatcgcctttatttccacattagatggtaaatccaatagtgaaactatctttttaggaatgtatggactcgcgtttagaggagtgaacgtcttgggcgtcggaaaggatgattcgtcaaacgaataaacaatttcacaaatggatgttaatgtattagtaggaaattttttgacgctagtggaattgaagattctaatggatgatgttctacctatttcatccgataacatgttaatttccgacaccaacggttttaatatttcgatgatatacggtagtctctctttcggacttatatagcttattccacaatacgagtcattatatactccaaaaaacaaaataactagtataaaatctgtatcgaatgggaaaaacgaaattatcgacataggtatagaatccggaacattgaacgtattaatacttaattctttttctgtggtaagtaccgataggttattgacattgtatggttttaaatattctataacttgagacttgatagatattagtgatgaattgaaaattatttttatcaccacgtgtgtttcaggatcatcgtcgacgcccgtcaaccaaccgaatggagtaaaataaatatcattaatatatgctctagatattagtatttttattaatcctttgattatcatcttctcgtaggcgaatgattccatgatcaagagtgatttgagaacatcctccggagtattaatgggcttagtaaacagtccatcgttgcaataataaaagttatccaagttaaaggatattatgcattcgtttaaagatatcacctcatctgacggagacaattttttggtaggttttagagactttgaagctacttgtttaacaaagttattcatcgtcgtctactattctatttaattttgtagttaatttatcacatatcacattaattgactttttggtccatttttccatacgtttatattcttttaatcctgcgttatccgtttccgttatatccagggatagatcttgcaagttaaatagaatgctcttaaataatgtcattttcttatccgctaaaaatttaaagaatgtataaacctttttcagagatttgaaactcttaggtggtgtcctagtacacaatatcataaacaaactaataaacattccacattcagattccaacagctgattaacttccacattaatacagcctattttcgctccaaatgtacattcgaaaaatctgaataaaacatcgatgtcacaatttgtattatccaatacagaatgtttgtgattcgtgttaaaaccatcggagaaggaatagaaataaaaattattatagtggtggaattcagttggaatattgcctccggagtcataaaaggatactaaacattgttttttatcataaattacacatttccaatgagacaaataacaaaatccaaacattacaaatctagaggtagaacttttaattttgtctttaagtatatacgataagatatgtttattcataaacgcgtcaaatttttcatgaatcgctaaggagtttaagaatctcatgtcaaattgtcctatataatccacttcggatccataagcaaactgagagactaagttcttaatacttcgattgctcatccaggctcctctctcaggctctattttcatcttgacgacctttggattttcaccagtatgtattcctttacgtgataaatcatcgattttcaaatccatttgtgagaagtctatcgccttagatactttttcccgtagtcgaggtttaaaaaaatacgctaacggtatactagtaggtaactcaaagacatcatatatagaatggtaacgcgtctttaactcgtcggttaactctttcttttgatcgagttcgtcgctactattgggtctgctcaggtgccccgactctactagttccaacatcataccgataggaatacaagacactttgccggcggttgtagatttatcatatttttccactacatatccgttacaatttgttaaaaatttagatacatctatattgctacataatccagctagtgaatatatatgacataataaattggtaaatcctagttctggtattttactaattactaaatctgtatatctttccatttatcatggaaaagaatttaccagatatcttcttttttccaaactgcgttaatgtattctcttacaaatattcacaagatgaattcagtaatatgagtaaaacggaacgtgatagtttctcattggccgtgtttccagttataaaacatagatggcataacgcacacgttgtaaaacataaaggaatatacaaagttagtacagaagcacgtggaaaaaaagtatctcctccatcactaggaaaacccgcacacataaacctaaccgcgaagcaatatatatacagtgaacacacaataagctttgaatgttatagttttctaaaatgtataacaaatacagaaatcaattcgttcgatgagtatatattaagaggactattagaagctggtaatagtttacagatattttccaattccgtaggtaaacgaacagatactataggtgtactagggaataagtatccatttagcaaaattccattggcctcattaactcctaaagcacaacgagagatattttcagcgtggatttctcatagacctgtagttttaactggaggaactggagtgggtaagacgtcacaggtacccaagttattgctttggtttaattatttatttggtggattctctactctagataaaatcactgactttcacgaaagaccagtcattctatctcttcctaggatagctttagttagattgcatagcaataccattttaaaatcattgggatttaaggtactagatggatctcctatttctttacggtacggatctataccggaagaattaataaacaaacaaccaaaaaaatatggaattgtattttctacccataagttatctctaacaaaactatttagttatggcactcttattatagacgaagttcatgagcatgatcaaataggagatattattatagcagtagcgagaaagcatcatacgaaaatagattctatgtttttaatgactgccacattagaggatgaccgagaacggctaaaagtatttttacctaatcccgcatttatacatattcctggagatacactgtttaaaattagcgaggtatttattcataataagataaatccatcttccagaatggcatacatagaagaagaaaagagaaatttagttactgctatacagatgtatactcctcctgatggatcatccggtatagtctttgtggcatccgttgcacagtgtcacgaatataaatcatatttagaaaaaagattaccgtatgatatgtatattattcatggtaaggtcttagatatagacgaaatattagaaaaagtgtattcatcacctaatgtatcgataattatttctactccttatttggaatccagcgttactatacgcaatgttacacacatttatgatatgggtagagtttttgtccccgctccttttggaggatcgcaacaatttatttctaaatctatgagagatcaacgaaaaggaagagtaggaagagttaatcctgggacatacgtctatttctatgatctgtcttatatgaagtctatacagcgaatagattcagaatttctacataattatatattgtacgctaataagtttaatctaacactccccgaagatttgtttataatccctacaaatttggatattctatggcgtacaaaggaatatatagactcgttcgatattagtacagaaacatggaataaattattatccaattattatatgaagatgatagagtatgctaaactttatgtactaagtcctattctcgctgaggagttggataactttgagaggacgggagaattaactagtattgtacgagaagccattttatctctaaatttacgaattaagattttaaattttaaacataaagatgatgatacgtatatacacttttgtaaaatattattcggtgtctataacggaacaaacgctactatatattatcatagacctctaacgggatatatgaatatgatttcagatactatatttgttcctgtagataataactaaaaatcaaactctaatgaccacatctttttttagagatgaaaaattttccacatctccttttgtagacacgactaaacattttgcagaaaaaagtttattagtgtttagataatcgtatacttcatcagtgtagatagtaaatgtgaacagataaaaggtattcttgctcaatagattggtaaattccatagaatatattaatcctttcttcttgagatcccacatcatttcaaccagagacgttttatccaatgatttacctcgtactataccacatacaaaactagattttgcagtgacgtcgtacctggtattcctaccaaacaaaattttacttttagttcttttagaaaattctaaggtagaatctctatttgccaatatgtcatctatggaattaccactagcaaaaaatgatagaaatatatattgatacatcgcagctggttttgatctactatactttaaaaacgaatcagattccataattgcctgtatatcatcagctgaaaaactatgttttacacgtattccttcggcatttctttttaatgatatatcttgtttagacaatgataaagttatcatgtccatgagagacgcgtctccgtatcgtataaatatttcattagatgttagacgcttcattaggggtatacttctataaggtttcttaatcagtccatcattggttgcgtcaagaactactatcggatgttgttgggtatctctagtgttacacatggccttactaaagtttgggtaaataactatgatatctctattaattatagatgcatatatttcattcgtcaaggatattagtatcgacttgctatcgtcattaatacgtgtaatgtaatcatataaatcatgcgatagccaaggaaaatttaaatagatgttcatcatataatcgtcgctataattcatattaatacgttgacattgactaatttgtaatatagcctcgccacgaagaaagctctcgtattcagtttcatcgataaaggataccgttaaatataactggttgccgatagtctcatagtctattaagtggtaagtttcgtacaaatacagaatccctaaaatattatctaatgttggattaatctttaccataactgtataaaatggagacggagtcataactattttaccgtttgtacttactggaatagatgaaggaataatctccggacatgctggtaaagacccaaatgtctgtttgaagaaatccaatgttccaggtcctaatctcttaacaaaaattacgatattcgatcccgatatcctttgcattctatttaccagcatatcacgaactatattaagattatctatcatgtctattctcccaccgttatataaatcgcctccgctaagaaacgttagtatatccatacaatggaatacttcatttctaaaatagtattcgttttctaattctttaatgtgaaatcgtatactagaaagggaaaaattatctttgagttttccgttagaaaagaaccacgaaactaatgttctgattgcgtccgattccgttgctgaattaatggatttacaccaaaaactcatataacttctagatgtagaagcattcgctaaaaaattagtagaatcaaaggatataagtagatgttccaacaagtgagcaattcccaagatttcatctatatcattctcgaatccgaaattagaaattcccaagtagatatcctttttcatccgatcgttgatgaaaatacgaactttattcggtaagacaatcatttactaaggagtaaaataggaagtaatgttcgtatgtcgttatcatcgtataaattaaaggtgtgttttttaccattaagtgacattataattttaccaatattggaattataatataggtgtatttgcgcactcgcgacggttgatgcatcggtaaatatagctgtatctaatgttctagtcggtatttcatcatttcgctgtctaataatagcgttttctctatctgtttccattacagctgcctgaagtttattggtcggataatatgtaaaataataagaaatacatacgaataacaaaaataaaataagatataataaagatgccatttagagatctaattttgttcaacttgtccaaattcctacttacagaagatgaggaatcgttggagatagtgtcttccttatgtagaggatttgaaatatcttatgatgacttgataacttactttccagataggaaataccataaatatatttataaagtatttgaacatgtagatttatcggaggaattaagtatggaattccatgatacaactctgagagatttagtctatcttagattgtacaagtattccaagtgtatacggccgtgttataaattaggagataatctaaaaggcatagttgttataaaggacaggaatatttatattagggaagcaaatgatgacttgatagaatatctcctcaaggaatacactcctcagatttatacatattctaatgagcgcgtccccataactggttcaaaattaattctttgtggattttctcaagttacatttatggcgtatacaacgtcgcatataacaacaaataaaaaggtagatgttctcgtttccaaaaaatgtatagatgaactagtcgatccaataaattatcaaatacttcaaaatttatttgataaaggaagcggaacaataaacaaaatactcaggaagatattttattcggtaacaggtggccaaactccataatttgctttttctatttcggattttagaatttccaaattcaccagcgatttatcggttttggtgaaatccaaggatttattaatgtccacaaatgccatttgttttgtctgtggattgtatttgaaaatggaaacgatgtagttagatagatgcgctgcaaagtttcctattagggttccgcgctttacgtcacccagcatacttgaatcaccatcctttaaaaaaaatgataagatatcaacatggagtatatcatactcggattttaattcttctactgcatcactgacattttcacaaatactacaatacggtttaccgaaaataatcagtacgttcttcatttatgggtatcaaaaacttaaaatcgttactgctggaaaataaatcactgacgatattagatgataatttatacaaagtatacaatggaatatttgtggatacaatgagtatttatatagccgtcgccaattgtgtcagaaacttagaagagttaactacggtattcataaaatacgtaaacggatgggtaaaaaagggagggcatgtaaccctttttatcgatagaggaagtataaaaattaaacaagacgttagagacaagagacgtaaatattctaaattaaccaaggacagaaaaatgttagaattagaaaagtgtacatccgaaatacaaaatgttaccggatttatggaagaagaaataaaggcagaaatgcaattaaaaatcgataaactcacatttcaaatatatttatctgattctgataacataaaaatatcattgaatgagatactaacacatttcaacaataatgagaatgttacattattttattgtgatgaacgagacgcagaattcgttatgtgtctcgaggctaaaacacatttctctaccacaggagaatggccgttgataataagtaccgatcaggatactatgctatttgcatctgctgataatcatcctaagatgataaaaaacttaactcaactgtttaaatttgttccctcggcagaggataactatttagcaaaattaacggcgttagtgaatggatgtgatttctttcctggactctatggggcatctataacacccaccaacttaaacaaaatacaattgtttagtgattttacaatcgataatatagtcactagtttggcaattaaaaattattatagaaagactaactctaccgtagacgtgcgtaatattgttacgtttataaacgattacgctaatttagacgatgtctactcgtatattcctccttgtcaatgcactgttcaagaatttatattttccgcattagatgaaaaatggaatgaatttaaatcatcttatttagagaccgttccgttaccctgtcaattaatgtacgcgttagaaccacgtaaggagattgatgtttcagaagttaaaactttatcatcttatatagatttcgaaaatactaaatcagatatcgatgttataaaatctatatcctcgatcttcggatattctaacgaaaactgtaacacgatagtattcggcatctataaggataatttactactgagtataaataattcattttactttaacgatagtctgttaataaccaatactaaaagtgataatataataaatataggttactagattaaaaatggtgttccaactcgtgtgctctacgtgcggcaaagatatttctcacgaacgatataaattgattatacgaaaaaaatcattaaaggatgtactcgtcagtgtaaagaacgaatgttgtaggttaaaattatctacacaaatagaacctcaacgtaacttaacagtgcaacctctattggatataaactaatatggatccggttaattttattaagacatatgcgcctagaggttctattatttttattaattataccatgtcattaacaagtcatttgaatccatcgatagaaaaacatgtgggtatttattatggtacgttattatcggaacacttggtagttgaatctacctatagaaaaggagttcgaatagtcccattggatagtttttttgaaggatatcttagtgcaaaagtatacatgttagagaatattcaagttatgaaaatagcagctgatacgtcattaactttattgggtattccgtatggatttggtcataatagaatgtattgttttaaattggtagctgaatgttataaaaatgccggtgttgaaacatcgtctaaacgaatattgggtaaaaatatttttctgagccaaaacttcacagacgataatagatggataaagatatatgattctaataatttaacattttggcaaattgattaccttaaagggtgagttaatatgcataactactcctccgttgttttttccctcgttctttttcttaacgttgtttgccatcactctcataatgtaaagatattctaaaatggtaaacttttgcatatcggacgcagaaattggtataaatgttgtaattgtattatttcccgtcaatggactagtcacagctccatcagttttatatcctttagagtatttctcactcgtgtctaacattctagagcattccatgatctgtttatcgttgatattggccggaaagatagattttttattttttattatattactattggcaattgtagatataacttctggtaaatatttttctaccttttcaatctcttctattttcaagccggctatatattctgctatattgttgctagtatcaataccttttcttgctaagaagtcatatgtggtattcactatatcagttttaactggtagttccattagcctttccacttctgcagaataatcagaaattggttctttaccagaaaatccagctactataataggctcaccgatgatcattggcaaaatcctatattgtaccagattaatgagagcatatttcatttccaataattctgctagttcttgagacattgatttatttgatgaatctagttggttctctagatactctaccatttctgccgcatacaataacttgttagataaaatcagggttatcaaagtgtttagcgtggctagaatagtgggcttgcatgtattaaagaatgcggtagtatgagtaaaccgttttaacgaattatatagtctccagaaatctgtggcgttacatacatgagccgaatgacatcgaagattgtccaatatttttaatagctgctctttgtccattatttctatatttgactcgcaacaattgtagataccattaatcaccgattcctttttcgatgctggacaatagcacaattgtttagctttggactctatgtattcagaattaatagatatatctctcaatacagattgcactatacattttgaaactatgtcaaaaattgtagaacgacgctgttctgcagccatttaactttaaataatttacaaaaatttaaaatgagcatccgtataaaaatcgataaactgcgccaaattgtggcatatttttcagagttcagtgaagaagtgtctataaatgtagactcgacggatgagttaatgtatatttttgccgccttgggcggatctgtaaacatttgggcaattatacctctaagtgcatcagtgttttaccgaggagccgaaaatattgtgtttaatcttcctgtgtccaaggtaaaatcgtgtttgtgtagttttcacaatgatgccatcatagatatagaacctgatctggaaaataatctagtaaaactttctagttatcatgtagtaagtgtcgattgtaacaaggaactgatgcctattaggacagatactactatttgtctaagtatagatcaaaagaaatcttacgtgtttaattttcacaagtatgaagaaaaatgttgtggtagaaccgtcattcatctagaatggttgttgggctttatcaagtgtattagtcagcatcagcatctggctattatgtttaaagatgacaatattattatgaagactcctggtaatactgatgcgttttccagggaatattctatgactgaatgttctcaagaactacaaaagttttctttcaaaatagctatctcgtctctcaacaaactacgaggattcaaaaagagagtcaatgtttttgaaactagaatcgtaatggataatgacgataacattttaggaatgttgttttcggatagagttcaatcctttaagatcaacatctttatggcgtttttagattaatactttcaatgagataaatatgggtggcggagtaagtgttgagctccctaaacgggatccgcctccgggagtacccactgatgagatgttattaaacgtggataaaatgcatgacgtgatagctcccgctaagcttttagaatatgtgcatataggaccactagcaaaagataaagaggataaagtaaagaaaagatatccagagtttagattagtcaacacaggacccggtggtctttcggcattgttaagacaatcgtataatggaaccgcacccaattgctgtcgcacttttaatcgtactcattattggaagaaggatggaaagatatcagataagtatgaagagggtgcagtattagaatcgtgttggccagacgttcacgacactggaaaatgcgatgttgatttattcgactggtgtcagggggatacgttcgatagaaacatatgccatcagtggatcggttcagcctttaataggagtaatagaactgtagagggtcaacaatcgttaataaatctgtataataagatgcaaacattatgtagtaaagatgctagtgtaccaatatgcgaatcatttttgcattatttacgcgcacacaatacagaagatagcaaagagatgatcgattatattctaagacaacagtctgcggactttaaacagaaatatatgagatgtagttatcccactagagataagttagaagagtcattaaaatatgcggaacctcgagaatgttgggatccagagtgttcgaatgccaatgttaatttcttactaacacgtaattataataatttaggactttgcaatattgtacgatgtaataccagcgtgaacaacttacagatggataaaacttcctcattaagattgtcatgtggattaagcaatagtgatagattttctactgttcccgtcaatagagcaaaagtagttcaacataatattaaacactcgttcgacctaaaattgcatttgatcagtttattatctctcttggtaatatggatactaattgtagctatttaaatgggtgccgcggcaagcatacagacgacggtgaatacactcagcgaacgtatctcgtctaaattagaacaagaagcgaacgctagtgctcaaacaaaatgtgatatagaaatcggaaatttttatatccgacaaaaccatggatgtaacctcactgttaaaaatatgtgctctgcggacgcggatgctcagttggatgctgtgttatcagccgctacagaaacatatagtggattaacaccggaacaaaaagcatacgtgccagctatgtttactgctgcgttaaacattcagacgagtgtaaacactgttgttagagattttgaaaattatgtgaaacagacttgtaattctagcgcggtcgtcgataacaaattaaagatacaaaacgtaatcatagatgaatgttacggagccccaggatctccaacaaatttggaatttattaatacaggatctagcaaaggaaattgtgccattaaagcgttgatgcaattgacgactaaggccactactcaaatagcacctagacaagttgctggtacaggagttcagttttatatgattgttatcggtgttataatattggcagcgttgtttatgtactatgccaagcgtatgttgttcacatccaccaatgataaaatcaaacttattttagccaataaggaaaacgtccattggactacttacatggacacattctttagaacttctccgatggttattgctaccacggatatgcaaaactgaaaatatattgataatattttaatagattaacatggaagttatcgctgatcgtctagacgatatagtgaaacaaaatatagcggatgaaaaatttgtagattttgttatacacggtctagagcatcaatgtcctgctatacttcgaccattaattaggttgtttattgatatactattatttgttatagtaatttatatttttacggtacgtctagtaagtagaaattatcaaatgttgttggtggtgctagtcatcacattaactattttttattactttatactataatagtactagactgacttctaacaaacatctcacctgccataaataaatgcttgatattaaagtcttctatttctaacactattccatctgtggaaaataatactctgacattatcgctaattgacacatcggtgagtgatatgcctataaagtaataatcttctttgggcacatataccagtgtaccaggttctaacaacctatttactggtgctcctgtagcatactttttctttaccttgagaatatccatcgtttgcttggtcaatagcgatatgtgattttttatcaaccactcaaaaaagtaattggagtgttcatatcctctacgggctattgtctcatggccgtgtatgaaatttaagtaacacgactgtggtagatttgttctatagagccgattgccgcaaatagatagaactaccaatatgtctgtacaaatgttaaacattaattgattaacagaaaaaacaatgttcgttctgggaatagaaaccagatcaaaacaaaattcgttagaatatatgccacgtttatacatggaatataaaataactacagtttgaaaaataacagtatcatttaaacatttaacttgcggggttaatctcacaactttactgtttttgaactgttcaaaatatagcatcgatccgtgagaaatacgtttagccgcctttaatagaggaaatcccaccgcctttctggatctcaccaacgacgatagttctgaccagcaactcatttcttcatcatccacctgttttaacatataataggcaggagatagatatccgtcattgcaatattccttctcgtaggcacacaatctaatattgataaaatctccattctcttctctgcatttattatcttgtctcggtggctgattaggctgtggtcttggtttaggccttggtctatcgttgttgaatctattttggtcattaaatctttcatttcttcctggtatatttctatcacctcgtttggttggatttttgtctatattatcgtttgtaacatcggtacgggtattcatttatcacaaaaaaaacttctctaaatgagtctactgctagaaaacctcatcgaagaagataccatattttttgcaggaagtatatctgagtatgatgatttacaaatggttattgccggcgcaaaatccaaatttccaagatctatgctttctatttttaatatagtacctagaacgatgtcaaaatatgagttggagttgattcataacgaaaatatcacaggagcaatgtttaccacaatgtataatataagaaacaatttgggtctaggagatgataaactaactattgaagccattgaaaactatttcttggatcctaacaatgaagttatgcctcttattattaataatacggatatgactgccgtcattcctaaaaaaagtggtaggagaaagaataagaacatggttatcttccgtcaaggatcatcacctatcttgtgcattttcgaaactcgtaaaaagattaatatttataaagaaaatatggaatccgcgtcgactgagtatacacctatcggagacaacaaggctttgatatctaaatatgcgggaattaatgtcctgaatgtgtattctccttccacatccataagattgaatgccatttacggattcaccaataaaaataaactagagaaacttagtactaataaggaactagaatcgtatagttctagccctcttcaagaacccattaggttaaatgattttctgggactattggaatgtgttaaaaagaatattcctctaacagatattccgacaaaggattgattactataaatggagaatgttcctaatgtatactttaatcctgtgtttatagagcccacgtttaaacattctttattaagtgtttataaacacagattaatagttttatttgaagtattcgttgtattcattctaatatatgtattttttagatctgaattaaatatgttcttcatgcctaaacgaaaaatacccgatcctattgatagattacgacgtgctaatctagcgtgtgaagacgataaattaatgatctatggattaccatggatgacaactcaaacatctgcgttatcaataaatagtaaaccgatagtgtataaagattgtgcaaagcttttgcgatcaataaatggatcacaaccagtatctcttaacgatgttcttcgcagatgatgattcattttttaagtatttggctagtcaagatgatgaatcttcattatctgatatattgcaaatcactcaatatctagactttctgttattattattgatccaatcaaaaaataaattagaagccgtgggtcattgttatgaatctctttcagaggaatacagacaattgacaaaattcacagactttcaagattttaaaaaactgtttaacaaggtccctattgttacagatggaagggtcaaacttaataaaggatatttgttcgactttgtgattagtttgatgcgattcaaaaaagaatcctctctagctaccaccgcaatagatcctgttagatacatagatcctcgtcgcgatatcgcattttctaacgtgatggatatattaaagtcgaataaagtgaacaataattaattctttattgtcatcatgaacggcggacatattcagttgataatcggccccatgttttcaggtaaaagtacagaattaattagacgagttagacgttatcaaatagctcaatataaatgcgtgactataaaatattctaacgataatagatacggaacgggactatggacgcatgataagaataattttgaagcattggaagcaactaaactatgtgatgtcttggaatcaattacagatttctccgtgataggtatcgatgaaggacagttctttccagacattgtttaattctgtgagcgtatggcaaacgaaggaaaaatagttatagtagccgcactcgatgggacatttcaacgtaaaccgtttaataatattttgaatcttattccattatctgaaatggtggtaaaactaactgctgtgtgtatgaaatgctttaaggaggcttccttttctaaacgattgggtgaggaaaccgagatagagataataggaggtaatgatatgtatcaatcggtgtgtagaaagtgttacgtcggctcataatattatattttttatctaaaaaactaaaaataaacattgattaaattttaatataatacttaaaaatggatgttgtgtcgttagataaaccgtttatgtattttgaggaaattgataatgagttagattacgaaccagaaagtgcaaatgaggtcgcaaaaaaactgccgtatcaaggacagttaaaactattactaggagaattattttttcttagtaagttacagcgacacggtatattagatggtgccaccgtagtgtatataggatcggctcctggtacacatatacgttatttgagagatcatttctataatttaggagtgatcatcaaatggatgctaattgacggccgccatcatgatcctattttaaatggattgcgtgatgtaactctagtgactcggttcgttgatgaggaatatctacgatccatcaaaaaacaactgcatccttctaagattattttaatttctgatgtaagatccaaacgaggaggaaatgaacctagtacggcggatttactaagtaattacgctctacaaaatgtcatgattagtattttaaaccccgtggcatctagtcttaaatggagatgcccgtttccagatcaatggatcaaggacttttatatcccacacggtaataaaatgttacaaccttttgctccttcatattcagctgaaatgagattattaagtatttataccggtgagaacatgagactgactcgagttaccaaattagacgctgtaaattatgaaaaaaagatgtactaccttaataagatcgtccgtaacaaagtagttgttaactttgattatcctaatcaggaatatgactattttcacatgtactttatgctgaggaccgtgtactgcaataaaacatttcctactactaaagcaaaggtactatttctacaacaatctatatttcgtttcttaaatattccaacaacatcaactgaaaaagttagtcatgaaccaatacaacgtaaaatatctagcaaaaattctatgtctaaaaacagaaatagcaagagatccgtacgcagtaataaatagaaacgtactactgagatatactaccgatatagagtataatgatttagttactttaataaccgttagacataaaattgattctatgaaaactgtgtttcaggtatttaacgaatcatccataaattatactccggttgatgatgattatggagaaccaatcattataacatcgtatcttcaaaaaggtcataacaagtttcctgtaaattttctatacatagatgtggtaatatctgacttatttcctagctttgttagactagatactacagaaactaatatagttaatagtgtactacaaacaggcgatggtaaaaagactcttcgtcttcccaaaatgttagagacggaaatagttgtcaagattctctatcgccctaatataccattaaaaattgttagatttttccgcaataacatggtaactggagtagagatagccgatagatctgttatttcagtcgctgattaatcaattagtagagatgagataagaacattataataatcaataatatatcttatatcttatatcttatatcttatatcttgtttagaaaaatgctaatattaaaatagctaacgctagtaatccaatcggaagccatttgatatctataatagggtatctaatttcctgatttaaatagcggacagctatattctcggtagctactcgtttggaatcacaaacattatttacatctaatttactatctgtaatggaaacgtttcccaatgaaatggtacaatccgatacattgcattttgttatatttttttttaaagaggctggtaacaacgcatcgcttcgtttacatggctcgtaccaacaataatagggtaatcttgtatctattcctatccgtactatgcttttatcaggataaatacatttacatcgtatatcgtctttgttagcatcacagaatgcataaatttgttcgtccgtcatgataaaaatttaaagtgtaaatataactattatttttatagttgtaataaaaagggaaatttgattgtatactttcggttctttaaaagaaactgacttgataaaaatggctgtaatctctaaggttacgtatagtctatatgatcaaaaagagattaatgctacagatattatcattagtcatgttaaaaatgacgacgatatcggtaccgttaaagatggtagactaggtgctatggatggggcattatgtaagacttgtgggaaaacggaattggaatgtttcggtcactggggtaaagtaagtatttataaaactcatatagttaagcctgaatttatttcagaaattattcgtttactgaatcatatatgtattcactgcggattattgcgttcacgagaaccgtattccgacgatattaacctaaaagagttatcgggacacgctcttaggagattaaaggataaaatattatccaagaaaaagtcatgttggaacagtgaatgtatgcaaccgtatcaaaaaattactttttcaaagaaaaaggtttgtttcgtcaacaagttggatgatattaacgttcctaattctctcatctatcaaaagttaatttctattcatgaaaagttttggccattattagaaattcatcaatatccagctaacttattttatacagactactttcccatccctccgttgattattagaccggctattagtttttggatagatagtatacccaaagagaccaatgaattaacttacttattaggtatgatcgttaagaattgtaacttgaatgctgatgaacaggttatccagaaggcggtaatagaatacgatgatattaaaattatttctaataacactaccagtatcaatttatcatatattacatccggcaaaaataatatgattagaagttatatcgtcgcccgacgaaaagatcagaccgctagatctgtaattggtcccagtacatctatcaccgttaatgaggtaggaatgcccgcatatattagaaatacacttacagaaaagatatttgttaatgcctttacagtggataaagttaaacaactattagcgtcaaaccaagttaaattttactttaataaacgattaaaccaattaacaagaatacgccaaggaaagtttattaaaaataaaatacatttattgcctggtgattgggtagaagtagctgttcaagaatatacaagtattatttttggaagacagccgtctctacatagatacaacgtcatcgcttcatctatcagagctaccgaaggagatactatcaaaatatctcccggaattgccaactctcaaaatgctgatttcgacggggatgaggaatggatgatattagaacaaaatcctaaagctgtaattgaacaaagtattcttatgtatccgacgacgttactcaaacacgatattcatggagcccccgtttatggatctattcaagatgaaatcgtagcagcgtattcattgtttaggatacaagatctttgtttagatgaagtattgaacatcttggggaaatatggaagagagttcgatcctaaaggtaaatgtaaattcagcggtaaagatatctatacttacttgataggtgaaaagattaattatccgggtctcttaaaggatggtgaaattattgcaaacgacgtagatagtaattttgttgtggctatgaggcatctgtcattggctggactcttatccgatcataagtcgaacgtggaaggtatcaactttattatcaagtcatcttatgtttttaagagatatctatctatttacggttttggggtgacattcaaagatctgagaccaaattcgacgttcactaataaattggaggccatcaacgtagaaaaaatagaacttatcaaagaagcatacgccaaatatctcaacgatgtaagagacgggaaaatagttccattatctaaagctttagaggcggactatgtggaatccatgttatccaacttgacaaatcttaatatccgagagatagaagaacatatgagacaaacgctgatagatgatccagataataacctcctgaaaatggccaaagcgggttataaagtaaatcccacagaactaatgtatattctaggtacgtatggacaacaaaggattgatggtgaaccagcagagactcgagtattgggtagagttttaccttactatcttccagactctaaggatccagaaggaagaggttatattcttaattctttaacaaaaggattaacgggttctcaatattacttttcgatgctggttgccagatctcaatctactgatatcgtctgtgaaacatcacgtaccggaacactggctagaaaaatcattaaaaagatggaggatatggtggtcgacggatacggacaagtagttataggtaatacgctcatcaagtacgccgccaattataccaaaattctaggctcagtatgtaaacctgtagatcttatctatccagatgagtccatgacttggtatttggaaattagtgctctgtggaataaaataaaacagggattcgtttactctcagaaacagaaacttgcaaagaagacattggcgccgtttaatttcctagtattcgtcaaacccaccactgaggataatgctattaaggttaaggatctgtacgatatgattcataacgtcattgatgatgtgagagagaaatacttctttacggtatctaatatagattttatggagtatatattcttgacgcatcttaatccttctagaattagaattacaaaagaaacggctatcactatctttgaaaagttctatgaaaaactcaattatactctaggtggtggaactcctattggaattatttctgcacaggtattgtctgagaagtttacacaacaagccctgtccagttttcacactactgaaaaaagtggtgccgtcaaacaaaaacttggtttcaacgagtttaataacttgactaatttgagtaagaataagaccgaaattatcactctggtatccgatgatatctctaaacttcaatctgttaagattaatttcgaatttgtatgtttgggagaattaaatccagacatcactcttcgaaaagaaacagataggtatgtagtagatataatagtcaatagattatacatcaagagagcagaaataaccgaattagtcgtcgaatatatgattgaacgatttatctcctttagcgtcattgtaaaggaatggggtatggaaacattcattgaggatgaggataatattagatttactgtctacctaaatttcgttgaaccggaagaattgaatcttagtaagtttatgatggttcttccgggtgccgccaacaagggaaagattagtaaattcaagattcctatctctgactatacgggttatgacgacttcaatcaaacaaaaaagctcaataagatgactgtagaactcatgaatctaaaagaattgggttctttcgatttggaaaacgtcaacgtgtatcctggagtatggaatacatacgatatcttcggtatcgaggccgctcgtgaatacttgtgcgaagccatgttaaacacctatggagaagggttcgattatctgtatcagccttgtgatcttctcgctagtttactatgtgctagttacgaaccagaatcagtgaataaattcaagttcggcgcagctagtactcttaagagagctacgttcggagacaataaagcattgttaaacgcggctcttcataaaaagtcagaacctattaacgataatagtagctgccacttttttagcaaggtccctaatataggaactggatattacaaatactttatcgacttgggtcttctcatgagaatggaaaggaaactatctgataagatatcttctcaaaagatcaaggaaatggaagaaacagaagacttttaattcttatcaataacatatttttctatgatctgtcttttaaacgatggattttccacaaatgcgcctctcaagtccctcatagaatgatacacgtataaaaaatatagcataggcgatgactccttatttttagacattagatatgccaaaatcatagccccgcttctatttactcccgcagcacaatgaaccaacacgggctcgtttcgttgatcacatttagataaaaaggcggttacgtcgtcaaaatatttactaatatcggtagttgtatcatctaccaacggtatatgaataatattaatattagagttaggtaatgtatatttatccatcgtcaaatttaaaacatatttgaacttaacttcagatgatggtgcatccatagcatttttataatttcccaaatacacattattggttacccttgtcattatagtgggagatttggctttgtgcatatctccagttgaacgtagtagtaagtatttatacaaacttttcttatccatttataacgtacaaatggataaaactactttatcggtaaacgcgtgtaatttagaatacgttagagaaaaggctatagtaggcgtacaagcagccaaaacatcaacacttatattctttgttattatattggcaattagtgcgctattactctggtttcagacgtctgataatccagtctttaatgaattaacgagatatatgcgaattaaaaatacggttaacgattggaaatcattaacggatagcaaaacaaaattagaaagtgatagaggtagacttctagccgctggtaaggatgatatattcgacttcaaatgtgtggatttcggcgcctattttatagctatgcgattggataagaaaacatatctgccgcaagctattaggcgaggtactggagacgcgtggatggttaaaaaggcggcaaaggtcgatccatctgctcaacaattttgtcagtatttgataaaacacaagtctaataatgttattacttgtggtaatgagatgttaaatgaattaggttatagcggttattttatgtcaccgcattggtgttccgattttagtaatatggaatagtgttagataaatgcggtaacgaatgttcctgtaaggaaccataacagcttagatttaacgttaaagatgagcataaacataataaacaaaattacaatcaaacttataacattaatatcaaacaatccaaaaaatgaaatcagtggagtagtaaacgcgtacataactcctggataacgtttagcagctgccgttcctattctagaccaaaaatttggtttcatgttttcgaaacggtattctgcaacaagtcggggatcgtgttctacatatttggcggcattatccagtatctgcctattgatcttcatttcgttttcgattctggctatttcaaaataaaatcccgatgatagacctccagactttataatttcatctacgatgttcagcgccgtagtaactctaataatataggctgataagctaacatcataccctcctgtatatgtgaatatggcatgatttttgtccattacaagctcggttttaactttattgcctgtaataatttctctcatctgtaggatatctatttttttgtcatgcattgccttcaagacgggacgaagaaacgtaatatcctcaataacgttatcgttttctacaataactacatattctacctttttattttctaactcggtaaaaaaattagaatcccatagggctaaatgtctagcgatatttcttttcgtttcttctgtacacatagtgttacaaaaccctgaaaagaagtgagtatacttgtcatcatttctaatgtttcctccagtccactgtataaacgcataatccttgtaatgatctggatcatccttgactaccacaacatttcttttttctggcataacttcgttgtcctttacatcatcgaacttctgatcattaatatgctcatgaacattaggaaatgtttctgatggaggtctatcaataactggcacaacaataacaggagttttcaccgccgccatttagttattgaaattaatcatatacaactctttaatacgagttatattttcgtctatccattgtttcacattgacatatttcgacaaaaagatataaaatgcgtattccaatgcttctctgtttaatgaattactaaaatatacaaacacgtcactgtctggcaataaatgatatcttagaatattgtaacaatttattttgtattgcacatgttcgtgatctatgagttcttcttcgaatggcataggatctccgaatctgaaaacgtataaataggagttagaataataatatttgagagtattggtaatatataaactctttagcggtataattagtttttttctctcaatttctatttttagatgtgatggaaaaatgactaattttgtagcattagtatcatgaactctaatcaaaatcttaatatcttcgtcacacgttagctctttgaagtttttaagagatgcatcagttggttctacagatggagtaggtgcaacaattttttgttctacacatgtatgtactggagccattgttttaactataatggtgcttgtatcgaaaaactttaatgcagatagcggaagctcttcgccgcgactttctacgtcgtaattgggttctaacgccgatctctgaatggatactagttttctaagttctaatgtgattctctgaaaatgtaaatccaattcctccggcattatagatgtgtatacatcggtaaataaaactatagtatccaacgatcccttctcgcaaattctagtcttaaccaaaaaatcgtatataaccacggagatggcgtatttaagagtggattcttctaccgttttgttcttggatgtcatataggaaactataaagtccgcactactgttaagaatgattactaacgcaactatatagtttaaattaagcattttggaaacataaaataactctgtagacgatacttgactttcgaataagtttgcagacaaacgaagaaagaacagacctctcttaatttcagaagaaaactttttttcgtattcctgacgtctagagtttatatcaataagaaagttaagaattagtcggttaatgttgtatttcattacccaagtttgagatttcataatattatcaaaagacatgataatattaaagataaagcgctgactatgaacgaaatagctatatggttcgctcaagaatatagtcttgttaaacgtggaaacgataactgtatttttaatcacgtcagcggcatctaaattaaatataggtatatttattccacacactctacaatatgccacaccatcttcataataaataaattcgttagcaaaattattaattttagtgaaatagttagcgtcaactttcatagcttccttcaatctaatttgatgctcacacggtgcgaattccactctaacatcccttttccatgcctcaggttcatcgatctctataatatctagttttttgcgtttcacaaacacaggctcgtctctcgcgatgagatctgtatagtaactatgtaaatgataactagatagaaagatgtagctatatagatgacgatcctttaagagaggtataataactttaccccaatcagatagactgttgttatggtcttcggaaaaagaatttttataaatttttccagtattttccaaatatacgtacttaacatctaaaaaatccttaatgataataggaatggataatccgtctattttataaagaaatacatatcgcacattatacttttttttggaaatgggaataccgatgtgtctacataaatatgcaaagtctaaatattttttagagaatcttagttggtccaaattcttttccaagtacggtaatagatttttcatattgaacggtatcttcttaatctctggttctagttccgcattaaatgatgaaactaagtcactatttttataactaacgattacatcacctctaacatcatcatttaccagaatactgatcttcttttgtcgtaaatacatgtctaatgtgttaaaaaaaagatcatacaagttatacgtcatttcatctgtggtattcttgtcattgaaggataaactcgtactaatctcttctttaacagcctgttcaaatttatatcctatatacgaaaaaatagcaaccagtgtttgatcatccgcgtcaatattctgttctatcgtagtgtataacaatcgtatatcttcttctgtgatagtcgatacgttataaaggttgataacgaaaatatttttatttcgtgaaataaagtcatcgtaggattttggacttatattcgcgtctagtagatatgcttttatttttggaatgatctcaattagaatagtctctttagagtccatttaaagttacaaacaactaggaaattggtttatgatgtataatttttttagtttttatagattctttattctatacttaaaaaatgaaaataaatacaaaggttcttgagggttgtgttaaattgaaagcgagaaataatcataaattatttcattatcgcgatatccgttaagtttgtatcgtaatggcgtggtcaattacgaataaagcggatactagtagcttcacaaagatggctgaaatcagagctcatctaaaaaatagcgctgaaaataaagataaaaacgaggatattttcccggaagatgtaataattccatctactaagcccaaaaccaaacgagccactactcctcgtaaaccagcggctactaaaagatcaaccaaaaaggaggaagtggaagaagaagtagttatagaggaatatcatcaaacaactgaaaaaaattctccatctcctggagtcagcgacattgtagaaagcgtggctgctgtagagctcgatgatagcgacggggatgatgaacctatggtacaagttgaagctggtaaagtaaatcatagtgctagaagcgatctttctgacctaaaggtggctaccgacaatatcgttaaagatcttaagaaaattattactagaatctctgcagtatcgacggttctagaggatgttcaagcagctggtatctctagacaatttacttctatgactaaagctattacaacactatctgatctagtcaccgagggaaaatctaaagttgttcgtaaaaaagttaaaacttgtaagaagtaaatgcgtgcacttttttataaagatggtaaactctttaccgataataattttttaaatcctgtatcagacgataatccagcgtatgaggttttgcaacatgttaaaattcctactcatttaacagatgtagtagtatatgaacaaacgtgggaggaggcgttaactagattaatttttgtgggaagcgattcaaaaggacgtagacaatacttttacggaaaaatgcatgtacagaatcgcaacgctaaaagagatcgtatttttgttagagtatataacgttatgaaacgaattaattgttttataaacaaaaatataaagaaatcgtccacagattccaattatcagttggcggtttttatgttaatggaaactatgttttttattagatttggtaaaatgaaatatcttaaggagaatgaaacagtagggttattaacactaaaaaataaacacatagaaataagtcccgatgaaatagttatcaagtttgtaggaaaggacaaagtttcacatgaatttgttgttcataagtctaatagactatataaaccgctattgaaactgacggatgattctagtcccgaagaatttctgttcaacaaactaagtgaacgaaaggtatacgaatgtatcaaacagtttggtattagaatcaaggatctccgaacgtatggagtcaattatacgtttttatataatttttggacaaatgtaaagtccatatctcctcttccgtcaccaaaaaagttaatagcgttaactatcaaacaaactgctgaagtggtaggtcatactccatcaatttcaaaaagagcttatatggcaacgactattttagaaatggtaaaggataaaaattttttagatgtagtatctaaaactacgttcgatgaattcctatctatagtcgtagatcacgttaaatcatctacggatggatgatatagatctttacacaaataattacaagaccgataaatggaaatggataagcgtatgaaatctctcgcaatgacagctttcttcggagagctaagcacattagatattatggcattgataatgtctatatttaaacgccatccaaacaataccattttttcagtggataaggatggtcagtttatgattgatttcgaatacgataattataaggcttctcaatatttggatctgaccctcactccgatatctggagatgaatgcaagactcacgcatcgagtatagccgaacaattggcgtgtgtggatattattaaagaggatattagcgaatatatcaaaactactccccgtcttaaacgatttataaaaaaataccgcaatagatcagatactcgcatcagtcgagatacagaaaagcttaaaatagctctagctaaaggcatagattacgaatatataaaagacgcttgttaataagtaaatgaaaaaaaactagtcgtttataataaaacacgatatggatgccaacgtagtatcatcttctactattgcgacgtatatagacgctttagcgaagaatgcttcagaattagaacagaggtctaccgcatacgaaataaataatgaattggaactagtatttattaagccgccattgattactttgacaaatgtagtgaatatctctacgattcaggaatcgtttattcgatttaccgttactaataaggaaggtgttaaaattagaactaagattccattatctaaggtacatggtctagatgtaaaaaatgtacagttagtagatgctatagataacatagtttgggaaaagaaatcattagtgacggaaaatcgtcttcacaaagaatgcttgttgagactatcgacagaggaacgtcatatatttttggattacaagaaatatggatcctctatccgactagaattagtcaatcttattcaagcaaaaacaaaaaactttacgatagactttaagctaaaatattttctaggatccggtgcccaatctaaaagttctttgttgcacgctattaatcatccaaagtcaaggcctaatacatctctggaaatagaattcacacctagagacaatgaaacagttccatatgatgaactaataaaggaattgacgactctctcgcgtcatatatttatggcttctccagagaatgtaattctttctccgcctattaacgcgcctataaaaacctttatgttgcctaaacaagatatagtaggtttggatctggaaaatctatatgccgtaactaagactgacggcattcctataactatcagagttacatcaaacgggttgtattgttattttacacatcttggttatattattagatatcctgttaagagaataatagattccgaagtagtagtctttggtgaggcagttaaggataagaactggaccgtatatctcattaagctaatagagcccgtgaatgcaatcagtgatagactagaagaaagtaagtatgttgaatctaaactagtggatatttgtgatcggatagtattcaagtcaaagaaatacgaaggtccgtttactacaactagtgaagtcgtcgatatgttatctacatatttaccaaagcaaccagaaggtgttattctgttctattcaaagggacctaaatctaacattgattttaaaattaaaaaggaaaatactatagaccaaactgcaaatgtagtatttaggtacatgtccagtgaaccaattatctttggagaatcgtctatctttgtagagtataagaaatttagcaacgataaaggctttcctaaagaatatggttctggtaagattgtgttatataacggcgttaattatctaaataatatctattgtttggaatatattaatacacataatgaagtgggtattaagtccgtggttgtacctattaagtttatagcagaattcttagttaatggagaaatacttaaacctagaattgataaaaccatgaaatatattaactcagaagattattatggaaatcaacataatatcatagtcgaacatttaagagatcaaagcatcaaaataggagatatctttaacgaggataaactatcggatgtgggacatcaatacgccaataatgataaatttagattaaatccagaagttagttattttacgaataaacgaactagaggaccgttgggaattttatcaaactacgtcaagactcttcttatttctatgtattgttccaaaacatttttagacgattccaacaaacgaaaggtattggcgattgattttggaaacggtgctgacctggaaaaatacttttatggagagattgcgttattggtagcgacggatccggatgctgatgctatagctagaggaaatgaaagatacaacaaattaaactctggaattaaaaccaagtactacaaatttgactacattcaggaaactattcgatccgatacatttgtctctagtgtcagagaagtattctattttggaaagtttaatatcatcgactggcagtttgctatccattattcttttcatccgagacattatgctaccgtcatgaataacttatccgaactaactgcttctggaggcaaggtattaatcactaccatggacggagacaaattatcaaaattaacagataaaaagacttttataattcataagaatttacctagtagcgaaaactatatgtctgtagaaaaaatagctgatgatagaatagtggtatataatccatcaacaatgtctactccaatgactgaatacattatcaaaaagaacgatatagtcagagtgtttaacgaatacggatttgttcttgtagataacgttgatttcgctacaattatagaacgaagtaaaaagtttattaatggcgcatctacaatggaagatagaccgtctacaaaaaactttttcgaactaaatagaggagccattaaatgtgaaggtttagatgtcgaagacttacttagttactatgttgtttatgtcttttctaagcggtaaataataatatggtatgggttctgatatccccgttctaaatgcattaaataattccaatagagcgatttttgttcctataggaccttccaactgtggatactctgtattgttaatagatatattaatacttttgtcgggtaacagaggttctacgtcttctaaaaataaaagttttataacatctggcctgttcataaataaaaacttggcgattctatatatactcttattatcaaatctagccattgtcttatagatgtgagctactgtaggtgtaccatttgattttctttctaatactatatatttctctcgaagaagttcttgcacatcatctgggaataaaatactactgttgagtaaatcagttattttttttatatcgatattgatggacatttttatagttaaggataataagtatcccaaagtcgataacgacgataacgaagtatttatacttttaggaaatcacaatgactttatcagattaaaattaacaaaattaaaggagcatgtatttttttctgaatatattgtgactccagatacatatggatctttatgcgtcgaattaaatgggtctagttttcagcacggtggtagatatataaaggtggaggaatttatagatgctggaagacaagttagatggtgttctacatccaatcatatatctaaagatatacccgaagatatgcacactgataaatttgtcatttatgatatatacacttttgacgctttcaagaataaacgattggtattcgtacaggtacctccgtcgttaggagatgatagtcatttgactaatccgttattgtctccgtattatcgtaattcagtagccagacaaatggtcaataatatgatttttaatcaagattcatttttaaaatatttattagaacatctgattagaagccactatagagtttctaaacatataacaatagttagatacaaggataccgaagaattaaatctaacgagaatatgttataatagagataagtttaaggcgtttgtattcgcttggtttaacggcgtttcggaaaatgaaaaggtactagatacgtataaaaaggtatctaatttgatataatgaattcagtgactgtatcacacgcgccatatactattacttatcacgatgattgggaaccagtaatgagtcaattggtagagttttataacgaagtagccagttggctgctacgagacgagacgtcgcctattcctgataagttctttatacagttgaaacaaccgcttagaaataaacgagtatgtgtgtgcggtatagatccgtatccgaaagatggaactggtgtaccgttcgaatcaccaaattttacaaaaaaatcaattaaggagatagcttcatctatatctagattaaccggagtaattgattataaaggttataaccttaatataatagacggggttataccctggaattattacttaagttgtaaattaggagaaacaaaaagtcacgcgatctactgggataagatttccaagttactgctgcagcatataactaaacacgttagtgttctttattgtttgggtaaaacagatttctcgaatatacgggcaaagttagaatccccggtaactaccatagtcggatatcatccagcggctagagaccgccaattcgagaaagatagatcatttgaaattatcaacgttttactggaattagacaacaaggcacctataaattgggctcaagggtttatttattaatgctttagtgaaattttaacttgtgttctaaatggatgcggctattagaggtaatgatgttatctttgttcttaagactataggtgtcccgtcagcgtgcagacaaaatgaagatccaagatttgtagaagcatttaaatgcgacgagttagaaagatatattgagaataatccagaatgtacactattcgaaagtcttagggatgaggaagcatactctatagtcagaattttcatggatgtagatttagacgcgtgtctagacgaaatagattatttaacggctattcaagattttattatcgaggtgtcaaactgtgtagctagattcgcgtttacagaatgcggtgccattcatgaaaatgtaataaaatccatgagatctaatttttcattgactaagtctacaaatagagataaaacaagttttcatattatctttttagacacgtataccactatggatacattgatagctatgaaacgaacactattagaattaagtagatcatctgaaaatccactaacaagatcgatagacactgccgtatataggagaaaaacaactcttcgggttgtaggtactaggaaaaatccaaattgcgacactattcatgtaatgcaaccaccgcatgataatatagaagattacctattcacttacgtggatatgaacaacaatagttattacttttctctacaacaacgattggaggatttagttcctgataagttatgggaaccagggtttatttcattcgaagacgctataaaaagagtttcaaaaatattcattaattctataataaactttaatgatctcgatgaaaataattttacaacggtaccactggtcatagattacgtaacaccttgtgcattatgtaaaaaacgatcgcataaacatccgcatcaactatcgttggaaaatggtgctattagaatttacaaaactggtaatccacatagttgtaaagttaaaattgttccgttggatggtaataaactgtttaatattgcacaaagaattttagacactaactctgttttattaaccgaacgaggagaccatatagtttggattaataattcatggaaatttaacagcgaagaacccttgataacaaaactaattttgtcaataagacatcaactacctaaggaatattcaagcgaattactctgtccgaggaaacgaaagactgtagaagctaacatacgagacatgttagtagattcagtggagaccgatacctatccggataaacttccgtttaaaaatggtgtattggacctggtagacggaatgttttactctggagatgatgctaaaaaatatacgtgtactgtatcaaccggatttaaatttgacgatacaaagttcgtcgaagacagtccagaaatggaagagttaatgaatatcattaacgatatccaaccattaacggatgaaaataagaaaaatagagagctatatgaaaaaacattatctagttgtttatgcggtgctaccaaaggatgtttaacattcttttttggagaaactgcaactggaaagtcgacaaccaaacgtttgttaaagtctgctatcggtgacctgtttgttgagacgggtcaaacaattttaacagatgtattggataaaggacctaatccatttatcgctaacatgcatttgaaaagatctgtattctgtagcgaactacctgattttgcctgtagtggatcaaagaaaattagatctgacaatattaaaaagttgacagaaccttgtgtcattggaagaccgtgtttctccaataaaattaataatagaaaccatgcgacaatcattatcgatactaattacaaacctgtttttgataggatagataacgcattaatgagaagaattgccgtcgtgcgattcagaacacacttttctcaaccttctggtagagaggctgctgaaaataatgacgcgtacgataaagtcaaactattagacgaggggttagatggtaaaatacaaaataatagatatagattcgcatttctatacttgttggtgaaatggtacagaaaatatcatgttcctattatgaaactatatcctacacccgaagagattcctgactttgcattctatctcaaaataggtactctgttagtatctagctctgtaaagcatattccattaatgacggacctctccaaaaagggatatatattgtacgataatgtggttactcttccgttgactactttccaacagaaaatatccaagtattttaattctagactatttggacacgatatagagagcttcatcaatagacataagaaatttgccaatgttagtgatgaatatctgcaatatatattcatagaggatatttcatctccgtaaatatatgctcatatatttatagaagatatcacatatctaaatgaataccggaatcatagatttatttgataatcatgttgatagtataccaactatattacctcatcagttagctactctagattatctagttagaactatcatagatgagaacagaagcgtgttattgttccatattatgggatcaggtaaaacaataatcgctttgttgttcgccttggtagcttccagatttaaaaaggtttacattctagtgccgaacatcaacatcttaaaaattttcaattataatatgggtgtagctatgaacttgtttaatgacgaattcatagctgagaatatctttattcattccacaacaagtttttattctcttaattataacgataacgtcattaattataacggattatctcgctacaataactctatttttatcgttgatgaggcacataatatctttgggaataatactggagaacttatgaccgtgataaaaaataaaaacaagattccttttttactattgtctggatctcccattactaacacacctaatactctgggtcatattatagatttaatgtccgaagagacgatagattttggtgaaattattagtcgtggtaagaaagtaattcagacacttcttaacgaacgaggtgtgaatgtacttaaggatttgcttaaaggaagaatatcatattacgaaatgcctgataaagatctaccaacgataagatatcacggacgtaagtttctagatactagagtagtatattgtcacatgtctaaacttcaagagagagattatatgattactagacgacagctatgttatcatgaaatgtttgataaaaatatgtataacgtgtcaatggcagtattgggacaacttaatctgatgaataatttagatactttatttcaggaacaggataaggaattgtacccaaatctgaaaataaataatggcgtgttatacggagaagaattggtaacgttaaacattagttccaaatttaaatactttattaatcggatacagacactcaacggaaaacattttatatacttttctaattctacatatggcggattggtaattaaatatatcatgctcagtaatggatattctgaatataatggttctcagggaactaatccacatatgataaacggcaaaccaaaaacatttgctatcgttactagtaaaatgaaatcgtctttagaggatctattagatgtgtataattctcctgaaaacgatgatggtagtcaattgatgtttttgttttcatcaaacattatgtccgaatcctatactctgaaagaggtaaggcatatttggtttatgactatcccagatactttttctcaatacaaccaaattcttggacgatctattagaaaattctcttacgccgatatttctgaaccagttaatgtatatcttttagccgccgtatattccgatttcaatgacgaagtgacgtcattaaacgattacacacaggatgaattaattaatgttttaccatttgacatcaaaaagctgttatatctaaaatttaagacgaaagaaacgaatagaatatactctattcttcaagagatgtctgaaacgtattctcttccaccacatccatcaattgtaaaagttttattgggagaattggtcagacaatttttttataataattctcgtattaagtataacgataccaagttacttaaaatggttacatcagttataaaaaataaagaagacgctaggaattacatagatgatattgtaaacggtcacttctttgtatcgaataaagtatttgataaatctcttttatacaaatacgaaaacgatattattacagtaccgtttagactttcctacgaaccatttgtttggggagttaactttcgtaaagaatataacgtggtatcttctccataaaactgatgagatatataaagaaataaatgtcgagctttgttaccaatggatacctttccgttacattggaaccacacgagctgacgttagacataaaaactaatattaggaatgccgtatataagacgtatctccatagagaaattagtggtaaaatggccaagaaaatagaaattcgtgaagacgtggaattacctctcggcgaaatagttaataattctgtagttataaacgttccgtgtgtaataacctacgcgtattatcacgttggggatatagtcagaggaacattaaacatcgaagatgaatcaaatgtaactattcaatgtggagatttaatctgtaaactaagtagagattcgggtactgtatcatttagcgattcaaagtactgcttttttcgaaatggtaatgcgtatgacaatggcagcgaagtcactgccgttctaatggaggctcaacaaggtatcgaatctagttttgtttttctcgcgaatatcgtcgactcataaaaaagagaatagcggtaagtataaacacgaatactatggcaataattgcgaatgttttattctcttcgatatatttttgataatatgaaaaacatgtctctctcaaatcggacaaccatctcataaaatagttctcgcgcgctggagaggtagttgccgctcgtataatctctccagaataatatacttgcgtgtcgtcgttcaatttatacggatttctatagttctctgttatataatgcggtttgccctcatgattagacgacgacaatagtgttctaaatttagatagttgatcagaatgaatgtttattggcgttggaaaaattatccatacagcgtctgcagagtggttgatagttgttcctagatatgtaaaataatccaacttactaggcagcaaattgtctagataaaatactgaatcaaacggtgcagacgtattggcggatctaatggaatccaattgattaactatcttttgaaaatatacatttttatgatccaatacttgtaagaatatagaaataatgataagtccatcatcgtgtttttttgcctcttcataagaactatattttttcttattccaatgaacaagattaatctctccagagtatttgtacacatctatcaagtgattggatccataatcgtcttcctttccccaatatatatgtagtgatgataacacatattcattggggagaaaccctccacttatatatcctcctttaaaattaatccttactagttttccagtgttctggatagtggttggtttcgactcattataatgtatgtctaacggcttcaatcgcgcgttagaaattgcttttttagtttctatattaataggagatagttgttgcggcatagtaaaaatgaaatgataactgtttaaaaatagctcttagtatgggaattacaatggatgaggaagtgatatttgaaactcctagagaattaatatctattaaacgaataaaagatattccaagatcaaaagacacgcatgtgtttgctgcgtgtataacaagtgacggatatccgttaataggagctagaagaacttcattcgcgttccaggcgatattatctcaacaaaattcagattctatctttagagtatccactaaactattacggtttatgtactacaatgaactaagagaaatctttagacggttgagaaaaggttctatcaacaatatcgatcctcactttgaagagttaatattattgggtggtaaactagataaaaaggaatctattaaagattgtttaagaagagaattaaaagaggaaagtgatgaacgtataacagtaaaagaatttggaaatgtaattctaaaacttacaacacgggataaattatttaataaagtatatataagttattgcatggcgtgttttattaatcaatcgttggaggatttatcgcatactagtatttacaatgtagaaattagaaagattaaatcattaaatgattgtattaacgacgataaatacgaatatctgtcttatatttataatatgctagttaatagtaaatgaacttttacagatctagtataattagtcagattattaagtataatagacgactagctaagtctattatttgcgaggatgactctcaaattattacactcacggcattcgttaaccaatgcctatggtgtcataaacgagtatccgtgtccgctattttattaactactgataacaaaatattagtatgtaacagacgagatagttttctctattctgaaataattagaactagaaacatgtttagaaaaaaacgattatttctgaattattccaattatttgaacaaacaggaaagaagtatactatcgtcatttttttctctagatccagctactactgataatgatagaatagacgctatttatccgggtggcatacccaaaaggggtgagaatgttccagagtgtttatccagggaaattaaagaagaagttaatatagacaattcttttgtattcatagacactcggttttttattcatggcatcatagaagataccattattaataaattttttgaggtaatcttctttgtcggaagaatatctctaacgagtgatcaaatcattgatacatttaaaagtaatcatgaaatcaaggatctaatatttttagatccgaattcaggtaatggactccaatacgaaattgcaaaatatgctctagatactgcaaaacttaaatgttacggccatagaggatgttattatgaatcattaaaaaaattaactgaggatgattgattaaaaaatataaattaatttaccatcgtgtatttttataacgggattgtccggcatatcatgtagatagttaccgtctacatcgtatactcgaccatctacgcctttaaatcctctatttattgacattaatctattagaattggaataccaaatattagtaccctcaattagtttattggtaatattttttttagacgatagatcgatggctcttgaaaccaaggttttccaaccggactcattgtcgatcggtgagaagtctttttcattagcatgaatccattctaatgatgtatgtttaaacactctaaacaattggacaaattcttttgatttgctttgaatgatttcaaataggtcttcgtctacagtaggcataccattagataatctagccattataaagtgcacgtttacatatctacgttctggaggagtaagaacgtgactattgagacgaatggctcttcctactatctgacgaagagacgcctcgttccatgtcatatctaaaatgaagatatcattaattgagaaaaaactaataccctcgcctccactagaagagaatacgcatgttttaatgcattctccgttagtgtttgattcttggttaaactcagccaccgccttgattctagtatcttttgttctagatgagaactctatattagagataccaaagactttgaaatatagtaataagatttctattcctgactgattaacaaatggttcaaagactagacatttaccatgggatgctaatattcccaaacatacatctataaatttgacgcttttctcttttaattcagtaaatagagagatatcagccgcactagcatcccctttcaatagttctccctttttaaaggtatctaatgcggatttagaaaactctctatctcttaatgaatttttaaaatcattatatagtgttgctatctcttgcgcgtattcgcccggatcacgattttgtctttcaggaaagctatcgaacgtaaacgtagtagccatacgtctcagaattctaaatgatgatatacctgtttttatttcagcgagtttagccttttgataaatttcttcttgctttttcgacatattaacgtatcgcattaatactgttttcttagcgaatgatgcagacccttctacgtcatcaaaaatagaaaactcgttattaactatatacgaacatagtcctcctagtttggagactaattctttttcatcgactagacgtttattctcaaatagtgattggtgttgtaaggatcctggtcgtagtaagttaaccaacatggtgaattcttgcacactattgacgataggtgtagccgataaacaaatcatcttatggttttttaacgcaatggtcttagataaaaaattatatactgaacgagtaggacggatcttaccatcttctttgattaatgatttagaaatgaagttatgacattcatcaatgatgacgcatattctactcttggaattaatagttttgatattagtaaaaaatttatttctaaaattttgatcatcgtaattaataaaaatacaatccttcgttatctctggagcgtatctgagtatagtgttcatccaaggatcttctatcaaagcctttttcaccaataagataatagcccaattcgtataaatatccttaagatgtttgagaatatatacagtagtcattgttttaccgacacccgtttcatggaacaataaaagagaatgcatactgtctaatcctaagaaaactcttgctacaaaatgttgataatccttgaggcgtactacgtccgaccccatcatttcaacaggcatattagtagttctgcgcaatgcataatcgatataggccgcgtgtgatttactcatttatgagtgataagtaataactatgttttaaaaatcacagcagtagtttaactagtcttctctgatgtttgttttcgatactttttgaatcagaagtcatactagaataaagcaacgagtgaacgtaatagagagcttcgtatactctattcgaaaactctaagaacttattaatgaattccgtatccactggattgtttaaaatactaaattgaacactgttcacatccttccaagaagaagacttagtgacggacttaacatgagacataaataaatccaaattttttttacaaacatcactagccaccataatggcgctatctttcaaccagctatcgcttacgcattttagcagtctaacatttttaaagagactacaatatattctcatagtatcgattacacctctaccgaataaagttggaagtttaataatacaatatttttcgtttacaaaatcaaataatggtcgaaacacgtcgaaggttaacatcttataatcgctaatgtatagattgttttcagtgagatgattattagatttaatagcatctcgttcacgtttgaacagtttattgcgtgcgctgaggtcggcaactacggcgtccgctttagtactcctcccataatactttacgctattaatctttaaaatttcatagactttatctagatcgctttctggtaacatgatatcatgtgtaaaaagttttaacatgtcggtcggcattctatttagatcattaactctagaaatctgaagaaagtaattagctccgtattccagactaggtaatgggcttttacctagagacagattaagttctggcaatgtttcataaaatggaagaaggacatgcgttccctcccggatattttttacaatttcatccatttacaactctatagtttgttttcattattattagttattatctcccataatcttggtaatacttaccccttgatcgtaagataccttatacaggtcattacatacaactaccaattgtttttgtacataatagattggatggttgacatccatggtggaataaactactcgaacagatagtttatctttccccctagatacattagccgtaatagttgtcggcctaaagaatatctttggtgtaaagttaaaagttagggttcttgttccattattgctttttgtcagtagttcattataaattctcgagatgggtccgttctctgaatatagaacatcatttccaaatctaacttctagtctagaaataatatcggtcttattcttaaaatctattcccttgatgaagggatcgttaatgaacaaatccttggcctttgattcggctgatctattatctccgttatagacgttacgttgactagtccaaagacttacaggaatagatgtatcgatgatgttgatactatgtgatatgtgagcaaagattgttctcttagtggcatcactatatgttccagtaatggcggaaaactttttagaaatgttatatataaaagaattttttcgtgttccaaacattagcagattagtatgaagataaacactcatattatcaggaacattatcaatttttacatacacatcagcatcttgaatagaaacgataccatcttctggaacctctacgatctcagcagactccggataaccagtcggtggaccatcgctaacaataactagatcatccaacaatctactcacatatgcatctatataatctttttcatcttgtgagtaccctggatacgaaataaatttattatccgtatttccataataaggtttagtataaacagagagagatgttgccgcatgaacttcagttacagtcgccgttggttggtttatttgacctattactctcctaggtttctctataaacgatggtttaatttgtacattcttaaccatatatccaataaagctcaattcaggaacataaacaaattctttgttgaacgtttcaaagtcgaacgaagagtcacgaataacgatatcggatactggattgaaggttaccgttacggtaatttttgaatcggatagtttaagactgctgaatgtatcttccacatcaaacggagttttaatataaacgtatactgtagatggttctttaatagtgtcattaggagttaggccaatagaaatatcattaagttcactagaatatccagagtgtttcaaagcaattgtattattgatacaattattatataattcttcgccctcaatttcccaaataacaccgttacacgaagagatagatacgtgattaatacatttatatccaacatatggtacgtaactgaatcttcccatacctttaacttctggaagttccaaactcagaaccaaatgattaagcgcagtaatatactgatccctaatttcgaagctagcgatagcctgattgtctggaccatcgtttgtcataactccggatagagaaatatattgcggcatatataaagttggaatttgactatcgactgcgaagacattagaccgtttaatagagtcatccccaccgatcaaagaattaatgatagtattattcattttctatttaaaatggaaaaagcttacaataaactccgtagagaaatatctataatttgtgagttttccttaaagtaacagcttccgtaaacgccgtctttatctcttagtaagtttattgtatttatgaccttttccttatcttcatagaatactaaaggcaacaaagaaatttttggttcttctctaagagctacgtgagacttaaccatagaagccaacgaatccctacatattttagaacagaaataccctacttcaccacccttgtatgtctcaatactaataggtctaaaaaccaaatcttgattacaaaaccaacacttatcaattacactatttgtcttaatagacacatctgccatagatttataatactttggtagtatacaagcgagtgcttcttctttagcgggcttaaagactgctttaggtgctgaaataaccacatctggaaggcttactcgcttagccatttaattacggaactatttttttatacttctaatgagcaagtagaaaacctctcatctacaaaaacgtactcgtgtccataatcctctaccatagttacacgttttttagatctcatatgtgctaaaaagttttcccatactaattggttactattatttttcgtataatttttaacagtttgaggttttagatttttagttacagaagtgatatcgaatattttatccaaaaagaatgaataattaattgtcttagaaggagtgttttcttggcaaaagaataccaagtgcttaaatatttctactacttcattaatcttttctgtactcagattcagtttctcatcttttacttgattgattatttcaaagactaacttataatcctttttatttattctctcgttagccttaagaaaactagatacaaaatttgcatctacatcatccgtggatatttgatttttttccatgatatccaagagttccgagataatttctccagaacattgatgagacaataatctccgcaatacatttctcaaatgaataagtttattagacacgtggaagtttgactttttttgtacctttgtacatttttgaaataccgactcgcaaaaaatacaatattcatatccttgttcagatactataccgttatgtctacaaccgctacataatcgtagattcatgttaacactctacgtatctcgtcgtccaatattttatataaaaacattttatttctagacgttgccagaaaatcctgtaatatttttagttttttgggctgtgaataaagtatcgccctaatattgttaccgtcttccgccaatatagtagttaaattatccgcacatgcagaagaacaccgcttaggcggattcagtacaatgttatatttttcgtaccaactcatttaaatatcataatctaaaatagttctgtaatatgtctagcgctaatatattgatcataatcctgtgcataaattaagatacaacaatgtctcgaaatcatcgacatggcttcttccatagttagaagatcgtcgtcaaagttagcaacgtgattcatcaacatttgctgttttgaggcagcaaatactgaaccgtcgccattcaaccattcataaaaaccatcgtctgaatccattgataatttcttgtactggtttttgagagctcgcatcaatctagcatttctagctcccggattgaaaacagaaagaggatcgtacatccagggtccattttctgtaaatagaatcgtataatgtcccttcaagaaaatatcagacgatccacaatcaaagaattggtctccgagtttgtaacagacagcggactttaacctatacatgataccgtttagcataatttctggtgatacgtcaatcggagtatcatctattagagatctaaagccggtgtaacattctccaccaaacatattcttattctgacgtcgttctacataaaacatcattgctccattaacgataacaggggaatgaacagcactacccatcacattagttcccaatggatcaatgtgtgtaactccagaacatcttccatagcctatgttaggaggagcgaacaccactcttccactattgccatcgaatgccatagaataaatatccttggaattgatagaaatcggactgtcggatgttgtgatcatcttcataggattaacaactatgtatggtgccgcctgaagtttcatatcgtaactgatgccgtttataggtctagccacagaaaccaacgtaggtctaaatccaactatagacaaaatagaagccaatatctgttcctcatctgtcataacttgagagcatccagtatgaataatcttcattagatggggatctaccgcatcatcatcgttacaataaaaaattcccattctaatgttcataattgcttttctaatcatggtatgcatgtttgctctctgaatctctgtggaaattagatctgatacacctgtaatcactatcggattatcctccgtaagacgattaaccaacaacatataattataagactttacttttctaaattcataaagttgctggattaggctataggtgtctccatgtacatacgcgttctcgagcgcaggaagtttaataccgaatagtgccatcagaataggatgaatatagtaattagtttctggttttctataaataaaagacaaatcttgtgaactagacatatcggtaaaatgcatggattggaatcgtgtagtcgacagaagaatatgatgattagatggagagtatattttatctaactctttgagttggtcaccgattctaggactagctcgagaatgaataagtactaaaggatgagtacatttcacagaaacactagcattgttcaatgtgctctttacatgggtaaggagttgaaatagctcgtttctatttgttctgacaatatttagtttattcataatgttaagcatatcctgaatagtaaagttagatgtgtcatacttgttagtagttagatatttagcaattgcattcccatcatttctcaatctcgtactccaatcatgtgtagatgctacttcatctatagaaaccatacaatcctttttgataggctgttgagattgattatttcctgcacgtttaggtttggtacgttgatttctagcccctgcggatataaagtcatcgtctacaatttgggacaatgaattgcatacactacaagacaaagatttatcagaagtgtgaatatgatcttcatctaccaaagaaagagtttgattagtataactagattttagtcctgcgttagatgttaaaaaaacatcgctattgaccacggcttccattatttatattcgtagtttttactcgaaagcgtgattttaatatccaatcttattacttttggaatcgttcaaaacctttgactagttgtagaatttgatctattgccctacgcgtatactcccttgcatcatatacgttcgtcaccagatcgtttgtttcggcctgaagttggtgcatatctctttcaacattcgacatgagatccttaagggccatatcgtctagattttgttgagatgttgctcctggatttggattttgttgtgctgttgtacatactgtaccaccagtaggtgtaggagtacatacagtggccacaataggaggttgaggaggtgtaaccgttggagtagtacaagaaatacttccatccgattgttgtgtacatgtagttgttggtaacgtctgagaaggttgggtagatggcggtgtcgtcgtcttttgatctttattaaatttagagataatatcctgaacagcattgctcggcgtcaacgctggaaggagtgaactcgccggcgcatcagtatcttcagacagccaatcaaaaagattagacatatcagatgatgtattagtttgttgtcgtggttttggtgtaggagcagtactactaggtagaagaataggagccgatgtagctgttggaaccggctgtggagttatatgaatagttggttgtagcggttggataggctgtctgctggcggccatcatattatctctagctagttgttctcgcaactgtctttgataatacgactcttgagactttagtcctatttcaatcgcttcatcctttttcgtatccggatccttttcttcagaataatagattgacgactttggtgtagaggattctgccagcctctgtgagaacttgttaaagaagtccatttaaggctttaaaattgaattgcgattataagattaaatggcagacacagacgatattatcgactatgaatccgatgatctcaccgaatacgaggatgatgaagaagaggaagaagatggagagtcactagaaactagtgatatagatcccaaatcttcttataagattgtagaatcagcatccactcatatagaagatgcgcattccaatcttaaacatatagggaatcatatatctgctcttaaacgacgctatactagacgtataagtctatttgaaatagcgggtataatagcagaaagctataacttgcttcaacgaggaagattacctctagtttcagaattttctgacgaaacgatgaagcaaaatatgctacatgtaattatacaagagatagaggagggttcttgtcctatagtcatcgaaaagaacggagaattgttgtcggtaaacgattttgacaaagatggtctaaaattccatctagactatattatcaaaatttggaaacttcaaaaacgatattagaatttatacgaatatcgttctctaaatgtcacaatcaagtctcgcatgttcagcaatttattgtcgtactttatatcgtgttcattaacgatatcttgcaaaatagtaatgattctatcttccttcgatagatattcttcagagattattgtcttatattctttcttgttatcagatatgaatttgataagactttgaacattattgatacccgtctgtttaattttttctacagatattttagttttggcagattctatcgtatctgtcaatagacatccaacatcgacattcgacgtcaattgtctataaatcaacgtataaattttagaaataacattagcgaattgttgtgcgttgatgtcgttattctgaaacagtatgattttaggtagcattttcttaacaaagagaacgtatttattgttactcagttgaacagatgatatatccagattactaacgcatctgattccgtataccaaactttcagaagaaatggtatacaattgtttgtattcattcaatgtctctttttcagaaattagtttagagtcgaatactgcaataattttcaagagatagttttcatcagataagattttatttagtgtagatatgataaaactattgttttgttggagaacttgatacgccgcgttctctgtagtcgacgctctcaaatgggaaacaatctccattatttttttggaatcggatactatatcttcggtatcttgacgcagtctagtatacatagagttaagagagattagagtttgtacattaagcaacatgtctctaaatgtggctacaaacttttcctttttcacatcatctagtttattatataccgatttcacaacggcaccagatttaaggaaccagaatgaaaaactctgataactacaatatttcatcatagttacgattttatcatcttctatagttggtgtaatagcgcatacctttttctccaagactggaaccaacgtcataaaaatgtttaaatcaaaatccatatcaacatctgatgcgctaagaccagtctcgcgttcaagattatctttactaatggtgacgaactcatcgtataaaactctaagtttgtccattatttatttacagatttagttgtttaatttatttgtgctcttccagagttgggatagtatttttctaacgtcggtattatattattaggatctacgttcatatgtatcataatattaatcatccacgttttgataaatctatctttagcttctgaaataacgtatttaaacaaaggagaaaaatatttagctacggcatcagacgcaataacattttttgtaaatgtaacgtatttagacgacagatcttcgttaaaaagttttccatctatgtagaatccatcggttgttaacaccattcccgcgtcagattgaataggagtttgaatagtttgttttggaaatagatccttcaataacttatagttgggtgggaaaaaatcgattttatcactagactctttcttttttactatcattacctcatgaactatttcttgaatgagtatatgtattttctttcctatatcggacgcgttcattggaaaatataccatgtcgttaactataagaatatttttatcctcgtttacaaactgaataatatcagatgtagttcgtaaacgaactatatcatcaccagcacaacatctaactatatgatatccactagtttcctttagccgtttattatcttgttccatattagcagtcattccatcatttaagaaggcgtcaaagataatagggagaaatgacattttggattctgttacgactttaccaaaattaaggatatacggacttactatctttttctcaacgtcaatttgatgaacacacgatgaaaatgtgcttctatgagattgatcatgtagaaaacaacaagggatacaatatttccgcatatcatgaaatatattaagaaatcccaccttattatatttccccaaaggatccatgcacgtaaacattatgccgttatcattaataaagacttctttctcatcggatctgtaaaagttgttactgatttttttcattccaggatctagataattaataatgatgggttttctattcttattctttgtattttggcatatcctagaccagtaaacagtttccactttggtaaaatcagcagacttttgaacgctattaaacatggcattaatggcaataactaaaaatgtaaaatatttttctatgttaggaatatggtttttcactttaatagatatatggtttttggccaaaatgatagatatttttttatccgaggatagtaaaatattattagtcgccgtctctataaaaatgaagctagtctcgatatccaattttattctagaattgataggagtcgccaaatgtaccttatacgttatatctcccttgatgcgttccatttgtgtatctatatcggacacaagatctgtaaatagttttacgttattaatcatcacggtatcgccgtcgctagataacgctaatgtaccatccaagtcccaaatggagagatttaactgttcatcgtttagaataaaatgattaccggtcatattaataaagtgttcatcgtatctagataacaacgacttataattaatgtccaagtcttgaactcgctgaatgatcttttttaacccagttagttttagattggtacgaaatatattgttaaactttgattctacagtaatgtccaaatctagttgtggaaatacttccatcaacattgtttcaaacttgataatattattatctacatcttcgtacgatccaaattccggaatagatgtatcgcacgctctggccacccagataaccaaaaagtcacacgctccaggatatacattgtataaaaagctatcgttttttagtagggtttttttctgcgtgtatacgaagggattaaaaatagtattatcaacgtaactatattccaaattattcttatgagaatagataataatatcgtccttaatatctaacaaatttcctaaatatccctttaattgagtcattcgaagcgtcaatagaatatgtctcttaactatttccggctgttgtatatttaaatgacttcgtaaaaaataatatatgggcgacttctcatctatgtaatcatatggagtgagatatagggctcgttctacctcctgccccttacccacctgtaataccaattgcggacttactatatatcgcatatttatatcgtggggtaaagtgaaaatctactaccgatgatgtaagtcttacaatgttcgaaccagtaccagatcttaatttggaggcctccgtagaactaggggaggtaaatatagatcaaacaacacctatgataaaggagaatagcggttttatatcccgcagtagacgtctattcgcccatagatctaaggatgatgagagaaaactagcactacgattctttttacaaagactttattttttagatcatagagagattcattatttgttcagatgcgttgacgctgtaaaagacgtcactattaccaaaaaaaataacattatcgtggcgccttatatagcacttttaactatcgcatcaaaaggatgcaaacttacagaaacaatgattgaagcattctttccagaactatataatgaacatagtaagaaatttaaattcaactctcaagtatccatcatccaagaaaaactcggataccagtttggaaactatcacgtttatgattttgaaccgtattactctacagtagctctggctattcgagatgaacattcatctggcatttttaatatccgtcaagagagttatctggtaagttcattatctgaaataacatatagattttatctaattaatctaaaatctgatcttgttcaatggagtgctagtacgggcgctgtaattaatcaaatggtaaatactgtattgattacagtgtatgaaaagttacaactggtcatagaaaatgattcacaatttacatgttcattggctgtggaatcaaaacttccaataaaattacttaaagatagaaatgaattatttacaaaattcattaacgagttaaaaaagaccagttcattcaagataagcaaacgcgataaggatacgctactaaaatattttacttaggactggagttagaatttatagacgactcatttcgtttatcattgttactattattactattactatcattattagtgttggcattattagtattcttcttgtcatcttgttcagaaatatacagcaatgctatacctaatactaaatacattatcatgctcgcaatggctctaacaacaacgaaccaaaatgaatttggtcgtagcttttgttcacaaaaatacataaagaaatgtctacataaatctatggcgccattggctacttgaaatagcgccagtcctcctacagattttaatatagctgtataacatgacatttattcatcatcaaaagagacagagtcaccatctgtcatatttagattttttttcatgtgttcaaagtatcctctactcatttcattataatagtttatcatacttagaattttaggacggatcaatgagtaagacttgactagatcgtcagtagtaatttgtgcatcgtctattctgcatccgcttcgtcgaataatgtatagcatcgctttgagattctccatagctatcaagtctttatacaatgacatggaaatatctgtgaatactttatacttctccaacatcgatgccttaacatcatcgcctactttagcattgaaaatacgttctattgtgtagatggatgtagcaagatttttaaacaacaatgccatcttacacgatgattgcctcaagtctccaatcgtttgtttagaacgattagctacagagtccaatgcttggctgactagcatattattatctttagaaattgtattcttcaatgaggcgtttatcatatctgtgatttcgttagtcatattacagtctgactgggttgtaatgttatccaacatatcacctatggatacggtacacgtaccagcatttgtaataatcctatctaagatgttgtatggcattgcgcagaaaatatcttctcctgtaatatctccactctcgataaatctactcagattattcttaaatgccttattctctggagaaaagatatcagtgtccatcatttcattaatagtatacgcagaaaagataccacgagtatcaattctatccaagatacttatcggttccgagtcacagataatggtttcctctccttcgggagatcctgcatagaaatatctaggacaatagtttctatactgtctgtaactctgataatctctaaagtcactaactgataccatgaaattgagaagatcaaacgctgaagtaattaatttttctgcctcgtttttactacaactagttttcatcaatgtagtgacgatgtattgtttagttacttttggtctaatactgatgatagagatattattgcttcccataatggatcttctagtagtcaccttaaagcccattgatgcgaatagcagatagataaagtcttggtatgactcctttctaatatagtacggactacctttgtcacccaactttatacccacataagccataacaacctctttaatagccgtttcatgaggtttatcagccatgagcctgagtagttggaagaatctcatgaatcccgtctcagaaagtcctatatgcatgatagatttatctttcctgggaaactctcgtatagtcatagatgaaatactcttcaaagtttctgaaataagattagtaacagtcttacctccgactactctaggtaacaaacaaactctaataggtgttttctctgcggagataatatcagaaaggatagagcaataagtagtattattgtgattataaagaccgaatacataacaggtagaatttataaacatcatgtcctgaaggtttttagacttgtattcctcgtaatccataccgtcccaaaacatggatttggtaactttgatagccgtagatctttgttccttcgccaacaggttaaagaaattaataaagaatttgttgtttctatttatgtccacaaattgcacgtttggaagcgccacggttacattcactgcagcattttgaggatcgcgagtatgaagtacgatgttattgtttactggtatatctggaaagaaatctaccagtctaggaataagagattgatatcgcatagaaatagtaaagtttataatctcatcatcgaagagcattttgttaccattgtaataaatatccactctgtcatatgtataaatgaagtactgttcaaacatgatgagatgtttatatgttggcatagtagtgagatcgacgtttggtaatggcaatgtattaagattaactccataatgtctagcagcatctgcgatgttataagcgtcgtcaaagcggggtcgatcttgtattgttatatattgtctaacacctataagattatcaaaatcttgtctgcttaatacaccgttaacaatttttgccttgaattcttttattggtgcattaataacatccttatagaggatgttaaacaaataagtgttatcaaagttaagatctggatatttcttttctgctagaacatccattgagtcggagccatctggtttaatataaccaccgataaatctagctctgtattctgtatccgtcaatctaatattaagaaggtgttgagtgaaaggtggaagatcgtaaaagctgtgagtattaatgataggattagtttccgaactaatgttaattggggtattaataatatctatatttccagcgttaagtgtaacattaaacagttttaattcacgtgacgtggtatcaattaaataattaatgcccaatttggatatagcagcctgaagctcatcttgtttagttacggatcctaatgagttattaagcaatatatcgaacggatgaacgaaggttgttttaagttggtcacatactttgtaatctagacatagatgcggaagaacggtagaaactatacgaaataaatattcagagtcctctaattgatcaagagtaactattgacttaataggcatcatttatttagtattaaatgacgaccgtaccagtgacggatatacaaaacgatttaattacagagttttcagaagataattatccatctaacaaaaattatgaaataactcttcgtcaaatgtctattctaactcacgttaacaacgtggtagatagagaacataatgccgccgtagtgtcatctccagaggaaatatcctcacaacttaatgaagatctatttccagatgatgattcaccggccactattatcgaacgagtacaacctcatactactattattgacgatactccacctcctacgtttcgtagagagttattaatatcggaacaacgtcaacaacgagaaaaaagatttaatattacagtatcgaaaaatgctgaagcaataatggaatctagatctatgataacttctatgccaacacaaacaccatccttgggagtagtttatgataaagataaaagaattcagatgttagaggatgaagtggttaatcttagaaatcaacgatctaatacaaaatcatctgataatttagataattttaccaaaatactatttggtaagactccgtacaaatcaacagaagttaataagcgtatagccatcgttaattatgcaaatttgaacgggtcccccttatcagtcgaggacttggatgtttgttcggaggatgaaatagatagaatctataaaacgattaaacaatatcacgaaagtagaaaacgaaaaattatcgtcactaacgtgattattattgtcataaacattatcgagcaggcattgctaaaactcggatttgaagaaatcaaaggactgagtaccgatatcacttcagaaattatcgatgtggagatcggagatgactgcgatgctgtagcatctaaactaggaatcggtaacagtccggttcttaatattgtattgtttatactcaagatattcgttaaacgaattaaaattatttaatttaatacattcccatatccagacaacaatcgtctggattaatctgttcctgtcgtctcataccggacgacatattaatctttttattagtgggcatctttttagatggtttctttttcccagcattaactgagtcgatacctagaagatcgtgattgatctctccgaccattccacgaacttctaattggccgtctctgacggtaccataaactattttaccagcattagtaacagcttggacaatctgaccatccatcgcattgtacgatgtagtagtaactgttgttctacgtctaggagcaccagaagtatttttggagcccttggatgttgatgtagaagaagacgaggattttgattttggtttacatgtaatacattttgaactctttgattttgtatcacatgcgccggcagtcacatctgtttgagaattaagattattgttgcctcctttgacggctgcatctccaccgatttgcgctagtagatttttaagctgtggtgtaatcttattaactgtttcgatataatcatcgtaactgcttctaacggctaaattttttttatccgccatttagaagctaaaaatatttttatttatgcagaagatttaactagattatacaatgaactaatatgatccttttccagattatttacaaacttggtattttttggttctggaggaggcgaatttaaattcggacttggattcggattttgtaagttcttgatcttattatacatcgagtataggatggcgacagtaactgctacacaaataccgatcaaaagaagaataccaatcatttattgacaataacttcactattgatcaagtatgcaatatatcatcttttcactaaataagtagtaataatgattcaacaatgtcgagatatatggacgataataatttagttcatggaaatatcgctatgattggtgtgaatgactccgctaactctgtggggtgcgcagtgctttccccacatagaataaattagcattccgactgtgataataataccaagtataaacgccataatactcaatactttccatgtacgagtgggactggtagacttactaaagtcaataaaggcgaagatacacgaaagaatcaaaagaatgattccagcgattagcacgccggaaaaataatttccaatcataagcatcatgtccatttaactaataaaaattttaaatcgccgaatgaacaaagtggaatataaaccatataaaaacaatagtttgtactgcaaaaataatatctatttttgttttcgaagatatggtaaaattaaatagtagtacacagcatgttataactaacagcagcaacggctcgtaattacttatcatttactagacgaaaaggtggtgggatattttcttgctcaaataatacgaatatatcacccatccattttatgcgatgtttatatactctaatctttaatagatctatagacgacgggtttaccaacaatatagattttatcgattcatctaatttaaacccttccttaaacgtgaatgatctattatctggcataacgatgaccctacctgatgaatcggacaatgtactgggccatgtagaataaattatcaacgaattatcgtctacgaacatttatatcatttgttttaattttaggacgcgaataaatggatataaaatagaaaataacagatattacaaccagtgttatggccgcgcccaaccaggtaggcagttttattttatcttttactacaggttctcctggatgtacgtcaccaacggcggacgtagttctagtacaattagacgtaagttccgcttgggaattttttaacgctaaagagttaacgttaatcgtgcacccaacgtatttacatctagttcgttgaacatcttgattataatataaccattttctatctctagattcgtcagtgcactcatgtaaccaacataccctaggtcctaaatatttatctccggaattagattttggataattcgcgcaccaacaatttctatttcctttatgatcgttacaaaagacgtataatgccgtatccccaaaagtaaaataatcaggacgaataattctaataaactcagaacaatatctcgcatccatatgtttggagcaaatatcggaataagtagacatagccggtttccgttttgcacgtaaccattctaaacaattggggtttccaggatcgtttttacaaaatccagtcatgaaatcatcacaatgttctgtcttgtaattattattaaatatttttggacagtgtttggtatttgtcttagaacaacattttgctacgctatcactatcgcccaggagataatccttttttataaaatgacatcgttgcccggatgctatataatcagtggcgtgttttaaatccttaatatattcaggagttacctcgttctgataatagattaatgatccaggacgaaatttgaaagaactacatggttctccatgaattaatacatattgtttagcaaattcaggaactataaaactactacaatgatctatcgacataccatctatcaaacaaaacttgggtttaatttctcccggagatgtttcataatagtacgtataactttcttctgcaaacttaacagctctattatattcaggataattaaaacctaattccatatatttgtctcgtatatctgctattcctggtgctattttgattctattaagagtaacagctgcccccattcttaataatcgtcagtatttaaactgttaaatgttggtatatcaacatctaccttatttcccgcagtataaggtttgttgcaggtatactgttcaggaatggttacatttatacttcttctatagtcctgtctttcgatgttcatcacatatgcaaagaacagaataaacaaaataatgtaagaaataatattaaatatctgtgaattcgtaaatacattgattgccataataattacagcagctacaatacacacaatagacattcccacagtgttgccattacctccacgatacatttgagttactaagcaataggtaataactaagctagtaagaggcaatagaaaagatgagataaatatcatcaatatagagattagaggagggctatatagagccaagacgaacaaaatcaaaccgagtaacgttctaacatcattatttttgaagattcccaaataatcattcattcctccataatcgttttgcatcatacctccatctttaggcataaacgattgctgctgttcctctgtaaataaatctttatcaagcactccagcacccgcagagaagtcgtcaagcatattgtaatatcttaaataactcatttatatattaaaaaatgtcactattaaagatggagtataatctttatgccgaactaaaaaaaatgacttgtggtcaacccctaagtctttttaacgaagacggggatttcgtagaagttgaaccgggatcatcctttaagtttctgatacctaagggattttacgcctctccttccgtaaagacgagtctagtattcgagacattaacaacgaccgataataaaatcactagtatcaatccaacaaatgcgccaaagttatatcctcttcaacgcaaagtcgtatctgaagtagtttctaatatgaggaaaatgatcgaatcaaaacgtcctctatacattactcttcacttggcgtgtggatttggtaagactattaccacgtgttatcttatggctacacacggtagaaaaaccgtcatttgcgtacccaataaaatgttaatacatcaatggaagacacaggtagaggcagtcggattggaacataagatatccatagatggagtaagtagtctattaaaggaactaaagactcaaagtccggatgtattaatagtagtcagtagacatctgacaaacgatgccttttgtaaatatatcaataagcattatgatttgttcatcttggatgaatcacatacgtataatctgatgaacaatacagcagttacaagatttttagcgtattatcctccgatgatgtgttattttttaactgctacacctagaccatctaaccgaatttattgtaacagtattattaatattgccaagttatccaatctaaaaaaaactatctatgcagtagatagtttttttgagccatattccacagataatattagacatatggtaaaacgactagatggaccatctaataaatatcatatatataccgagaagttattatctgtagacgagcctagaaatcaacttattcttgataccctggtagaagaattcaagtcaggaactattaatcgcattttagttattactaaactacgtgaacatatggtattattctacaaacgattattagattttttcggaccagaggttgtatttataggagacgcccaaaatagacgtactccagatatggtcaaatcaatcaaggaactaaatagatttatattcgtatccaccttattttattccggtactggtttagatattcctagtttggattcgttgttcatttgctcggcagtaatcaacaatatgcaaatagagcaattactagggagggtatgtcgagaaacagaactattagataggacggtatatgtatttcctaacacatccatcaaagaaataaagtacatgataggaaatttcatgcaacgaattattagtctgtctgtagataaactaggatttaaacaaaaaagttatcggaaacatcaagaatccgatcccacttctgcatgtacaacatcatccagagaagaacgtgtattaaatagaatatttaactcgcaaaatcgttaagaagtttaagcgacgatccgcatgctgcgcaggccagtgtattacccctcatagtattaatataatccaatgatacttttgtgatgtcggaaatcttaaccaatttagactgacaggcagaacacgtcatgcaatcatcatcgtcatcgataactgtagtcttgggcttctttttgcgactcttcattccggaacgcacattggtgctatccatttaggtagtaaaaaataagtcagaatatgccctataacacgatcgtgcaaaacctggtatatcgtctctatctttatcacaatatagtgtatcgacatttttattattattgacctcgtttatcttggaacatggaatgggaacatttttgttatcaacggccatctttgccttaattccagatgttgtaaaattataactaaacagtctatcatcgacacaaatgaaattcttgtttagacgtttgtagtttacgtatgcggctcgttcgcgtctcattttttcagatattgcaggtactataatattaaaaataagaatgaaataacataggattaaaaataaagttatcatgacttctagcgctgatttaactaacttaaaagaattacttagtctgtacaaaagtttgagattttcagattctgcggctatagaaaagtataattctttggtagaatggggaacatctacttactggaaaataggcgtgcaaaaggtagctaatgtcgagacgtcaatatctgattattatgatgaggtaaaaaataaaccgtttaatattgatccgggctattacattttcttaccggtatattttgggagcgtctttatttattcgaagggtaaaaatatggtagaacttggatctggaaactcttttcaaataccagatgatatgcgaagtgcgtgtaacaaagtattagacagcgataacggaatagactttctgagatttgttttgttaaacaatagatggataatggaagatgctatatcaaaatatcagtctccagttaatatatttaaactagctagtgagtacggattaaacatacccaaatatttagaaattgaaatagaggaagacacattatttgacgacgagttatactctattatagaacgctctttcgatgataaatttccaaaaatatccatatcgtatattaagttgggagaacttagacggcaagttgtagactttttcaaattctcattcatgtatattgagtccatcaaggtagatcgtataggagataatatttttattcctagcgttataacaaaatcaggaaaaaagatattagtaaaagatgtagaccatttaatacgatccaaggttagagaacatacatttgtaaaagtaaaaaagaaaaacacattttccattttatacgactatgatggaaacggaacagaaactagaggagaagtaataaaacgaattatagacactataggacgagactattatgttaacggaaagtatttctctaaggttggtagtgcaggcttaaagcaattgactaataaattagatattaatgagtgcgcaactgtcgatgagttagttgatgagattaataaatccggaactgtaaaacgaaaaataaaaaaccaatcagcatttgatttaagcagagaatgtttgggatatccagaagcggattttataacgttagttaataacatgcggttcaaaatagaaaattgtaaggttgtaaatttcaatattgaaaatactaattgtttaaataacccgagtattgaaactatatatggaaactttaaccagttcgtctcaatctttaatgtcgtcaccgatgtcaaaaaaagattattcgagtgaaataatatgcgcctttgatataggtgcaaaaaatcctgccagaactgttttagaagtcaaggataactccgttagggtattggatatatcaaaattagactggagttctgattgggaaaggcgcatagctaaagatttgtcacaatatgaatacactacagttcttctagaacgtcagcctagaaggtcgccgtatgttaaatttatctattttattaaaggctttttatatcatacatcggctgccaaagttatttgcgtctcgcctgtcatgtctggtaattcatatagagatcgaaaaaagagatcggtcgaagcatttcttgattggatggacacattcggattgcgagactccgttccggatagacgcaaattagacgatgtagcggatagtttcaatttggctatgagatacgtattagataaatggaatactaattatacaccttataataggtgtaaatctagaaattacataaaaaaaatgtaataacgttagtaacgccattatggataatctatttacctttctacatgaaatagaagatagatatgccagaactatttttaactttcatctaataagttgcgatgaaataggagatatatatggtcttatgaaagaacgcatttcctcagaggatatgtttgataatatagtgtataataaagatatacatcctgccattaagaaactagtgtattgcgacatccaacttactaaacacattattaatcagaatacgtatccggtatttaacgattcttcacaagtgaaatgttgtcattatttcgacataaactcagataatagcaatattagctctcgtacagtagagatatttgagagggaaaagtcatctcttgtatcatatattaaaactaccaataagaagagaaaggtcaattacggcgaaataaagaaaactgttcatggaggcactaatgcaaattacttttccggtaaaaagtctgacgagtatctgagtactacagttagatccaacattaatcaaccttggatcaaaaccatttctaagagaatgagagtagatatcattaatcactctatagtaacgcgtggaaaaagctctatattacaaactatagaaattatttttactaatagaacatgtgtgaaaatattcaaggattctactatgcacattattctatccaaggacaaggatgaaaaggggtgtatacacatgattgacaaattattctatgtctattataatttatttctgttgttcgaagatatcatccaaaacgagtactttaaagaagtagctaatgttgtaaaccacgtactcacggctacggcattagatgagaaattattcctaattaagaaaatggctgaacacgatgtttatggagttagcaatttcaaaatagggatgtttaacctgacatttattaagtcgttggatcataccgttttcccctctctgttagatgaggatagcaaaataaagttttttaaggggaaaaagctcaatattgtagcattacgatctctggaggattgtataaattacgtgactaaatccgagaatatgatagaaatgatgaaggaaagatcgactattttaaatagcatagatatagaaacggaatcggtagatcgtctaaaagaattgcttctaaaatgaaaaaaaacactgattcagaaatggatcaacgactcggatataagtttttggtgcctgatcctaaagccggagttttttatagaccgttacatttccaatatgtatcgtattctaattttatattgcatcgattgcatgaaatcttgaccgtcaagcggccactcttatcgtttaagaataatacagaacgaattatgatagaaattagcaatgttaaagtgactcctccagattactcacctataatcgcgagtattaaaggtaagagttatgacgcattagccacgttcactgtaaatatctttaaagaggtaatgaccaaagagggtatatccatcactaaaataagtagttatgagggaaaagattctcatttgataaaaattccgctactaataggatacgggaataaaaatccacttgatacagccaagtatcttgttcctaatgtcataggtggagtctttatcaataaacaatctgtcgaaaaagtaggaattaatctagtagaaaagattacaacatggccaaaatttagggttgttaagccaaactcattcactttctcgttttcctccgtatcccctcctaatgtattaccgacaagatatcgccattacaagatatctctggatatatcacaattggaagcgttgaatatatcatcgacaaagacatttataacggtcaatattgttttgctgtctcaatatttatctagagtgagtctagaattcattagacgtagtttatcatacgatatgcctccagaagttgtctatctagtaaacgcgataatagatagtgctaaacgaattactgaatctattactgactttaatattgatacatacattaatgacctggtggaagctgaacacattaaacaaaaatctcagttaacgattaacgagttcaaatatgaaatgctgcataactttttacctcatatgaactatacacccgatcaactaaagggattttatatgatatctttactaagaaagtttctctactgtatcttccacacttctagatatccagatagagattcgatggtttgtcatcgcatcctaacgtacggcaaatattttgagacgttggcacatgatgaattagagaattacataggcaacatccgaaacgatatcatgaacaatcacaagaacagaggcacttacgcggtaaacattcatgtactaacaactcccggacttaatcacgcgttttctagcttattgagtggaaagttcaaaaagtcagacggtagttatcgaacacatcctcactattcatggatgcagaatatttctattcctaggagtgttggattttatccggatcaagtaaagatttcaaagatgttttctgtcagaaaataccatccaagtcaatatctttacttttgttcatcagacgttccggaaagaggtcctcaggtaggtttagtatctcaattgtctgtcttgagttccattacaaatatactaacgtctgagtatttggatttggaaaagaaaatttgtgagtatatcagatcatattataaagatgatataagttactttgaaacaggatttccaatcactatagaaaatgctctagtcgcatctcttaatccaaatatgatatgtgattttgtaactgactttagacgtagaaaacggatgggattcttcggtaacttggaggtaggtattactttagttagggatcacatgaatgaaattcgcattaatattggagcgggaagattagtcagaccattcttggttgtggataacggagagctcatgatggatgtgtgtccggagttagaaagcagattagacgacatgacattctctgacattcagaaagagtttccgcatgtcatcgaaatggtagatatagaacaatttacttttagtaacgtatgtgaatcggttcaaaaatttagaatgatgtcaaaggatgaaagaaagcaatacgatttatgtgactttcctgccgaatttagagatggatatgtagcatcttcactagtgggaatcaatcacaattctggacccagagctattcttggatgtgctcaagctaaacaagctatctcttgtctgagttcggatatacgaaataaaatagacaatggaattcatttgatgtatccagagaggccaattgtcattagtaaggctttagaaacttcaaagattgcggctaattgcttcggacaacatgttactatagcattaatgtcgtacaaaggtatcaatcaagaggatggaattatcatcaaaaaacaatttattcagagaggcggtctcgatatagttaccgcaaagaaacatcaagtagaaattccgttggaaaactttaataacaaagaaagagataggtctaacgcctattcaaaattagaaagtaatggattagttagactgaatgctttcttggaatccggagacgctatggcacgaaatatctcatcaagaactcttgaagatgattttgctagagataatcagattagcttcgatgtttccgagaaatataccgatatgtacaaatctcgcgttgaacgagtacaagtagaacttactgacaaagttaaggtacgagtattaaccatgaaagaaagaagacccattctaggagacaaatttaccactagaacgagtcaaaagggaacagtcgcgtatgtcgcggatgaaacggaacttccatacgacgaaaatggtatcacaccagatgtcattattaattctacatccatcttctctagaaaaactatatctatgttgatagaggttattttaacagccgcatattctgctaagccgtacaacaataagggagaaaaccgacctgtctgttttcctagtagtaacgaaacatccatcgatacatatatgcaattcgctaaacaatgttatgagcattcaaatccgaaattgtctgatgaagaattatcggataaaatcttttgtgaaaagattctctatgatcctgaaacggataagccttatgcatccaaagtattttttggaccaatttattacttgcgtctgagacatttaactcaggacaaggcaaccgttagatgtagaggtaaaaagacgaagctcattagacaggcgaatgagggacgaaaacgtggaggaggtatcaagttcggagaaatggagagagactgtttaatagcgcatggtgcagccaatactattacagaagttttgaaagattcggaagaagattatcaagatgtgtatgtttgtgaaaattgtggagacatagcagcacaaatcaagggtattaatacatgtcttagatgttcaaaacttaatctctctcctctcttaacaaaaattgataccacgcacgtatctaaagtatttcttactcaaatgaacgccagaggcgtaaaagtcaaattagatttcgaacgaagacctccttcgttttataaaccattagataaagttgatctcaagccgtcttttctggtgtaatattctagtttggtagtagatacatatcaatatcatcaaattcgagatccgaattataaaatgggcgtggattgttaactatagaatcggacgtctgatattcgaaaatctgtggagtttcaggttttggtggaggtgtaactgctacttgggatactgaagtctgatattcagaaagctgggggatgttctggttcgacatccaccgatggtgttacaccactactaatcggttcggtaacgtctgtggacgatggaggcaccacttctacagaacctgtagcctcagttgtcaacggagatacatttttaatgcgagaaaatgtataatttggtaatggtttctcatgtggatctgaagaagaggtaagatatctactagaaagataccgatcacgttctagttctcttttgtagaacttaactttttctttctcagcatctagttgatattccaacctcttcacgttactacgttcagattccaattcacgttcgcatgggttacctccgcagtttttacgagcgatttcacgttcagccttcatgcgtctctccctctctttatcgagtttatcagagcagtctttctgaaggcgatcgaactccataaatttctccaacgctttgattgtttccatagatttccgaagttcagcttttaggactgtgattctttttctttcgaattcacagctggatgtacaaccgtttccattaccgccatctctaagtttcttttctagatcggcaacatttcatccccatgccttttacattcctcgagtctactgtcgtcgaaatatcgttccagctccttttcgacatcaataactttagcacgttgtctctcaagctctcttttgtagttatctgattccctggcacgtttaagatcttcatgcaattgagtcagctcttaacttcctctcttgcttcttcgtcatagtacgcgcaatcactgtgagatccattgttaccacgtctacactcggcgagctcgcgtttaagagattcaatttcccgtttgtattggtccatgtttccattgctaccaccattagatttacaggctgctagttgtcgttcgagatcagaaatacgggttttcttggaattgatttcgtcgatgtacttggcatcgaaacacttattaagttctttttccaattctacgattttatttctttcgcgagtcaattccctcctgtagtaactatctgttttgtcagattcacgctctctacgtagactttcttgcaagttactaatttgttccctagcacgtccgagtttagttttatatgctgaatagagttctgattcatcctttgagcagatctctagcgatcgtttaagattcctaattctagtctttagcctatttacctcctcagaagatgttccgttaccgttgcgtttacactcgttaagctgtctatcaagatccatgattctatctctaagacgttgcatctctctttccatatcagcattgctttcattattacgtctgcagtcactcaactgtctttcaatatctgagattctatctctaagacgtcgcatctctctctgtttcggcattggtttcattattacgtttacagtcgttcaactgtctttcaagatctgatattctagattggagtctgctaatctctgtagcattttcacggcattcactcagttgtctttcaagatctgaaattttagattggagtctgctaatctctgtaagatttcctcctccgctctcgatgcagtcggtcaacttattctctagttctctaatacgcgaacgcagtgcatcaacttcttgcgtgtcttcctggttgcgtgtacattcatcgagtctagattcgagatctctaacgcgtcgtcgttcttcctcaagttctctgcgtactacagaaagcgtgtccttatcttgttgatatttagcaatttctgattctagagtactgattttgcttacgtagttactaatatttgtcttggccttatcaagatcctccttgtatttgtcgcattccttgatatccctacgaagtctggacagttcccattcgacattacgacgtttatcgatttcagctcggagatcgtcatcgcgttgttttagccacatacgactgagttcaagttctcgttgacaagatccatctacttttccattcctaatagtatccagttccttttctagttctgaacgcatttctcgttccctatcaagcgattctctcaattctcggatagtcttcttatcaatttctaataaatctgaaccatcatctgtcccattttgaatatccctgtgttctttgatctcttttgtaagtcggtcgattctttcggttttataaacagaatccctttccaaagtcctaatcttactgagtttatcactaagttctgcattcaattcggtgagttttctcttggcttcttccaactctgttttaaactctccactatttccgcattcttcctcgcatttatctaaccattcaattagtttattaataactagttggtaatcagcgattcctatagccgttcttgtaattgtgggaacataattaggatcttctaatggattgtatggcttgatagcatcatctttatcattattagggggatggacaaccttaattggttggtcctcatctcctccagtagcgtgtggttcttcaataccagtgttagtaataggcttaggcaaatgcttgtcgtacgcgggcacttcctcatccatcaagtatttataatcgggttctacttcagaatattcttttctaagagacgcgacttcgggagttagtagaagaactctgtttctgtatctatcaacgctggaatcaatactcaagttaaggatagcgaatacctcatcgtcatcatccgtatcttctgaaacaccatcatatgacatttcatgaagtctaacgtattgataaatagaatcagatttagtattaaacagatccttaacctttttagtaaacgcatatgtatattttagatctccagatttcataatatgatcacatgccttaaatgtcagtgcttccatgatataatctggaacactaatgggtgacgaaaaagatacagcaccatatgctacgttgataaataaatctgaaccactaagtagataatgattaatgttaagaaagaggaaatattcagtgtataggtatgtcttggcgtcatatcttgtactaaacacgctaaacagtttgttaatgtgatcaatttccaatagattaattagagcagcgggaataccaacaaacatattaccacatccgtattttctatgaatatcacatatcatgttaaaaaatcttgatagaagagcgaatatctcgtctgacttaatgagtcgtagttcagcagcaacataagtcataactgtaaatagaacatactttcctgtagtgttgattctagactccacatcaacaccattattaaaaatagttttatatacatctttaatctgctctccgttaatcgtcgaacgttctagtatacggaaacactttgatttcttatctgtagttaatgacttagtgatatcacgaagaatattacgaattacatttcttgtttttcttgagagacctgattcagaactcaactcatcgttccatagtttttctacctcagtggcgaaatctttggagtgcttggtacatttttcaataaggttcgtgacctccatttattataaaaaatttattcaaaacttaactacaatcgggtaattataaaatcgtagatctcccatgtggcggaatactaccatctatcgcatgtggatggacagtaggtaatggccatgggaacagtaatgtttgcatatttatctttcttgccagtattactgcatattgtcccaatgtttcgatgtgatgttctaacctatcaactgccgctgtatcacaacaatagtgtccgatgaaattaagattatgatccaatgtgtttaatatatgattatcaagtcttatacgatccgcgtcttttttgacaggatcaggttcttctacaggaagaagtttcggcctcttatgatattcatgtctgggaaacggtggtctagggtgaggctccggtatcggagtgggttttggattataatcatcatcgtctatgacatcatcttcgacttcgatatttattttgctatcttgatgatgtcctgtatcagttgcattttcagcactcgactgaatattagcgcattcattgtctattattaccatatttctaaacccaaaatgtatgtgttgaacatcagtactatcgttgatgagtcttatagcatgaattcgcttatcgttatcgggtttatcttctgtcaccttagcaattccttttttattaaactctacataatcatatccatttctattgtttgttctaatataaacgagtatagcatcattgctaaatttttcaatagtatcaaaaacagaatatcctaaaccatataatatatattcaggaacactcaaactaaatgtccaggattctcctaaatacgtaaactttaatagtgcgaaatcattcaaaaatctaccacttatagatagatagtacataaatgcgtatagtagtctacctatctctttattatgaaaaccggcattacgatcatatatgtcgtgatatacctgtgatccgtttacgttaaaccataaatacatgggtgatcctataaacatgaatttatttctaattctcagagctatagttaattgaccgtgtaatatttgcttacatgcatacttgatacgcttattaataagatttttatcattgctcgttatttcagaatcgtatatataaggagtaccatcgtgattcttaccagatattatacaaaatactatatataaaatatattgacccacgttagtaatcatataaatgtttaacgttttaaattttgtattcaatgatccattatcatacgctatcatggtcttgtaatattcattctttaaaatataatattgtgttagccattgcattggagctcctaatggagattttctattctcatccattttaggataggctttcataaagtccctaataacttcgtgaataatgtttctatgttttctactgatgcatgtatttgcttcgatttttttatcccatgtttcatctatcatagatttaaacgcagtaatgctcgcaacattaacatcttgaaccgttggtacaattccgttccataaatttataatgttcgccatttatataactcattttttgaatatacttttaattaacaaaagagttaagttactcatatggacgccgtccagtctgaacatcaatctttttagccagagatatcatagccgctcttagagtttcagcgtgattttccaacctaaatagaacttcatcgttgcgtttacaacacttttctatttgttcaaactttgttgttacattagtaatctttttttccaaattagttagccgttgtttgagagtttcctcattgtcgtcttcatcggctttaacaattgcttcgcgtttagcctctggctttttagcagcctttgtagaaaaaaattcagttgctggaattgcaagatcgtcatctccggggaaaagagttccgtccatttaaagtacagattttagaaactgacactctgcgttatttatatttggtacaacacatggattataaatattgatgttaataacatcagaaaatgtaaagtctatacattgttgcatcgtgttaaattttctaatggatctagtattattgggtccaacttctgcctgaaatccaaatatggaagcggatacaaaaccgtttcctggataaaccacacatctccacttttgctttacatcagaaattgtgtcgttgacatcttgaactctcctatctaatgccggtgttccacctatagattttgaatattcgaatgctgcatgagtagcattaaattccttaatattgccataattttcatatattgagtaaccctggataaaaagtaaacacaccgcagccgtcgctaccacaataaaaaaaattgatagagagttcatttataatctattagaagctgacaaaatttttttacacgcatcagacaatgctttaataaatagttcaacatctacttttgtcatatcgaaccgatggtatgattctaacctagaattacatccgaaaaagttgactatgttcatagtcattaagtcattaacaaacaacattccagactctggattataagacgatactgtttcgtcacaattacctaccttaatcatgtgattatgaatattggctattagagcaccttctaagaaatctataatatctttgaaacacgatttaaaatcaaaccacgaatatacttctacgaagaaagttagtttacccataggagaaataactataaatggagatctaaatacaaaatccggatctatgatagttttaacattattatattctctattaaatacctccacatctaaaaatgttaattttgaaactatgtcttcgtttattaccgtacctgaactaaacgctataagctctattgtttgagaactctttaaacgatattcttgaaatacatgtaacaaagtttcctttaactcggtcggtttatctaccatagttacagaatttgtatccttatctataatataataatcaaaatcgtataaagttatataattatcgcgttcagattgggatcttttcaaatagactaaaaaccccatttctctagtaagtatcttatgtatatgtttgtaaaatatcttcatggtgggaatatgctctaccgcagttagccattcctcattgacagcggtagatgtattagacaaaactattccaatgtttaacaagggccattttacgagattattaaatccttgtttgataaatgtagccaatgagggttcgagttcaacgacgattgaattctcttcccgcggatgctgcatgatgaacgacgggatgttgttcgattgatttggaattctttttcgactttttgtttatattaaatattttaaaatttatagcggatagcaattcatgtaccacggataatgtagacgcgtattgcgcatcgatatctttattattagataaatttatcaataaatgtgagaagtttgcctcgttaaggtcttccatttaaatattatataaacatttgtgtttgtaacttattcgtcttttatggaatagttttttactagtaaagctgcaattacacactttgtccgtaaaacataaatataaacaccagcttttatcaatcgttccaaaaagtcgacggcggacatttttaacatggcatctattttaaatacacttaggtttttggaaaaaacatcattttataattgtaacgattcaataactaaagaaaagattaagattaaacataagggaatgtcatttgtattttataagccaaagcattctaccgttgttaaatacttgtctggaggaggtatatatcatgatgatttggttgtattggggaaggtaacaattaataatctaaagatgatgctattttacatggatttatcatatcatggagtgacaagtagtggagcaatttacaaattgggatcgtctatcgatagactttctctaaataggactattgttacaaaagttaataattatgatgatacattttttgacgacgatgattgatcgctattgcacaattttgtttttgtactttctaatatagtgtttaggttctttttcatatgagaatattgatttactaaaatatctatgtttaacttttgttctatgacgtccttatcggcggtatcggtacatatacgtaattcaccttcacaaaatacggagtcttcgataataatagccaatcgattattggatctagctgtctgtatcatattcaacatgtttaatatatcctttcgtttcccctttacaggcatcgatcgtagcatattttccgcgtctgatatggaaatgttaaaactacaaaaatgcgtaatgttagcccgtcctaatattggtacgtgtctataagtttggcatagtagaataatagacgtgtttaaatgccttccaaagtttaagaattctattagagtattgcattttgatagtttatcgcctacatcatcaaaaataagtaaaaagtgtgctgattttttatgattttgtgcgacagcaatacatttttctatgttacttttagttcgtatcagattatattctagagattcctgactactaacgaaattaatatgatttggccaaatgtatccatcataatctgggttataaacgggtgtaaacaagaatatatgtttatattttttaactagtgtagaaaacagagatagtaaatagatagtttttccagatccagatcctcctgttaaaaccattctaaacggcatttttaataaattttctcttgaaaattgtttttcttggaaacaattcataattatatttacagttactaaattaatttgataataaatcaaaatatggaaaactaaggttgttagtagggaggagaacaaagaaggcacatcgtgatataaataacatttattatcatgatgacaccagaaaacgacgaagagcagacatctgtgttctccgctactgtttacggagacaaaattcagggaaagaataaacgcaaacgcgtgattggtctatgtattagaatatctatggttatttcactactatctatgattaccatgtccgcgtttctcatagtgcgcctaaatcaatgcatgtctgctaacgaggctgctattactgacgccgctgttgccgttgctgctgcatcatctactcatagaaaggttgcgtctagcactacacaatatgatcacaaagaaagctgtaatggtttatattaccagggttcttgttatatattacattcagactaccagttattctcggatgctaaagcaaattgcactgcggaatcatcaacactacccaataaatccgatgtcttgactacctggctcattgattatgttgaggatacatggggatctgatggtaatccaattacaaaaactacatccgattatcaagattctgatgtatcacaagaagttagaaagtatttttgtgttaaaacaatgaactaatatttatttttgtacattaataaatgaaatcgcttaatagacaaactgtaagtaggtttaagaagttgtcggtgccggccgctataatgatgatactctcaaccattattagtggcataggaacatttctgcattacaaagaagaactgatgcctagtgcttgcgccaatggatggatacaatacgataaacattgttatttagatactaacattaaaatgtctacagataatgcggtttatcagtgtcgtaaattacgagctagattgcctagacctgatactagacatctgagagtattgtttagtattttttataaagattattgggtaagtttaaaaaagaccaatgataaatggttagatattaataatgataaagatatagatattagtaaattaacaaattttaaacaactaaacagtacgacggatgctgaagcgtgttatatatacaagtctggaaaactggttaaaacagtatgtaaaagtactcaatctgtactatgtgttaaaaaattctacaagtgacaacaaaaaatgaattaataataagtcgttaacgtacgccgccatggacgccgcgtttgttattactccaatgggtgtgttgactataacagatacattgtatgatgatctcgatatctcaatcatggactttataggaccatacattataggtaacataaaaactgtccaaatagatgtacgggatataaaatattccgacatgcaaaaatgctactttagctataagggtaaaatagttcctcaggattctaatgatttggctagattcaacatttatagcatttgtgccgcatacagatcaaaaaataccatcatcatagcatgcgactatgatatcatgttagatatagaagataaacatcagccattttatctattcccatctattgatgtttttaacgctacaatcatagaagcgtataacctgtatacagctggagattatcatctaatcatcaatccttcagataatctgaaaatgaaattgtcgtttaattcttcattctgcatatcagacggcaatggatggatcataattgatgggaaatgcaatagtaattttttatcataaaagttgtaaagtaaataataaaacaataaatattgaactagtagtacgtatattgagcaatcagaaatgatgctggtacctcttatcacggtgaccgtagttgcgggaacaatattagtatgttatatattatatatttgtaggaaaaagatacgtactgtctataatgacaataaaattatcatgacaaaattaaaaaagataaagagttctaattccagcaaatctagtaaatcaactgatagcgaatcagactgggaggatcactgtagtgctatggaacaaaacaatgacgtagataatatttctaggaatgagatattggacgatgatagcttcgctggtagtttaatatgggataacgaatccaatgttatggcgcctagcacagaacacatttacgatagtgttgctggaagcacgctgctaataaataatgatcgtaatgaacagactatttatcagaacactacagtagtaattaatgaaacggagactgttgaagtacttaatgaagataccaaacagaatcctaactattcatccaatcctttcgtaaattataataaaaccagtatttgtagcaagtcaaatccgtttattacagaacttaacaataaatttagtgagaataatccgtttagacgagcacatagcgatgattatcttaataagcaagaacaagatcatgaacacgatgatatagaatcatcggtcgtatcattggtgtgattagtttcctttttataaaattgaagtaatatttagtattattgctgccgtcacgttgtacaaatggagatattccctgtattcggcatttctaaaattagcaattttattgctaataatgactgtagatattatatagatacagaacatcaaaaaattatatctgatgagatcaatagacagatggatgaaacggtacttcttaccaacatcttaagcgtagaagttgtaaatgacaatgagatgtaccatcttattcctcatagattatcgacgattatactctgtattagttctgtcggaggatgtgttatctctatagataatgacatcaatggcaaaaatattctaacctttcccattgatcatgctgtaatcatatccccactgagtaaatgtgtcgtagttagcaagggtcctacaaccatattggttgttaaagcggatatacctagcaaacgattggtaacatcgtttacaaacgacatactatatgtaaacaatctgtcactgattaattatttgccgttgtctgtattcattattagacgagtcaccgactatttggatagacacatatgcgatcagatatttgctaataataagtggtattcccttataaccatcgacgataagcaatatcctattccatcaaactgtataggtatgtcctctgccaagtacataaattctagcatcgagcaagatactttaatccatgtttgtaacctcgagcatccgttcgactcagtatacaaaaaaatgcagtcgtacaattctctacctatcaaggaacaaatattgtacggtagaattgataatataaatatgagcattagtatttctgtggattaatagatttctagtatggggatcattaatcatctctaatctctaaatacctcataaaacgaaaaaaaagctattatcaaatactgtacggaatggattcattctcttctctttttatgaaactctgttgtatatctactgataaaactggaagcaaaaaatctgatagaaagaataagaataagatcaaggattatatggaacacgattattataaaataacaatagttcctggttcctcttccacgtctactagctcgtggtattatacacatgcctagtaatagtctctttgcgttgacggaaagcagactagaaataacaggctaaaatgttcagacaccataatagttcccaacccagataataacagagttccatcaacacattcctttaaactcaatcccaaacccaaaaccgttaaaatgtatccggccaattgatagtagataatgaggtgtacagcgcatgataatttacacagtaaccaaaatgaaaatactttagtaattataagaaatatagacggtaatgtcatcatcaacaatccgataatatgcctgagagtaaacattgacggataaaacaaaaatgctccgcataactctatcatggcaataacacaaccaaatacttgtaagattcctaaattagtagaaaatacaacgaatatcgatgtataagtgatctcgagaaataataagaataaagtaatgcccgtaaagataaacatcaacattgtttggtaatcattaaaccaattagtatgaagttgaactaatttcacagtagattttattccagtgttatcctcgcatgtataagtacctggtaagatatctttatattccataatcaatgagacatcactatctgataacgaatgaagtctagcactagtatgccatttacttaatattgtcgtcttggaagttttattataagttaaaatatcatggttatccaatttccatctaatatactttgtcggattatctatagtacacggaataatgatggtatcattacatgctgtatactctatggtctttgtagttgttataacaaccaacgtatagaggtatatcaacgatattctaactcttgacattttttatttatttaaaatgatacctttgttatttattttattctattttgctaacggtattgaatggcataagtttgaaacgagtgaagaaataatttctacttacttattagacgacgtattatacacgggtgttaatggggcggtatacacattttcaaataataaactaaacaaaactggtttaactaataataattatataacaacatctataaaagtagaggatgcggataaggatacattagtatgcggaaccaataacggaaatcccaaatgttggaaaatagacggttcagacgacccaaaacatagaggtagaggatacgctccttatcaaaatagcaaagtaacgataatcagtcacaacggatgtgtactatctgacataaacatatcaaaagaaggaattaaacgatggagaagatttgacggaccatgtggttatgatttattcacggcggataacgtaattccaaaagatggtttacgaggagcattcgtcgataaagacggtacttatgacaaagtttacattcttttcactgatactatcggctcaaagagaattgtcaaaattccgtatatagcacaaatgtgcctaaacgacgaaggtggtccatcatcattgtctagtcatagatggtcgacgtttctcaaagtcgaattagaatgtgatatcgacggaagaagttatagacaaattattcattctagaactataaaaacagataatgatacgatactatatgtattcttcgatagtccttattccaagtccgcattatgtacctattctatgaataccattaaacaatctttttctacgtcaaaattggaaggatatacaaagcaattgccgtctccagctcctggtatatgtttaccagctggaaaagttgttccacataccacgtttgaagtcatagaacaatataatgtactagatgatattataaagcctttatctaaccaacctatcttcgaaggaccgtctggtgttaaatggttcgatataaaggagaaggaaaatgaacatcgggaatatagaatatacttcataaaagaaaattctatatattcgttcgatacaaaatctaaacaaactcgtagctcgcaagtcgatgcgcgactattttcagtaatggtaactgcgaaaccgttatttatagcagatatagggataggagtaggaatgccacaaatgaaaaaaatacttaaaatgtaatcttaatcgagtacaccacacgacaatgaacaaacataagacagattatgctggttatgcttgctgcgtaatatgcggtctaattgtcggaattatttttacagcgacactattaaaagttgtagaacgtaaattagttcatacaccattaatagataaaacgataaaagatgcatatattagagaagattgtcctactgactggataagctataataataaatgtatccatttatctactgatcgaaaaacctgggaggaaggacgtaatgcatgcaaagctctaaattcaaattcggatctaattaagatagagactccaaacgagttaagttttttaagaagccttagacgaggctattgggtaggagaatccgaaatattaaaccagacaaccccatataattttatagctaagaatgccacgaagaatggaactaaaaaacggaaatatatttgtagcacaacgaatactcccaaactgcattcgtgttacactatataacaattacactacatttttatcataccactacttcggttagatgttttagaaaaaaataaatatcgccgtaccgttcttgtttttataaaaataacaattaacaattatcaaattttttctttaatattttacgtggttgaccattcttggtggtaaaataatctcttagtgttggaatggaatgctgtttaatgtttccacactcatcgtatattttgacgtatgtagtcacatcgtttacgcaatagtcagactgtagttctatcatgcttcctacatcagaaggaggaacagttttaaagtctcttggttttaatctattaccgttagttttcatgaaatcctttgttttatccacttcacattttaaataaatgtccactatacattcttttgttaattttactagatcgtcatgggtcatagaatttataggttccgtagtccatggatccaaactagcaaacttcgcgtatacggtatcgcgattagtgtatacaccaactgtatgaaaattaagaaaacagtttaataaatcaacagaaatatttaatcctccgtttgatacagatgcgccatatttatggatttcggattcacacgttgtttgtctgaggtgttcgtctagtgttgcttctacgtaaacttcgattcccatatattctttattgtcagaatcgcataccgatttatcatcatacactgtttgaaaactaaatggtatacacatcaaaataataaataataacgagtacattctgcaatattgttatcgtaattggaaaattagtgttcgagtgagttggattatgtgagtattggattgtatattttattttatattttgtaataagaataaaatgctaatgtcaagtcttattaaaaacatatataataaataacaatggctgaatggcataaaataataagttcgaggatgccgccatcgttgattacaagactacaaagaatgttctagctgctattcctaacagaacatttgccaagattaatccgggtgaaattattcctctcatcactaatcgtaatattctaaaacctcttattggtcagaaatattgtattgtatatactaactctctaatggatgagaacacgtatgctatggagttgcttactgggtacgcccctgtatctccgatcgttatagcgagaactcataccgcacttatatttttgatgggtaagccaacaacatccagacgtgacgtgtatagaacgtgtagagatcacgctacccgtgtacgcgcaactggtaattaaaataaaaagtaatattcatatgtagtgtcaattttaaatgatgatgaaatggataatatccatattgacgatgtcaataatgccggtattggcatacagctcatcgatttttagatttcattcagaggatgtggaattatgttatgggcatttgtattttgataggatctataatgtagtaaatataaaatataatccgcatattccatatagatataattttattaatcgcacgttaaccgtagatgaactagacgataatgtcttttttacacatggttattttttaaaacacaaatatggttcacttaatcctagtttgattgtctcattatcaggaaacttaaaatataatgatatacaatgctcagtaaatgtatcgtgtctcattaaaaatttggcaacgagtacatctactatattaacatctaaacataagacttattctctacatcggtccacgtgtattactataataggatacgattctattatatggtataaagatataaatgacaagtataatgacatctatgattttactgcaatatgtatgctaatagcgtctacattgatagtgaccatatacgtgtttaaaaaaataaaaatgaactcttaattatgctatgctattagaaatggataaaatcaaaattacggttgattcaaaaattggtaatgttgttaccatatcgtataacttggaaaagataactattgatgtcacacctaaaaagaaaaaagaaaaggatgtattattagcgcaatcagttgctgtcgaagaggcaaaagatgtcaaggtagaagaaaaaaatattatcgatattgaagatgacgatgatatggatgtagaaagcgcataatactatctataaaaataagtatataataaatactttttatttacggtactcttgtagtggtgataccctactcgattatttttttaaaaaaaaaatacttattctgattcttctaaccatttccgtgttcgtttgaatgccacatcgacgtcaaagataggggagtagttgaaatctagttctgcattgttggtacgcacctcaaatgtagtgttggatatcttcaacgtatagttgttgagtagtgatggttttctaaatagaattctcttcatatcattcttgcacgcgtacatttttagcatccatcttggaatcctagatccttgttctattcccaatggtttcatcaatagaagattaaacatatcgtacgaacacgatggagagtaatcgtagcaaaagtaagcatttcctttaatcttagatcccggatactggatatattttgcagccaacacgtgcatccatgcaacatttcctacatatacccggctatgcaccgcgtcatcatcgactgtacgatacataatgttaccgtgttgcttacattgctcgtaaaagactttcgtcaatttgtctccttctccgtaaattctagtgggtcttaggcaacaagtatacaattttgctccattcatgattacggaattattggctttcataaccagttgctcggccatacgtttactttttgcgtatacatgtcctggtgatatatcataaagggtatgctcatggccgatgaatggatcaccgtgtttattgggtcctattgcttccatgctactagtatagatcaaatacttgattcctaggtccacacaagctgccaaaatagtctgtgttccataatagtttactttcatgatttcattatcggtgtattttccaaatacatccactagagcagccgtatgaataatcagatttaccccatctagcgcttctctcaccttatcaaagtcgtttatatcacattgtatatagtttataaccttaactttcgaggttattggttgtggatcttctacaatatctatgactctgatttcttgaacatcatctgcactaattaacagttttactatatacctgcctagaaatccggcaccaccagtaaccgcgtacacggccattgctgccactcataatatcagactacttattctattttactaaataatggctgtttgtataatagaccacgataatatcagaggagttatttactttgaaccagtccatggaaaagataaagttttaggatcagttattggattaaaatccggaacgtatagtttaataattcatcgttacggagatattagtcaaggatgtgattccataggcagtccagaaatatttatcggtaacatctttgtaaacagatatggtgtagcatatgtttatttagatacagatgtaaatatatctacaattattggaaaggcgttatctatttcaaaaaatgatcagagattagcgtgtggagttattggtatttcttacataaatgaaaagataatacattttcttacaattaacgagaatggcgtttgatatatcagttaatgcgtctaaaacaataaatgcattagtttacttttctactcagcaaaataaattagtcatacgtaatgaagttaatgatacacactacactgtcgaatttgatagggacaaagtagttgacacgtttatttcatataatagacataatgacaccatagagataagaggggtgcttccagaggaaactaatattggttgcgcggttaatacgccggttagtatgacttacttgtataataagtatagttttaaactgattttagcagaatatataagacacagaaatactatatccggcaatatttattcggcattgatgacactagatgatttggctattaaacagtatggagacattgatctattatttaatgagaaacttaaagtagactccgattcgggactatttgactttgtcaactttgtaaaggatatgatatgttgtgattctagaatagtagtagctctatctagtctagtatctaaacattgggaattgacaaataaaaaatataggtgtatggcattagccgaacatatatctgatagtattccaatatctgagctatctagactacgatacaatctatgtaagtatctacgcggacacactgagagcatagaggataaatttgattattttgaagacgatgattcgtctacatgttctgccgtaaccgacagggaaacggatgtataattttttttatagcgtgaaggatatgataaaaaatataattgttgtatttatcccattccaatcaccttatatgattctgtaacacaataaaggagtcttatagatgtatagaggtcagatactggtttgataaactgtttattccacataagtatgtttgactttatggttagacccgcatactttaacaaatcactgaaaattggagttaggtattgacctctcagaatcagttgccgttctggaacattaaatgtattttttatgatatactccaacgcatttatgtgggcatacaacaagtcattactaatggaatattccaagagttttagttgtctagtatttaacaagagaagagatttcaacagactgtttatgaactcgaatgccgcctcattgtcgcttatattgatgatgtcgaattctcccaatatcatcaccgatgagtagctcatcttgttatcgggatccaagttttctaaagatgtcattaaaccctcgatcatgaatggatttatcatcatcgtttttatgttggacatgagcttagtccgtttgtccacatctatagaagatgatttctgaattatttcatatatctctctctttaactccaggaacttgtcaggatggtctactttaatatgttctcgtctaagagatgaaaatctttggatggttgcacgcgacttttctctaaaggatgacgttgcccaagatcctctcttaaatgaatccatcttatccttggacaagatggacagtctattttccttagatggtttaatatttttgttacccatgatctataaaggtagacctaatcgtctcggatgaccatatatttattttcagttttattatacgcataaattgtaaaaaatatgttaggtttacaaaaatgtctcgtggggcattaatcgtttttgaaggattggacaaatctggaaaaacaacacaatgtatgaacatcatggaatctataccggcaaacacgataaaatatcttaactttcctcagagatccactgtcactggaaaaatgatagatgactatctaactcgtaaaaaaacctataatgatcatatagttaatctattattttgtgcaaatagatgggagtttgcatcttttatacaagaacaactagaacagggaattactttaatagttgatagatacgcattttctggagtagcgtatgccgccgctaaaggcgcgtcaatgactctcagtaagagttatgaatctggattgcctaaacccgacttagttatattcttggaatctggtagcaaagaaattaatagaaacgtcggtgaggaaatttatgaagatgttacattccaacaaaaggtattacaagaatataaaaaaatgattgaagaaggagatattcattggcaaattatttcttctgaattcgaggaagatgtaaagaaggagttgattaagaatatagttatagaggctatacacacggttactggaccagtggggcaactgtggatgtaatagtgaaattacattttttataaatagatgttagtacagtgttataaatggatgaagcatattactctggcaacttggaatcagtactcggatacgtgtccgatatgcataccgaactcgtatcaatatctcaattagttattgccaagatagaaactatagataatgatatattaaacaaggacattgtaaattttatcatgtgtagatcaaacttggataatccatttatctctttcctagatactgtatatactattatagatcaagagaactatcagactgagttgattaattcattagacgacaatgaaattatcgattgtatagttaataagtttatgagcttttataaggataacctagaaaatatagtagatgctatcatcactctaaaatatataatgaataatccagattttaaaactacgtatgcagaagtactcggttccagaatagcggatatagatattaaacaagtgatacgtgagaatatactacaattgtctaataatatccgcgaacgatatttgtgaaaatattaaaaaaaaatactttttttattaaatgacgtcttttcgtgaatttagaaaattatgctgtgctatatatcacgcatcaggatataaagaaaaatctaaattaattagagactttataacagatagggatgataaatatttgatcattaagctattgcttcccggattagacgatagaatttataacatgaacgataaacaaattataaaattatatagtataatatttaaacaatctcaggaagatatgctacaagatttaggatacggatatataggagacactattaggactttcttcaaagagaacacagaaatccgtccacgagataaaagcattttaactttagaagaagtggatagtttcttaactacgttatcatccgtaactaaagaatcgcatcaaataaaattattgactgatatcgcatccgtttgtacatgtaatgatttaaaatgtgtagtcatgcttattgataaagatctaaaaattaaagcgggtcctcggtacgtacttaacgctattagtcctcatgcctatgatgtgtttagaaaatctaataacttgaaagagataatagaaaatgcatctaaacaaaatctagactctatatctatttctgttatgactccaattaatcccatgttagcggaatcgtgtgattctgtcaataaggcgtttaaaaaatttccatcaggaatgtttgcggaagtcaaatacgatggtgaaagagtacaagttcataaaaataataacgagtttgccttctttagtagaaacatgaaaccagtactctctcataaagtggattatctcaaagaatacataccgaaagcatttaaaaaagctacgtctatcgtattggattctgaaattgttcttgtagacgaacataatgtaccgctcccgtttggaagtttaggaatacacaaaaagaaagaatataaaaactctaacatgtgtttgttcgtgtttgactgtttgtactttgatggattcgatatgacggacattccattgtacgaacgaagatcttttctcaaagatgttatggttgaaatacccaatagaatagtattctcagagttgacgaatattagtaacgagtctcagttaactgacgtattggatgatgcactaacgagaaaattagaaggattggtcttaaaagatattaatggagtatacgaaccgggaaagagaagatggttaaaaataaagcgagactatttgaacgagggttccatggcagattctgccgatttagtagtactaggtgcttactatggtaaaggagcaaagggtggtatcatggcagtctttctaatgggttgttacgacgatgaatccggtaaatggaagacggttaccaagtgttcaggacacgatgataatacgttaagggagttgcaagaccaattaaagatgattaaaattaacaaggatcccaaaaaaattccagagtggttagtagttaataaaatctatattcccgattttgtagtagaggatccgaaacaatctcagatatgggaaatttcaggagcagagtttacatcttccaagtcccataccgcaaatggaatatccattagatttcctagatttactaggataagagaggataaaacgtggaaagaatctactcatctaaacgatttagtaaacttgactaaatcttaatagttacatacaaactgaaaattaaaataacactatttagttggtggtcgccatggatggtgttattgtatactgtctaaacgcgctagtaaaacatggcgaggaaataaatcatataaaaaatgatttcatgattaaaccatgttgtgaaagagtttgtgaaaaagtcaagaacgttcacatcggcggacaatctaaaaacaatacagtgattgcagatttgccatatctggataatgctgtatcggatgtatgcaattcactgtataaaaagaatgtatcaagaatatccagatttgctaatttgataaagatagatgacgatgacaagactcctactggtgtatataattattttaaacctaaagatgccattcctgttattatatctataggaaaggatagagatgtctgtgaactattaatctcatcagacatatcgtgtgcatgcgtggagttaaattcatatcacgtagccattcttcccatggatgtttccttttttaccaaaggaaatgcatcattgattattctcctgtttgatttctctatcgatgcggcacctctcttaagaagtgtaaccgataataatgttattatatctagacaccagcgtctacatgacgagcttccgagttccaattggttcaagttttacataagtataaagtccgactattgttctatattatatatggttgttgatggatctgtgatgcatgcgatagctgataatagaactcacgcaattattagcaaaaatatattagacaatactacgattaacgatgagtgtagatgctgttattttgaaccacagattaggattcttgatagagatgagatgctcaatggatcatcgtgtgatatgaacagacattgtattatgatgaatttacctgatgtaggcgaatttggatctagtatgttggggaaatatgaacctgacatgattaagattgctctttcggtggctggtaatttaataagaaatcgagactacattcccgggagacgaggctatagctactacgtttacggtatagcctctagataatttttttaagcacgaaataaaaaacataattttaaaccaatctatttcatactattttgtgtgatcaccatggacataaagatagatattagtatttctggtgataaatttacggtgactactaggagggaaaatgaagaaagaaaaaaatatctacctctccaaaaagaaaaaactactgatgttatcaaacctgattatcttgagtacgatgacttgttagatagagatgagatgtttactattctagaggaatattttatgtacagaggtctattaggcctcagaataaaatatggacgactctttaacgaaattaaaaaattcgacaatgatgcggaagaacaattcggtactatagaagaactcaagcagaaacttagattaaattctgaagagggagcagataactttatagattatataaaggtacaaaaacaggatatcgtcaaacttactgtatacgattgcatatctatgataggattgtgtgcatgcgtggtagatgtttggagaaatgagaaactgttttctagatggaaatattgtttacgagcgattaaactgtttattgatgatcacatgcttgataagataaaatctatactgcagaatagactagtatatgtggaaatgtcatagaaagttaaaagttaatgagagcaaaaatatataaggttgtattccatatttgttattttttctgtaatagttaaaaaaatacattcgatggtctatctatcagattattatgtgttataaggtactttttctcataataaactagagtatgagtaagatagtgtttttcaaaacatataaatctaaaattgatggatgagatatacagctattaatttcgaaaatatattttaatctgataactttaaacatggatttttgatggtggtttaacgttttaaaaaaagattttgttattgtagtatatgataatattaaaagatggatataaagaatttgctgactgcatgtactattttttacattactacattggctacggcagatatacctacttcgtcaccaacggggcatgtgacgagggagaatatcttgataagaggcataatcaatgttgtaatcagtgtccacctggagaatttgccaaggttagatgtaatggtaacgataacacaaaatgtgaacgctgcccacctcatacatataccgcaatccccaattactctaatggatgtcatcaatgtagaaaatgcccaacaggatcatttgataaggtaaagtgtaccggaacacagaacagtaaatgttcgtgtcttcctggttggtattgcgctactgattcttcacagactgaagattgtcgagattgtataccaaaaaggagatgtccatgcggatactttggtggaatagatgaacaaggaaatcctatttgtaaatcgtgttgtgttggtgaatattgcgactacctacgtaattatagacttgatccatttcctccatgcaaactatctaaatgtaattaattatgattttgatgataatgttaccatacattatatcgctacttggttagtgtattattcagtatgaagacctattaataattacttatcttttgacgatcttgttataattataatataaaaacttatggcatagtaacttataattgctgacgcgataaattcgtaataatctgttttgttcaaaggaatctacaggcataaaaataaaaatataatttataatatactcttacaacgccatcatgaataacagcagtgaattgattgctgttattaatggatttagaaatagtggacgattttgtgatattagtatagttattaatgatgaaaggataaacgctcataaactcatcctatctggagcctccgaatatttttccattctgttttccaataattttatcgattctaatgaatacgaagttaatctaagtcatttagattatcaaagtgttaacgatttgatcgattatatttatgggatacctttgagcctaactaacgataacgtgaaatatattctttcaaccgctgattttttacaaattggatctgccattactgagtgtgaaaattacatacttaaaaatctttgttctagaaactgtatcgatttctacatatacgctgataaatataataacaagaaaatagaatcagcgtcgtttaacacaatattacaaaatattttgagactcatcaacgatgaaaactttaaatacttaacagaggaatcaatgataaaaattttaagcgatgatatgttaaatataaaaaatgaggatttcgccccactaattctcattaaatggttagagagtactcaacaaccatgcaccgtcgagttacttaaatgcctcagaatatcattgctttccccacaagttataaaatcactttatagtcatcgactggttagttcaatctacgaatgtataacattcttaaacaatatagcattcttggatgaatcatttcctagataccatagcatcgagttgatatctatcggtataagtaattcgcatgataagatttccataaactgctacaatcataaaaaaaatacatgggaaatgatatcttcacgtagatataggtgtagtttcgcagtggccgtcctggataatattatctatatgatgggtggatatgatcagtccccgtatagaagttcaaaggttatagcgtacaatacatgtacaaattcttggatatatgatataccagagctaaaatatcctcgttctaattgtgggggactggctgatgacgaatacatttattgtataggcggcatacgcgatcaggattcatcgttgacatctagtattgatagatggaagccatcaaaaccatattggcagaagtatgctaaaatgcgcgaaccaaaatgtgatatgggggttgcgatgttaaacggattaatatatgttataggtggaatcgttaaaggtgacacgtgtaccgacgcactagagagtttatcagaagatggatggatgaagcatcaacgtcttccaataaaaatgtccaatatgtcgacgattgttcatgatggcaagatttatatatctggaggttacaacaatagtagtgtagttaatgtaatatcgaatctagtccttagctataattcgatatatgatgaatggaccaaattatcatcattaaacattcctagaattaatcccgctctatggtcagcgcataataaattatatgtaggaggaggaatatctgatgatgttcgaactaatacatctgagacatacgacaaagaaaaagattgttggacattggataatggtcacgtgttaccacgcaattatataatgtataaatgcgaaccgattaaacataaatatccattggaaaaaacacagtacacgaatgattttctaaagtatttggaaagttttataggtagttgatagaacaaaatacataattttgtaaaaataaatcactttttatactaatatgacacgattaccaatacttttgttactaatatcattagtatactctacaccttctcctcagacatctaaaaaaataggtgatgatgcaactctatcatgtaatcgaaataatacaaatgactacgttgttatgagtgcttggtataaggagcccaattccattattcttttagctgctaaaagcgacgtcttgtattttgataattataccaaggataaaatatcttacgactctccatacgatgatctagttacaactatcacaattaaatcattgactgctagagatgccggtacttatgtatgtgcattctttatgacatcgcctacaaatgacactgataaagtagattatgaagaatactccacagagttgattgtaaatacagatagtgaatcgactatagacataatactatctggatctacacattcaccggaaactagttctgagaaacctgattatatagataattctaattgctcgtcggtattcgaaatcgcgactccggaaccaattactgataatgtagaagatcatacagacaccgtcacatacactagtgatagcattaatacagtaagtgcatcatctggagaatccacaacagacgagactccggaaccaattactgataaagaagaagatcatacagtcacagacactgtctcatacactacagtaagtacatcatctggaattgtcactactaaatcaaccaccgatgatgcggatctttatgatacgtacaatgatacagtaccaccaactactgtaggcggtagtacaacctctattagcaattataaaaccaaggactttgtagaaatatttggtattaccgcattaattatattgtcggccgtggcaatattctgtattacatattatatatataataaacgttcacgtaaatacaaaacagagaacaaagtctagatttttgacttacataaatgtctgggatagtaaaatctatcatattgagcgggccatctggtttaggaaagacagccatagccaaaagactatgggaatatatttggatttgtggtgtcccataccactagatttcctcgtcctatggaacgagaaggtgtcgattaccattacgttaacagagaggccatctggaagggaatagccgccggaaactttctagaacatactgagtttttaggaaatatttacggaacttctaaaacagctgtgaatacagcggctattaataatcgtatttgtgtgatggatctaaacatcgatggcgttagaagtcttaaaaatacgtacctaatgccttactcggtgtatataagacctacctctcttaaaatggttgagaccaagcttcgtcgtagaaacactgaagcggatgatgagattcatcgtcgtgtgatgttggcaaaaactgacatggatgaggcaggtgaagccggtctattcgacactattatcattgaagatgatgtgaatttagcatatagtaagttaattcagatactacaggaccgtattagaatgtattttaacactaattagagacttaagacttaaaacttgataattaataatataactcgtttttatatgtggctatttcaacgtctaatgtattagttaaatattaaaacttaccacgtaaaacttaaaatttaaaatgatatttcattgacagatagatcacacattatgaactttcaaggacttgtgttaactgacaattgcaaaaatcaatgggtcgttggaccattaataggaaaaggtggattcggtagtatttatactactaatgacaataattatgtagtaaaaatagagcccaaagctaacggatcattatttaccgaacaggcattttatactagagtacttaaaccatccgttatcgaagaatggaaaaaatctcacaatataaagcacgtaggtcttatcacgtgcaaggcatttggtctatacaaatccattaatgtggaatatcgattcttggtaattaatagattaggtgtagatctagatgcggtgatcagagccaataataatagattaccaaaaaggtcggtgatgttgatcggaatcgaaatcttaaataccatacaatttatgcacgagcaaggatattctcacggagatattaaagcgagtaatatagtcttagatcaaatagataagaataaattatatctagtggattacggattggtttctaaattcatgtctaatggcgaacatgttccatttataagaaatccaaataaaatggataacggtactctagaatttacacctatagattcgcataaaggatacgttgtatctagacgtggagatctagaaacacttggatattgtatgattagatggttgggaggtatcttaccatggactaagatatctgaaacaaagaattgtgcattagtaagtgccacaaaacagaaatatgttaacaatactgcgactttgttaatgaccagtttgcaatatgcacctagagaattgctgcaatatattaccatggtaaactctttgacatattttgaggaacccaattacgacaagtttcggcacatattaatgcagggtgtatattattaagtgtggtgtttggtcgataaaaattaaaaaataacttaatttattattgatctcgtgtgtacaaccgaaatcatggcgatgttttacgcacacgctctcggtgggtacgacgagaatcttcatgcctttcctggaatatcatcgactgttgccaatgatgtcaggaaatattctgttgtgtcagtttataataacaagtatgacattgtaaaagacaaatatatgtggtgttacagtcaggtgaacaagagatatattggagcactgctgcctatgtttgagtgcaatgaatatctacaaattggaaatccgatccatgatcaagaaggaaatcaaatctctatcatcacatatcgccacaaaaactactatgctctaagcggaatcgggtacgagagtctagacttgtgtttggaaggagtagggattcatcatcacgtacttgaaacaggaaacgctgtatatggaaaagttcaacatgattattctactatcaaagagaaggccaaagaaatgagtgcacttagtccaggacctatcatcgattaccacgtctggataggagattgtatctgtcaagttactgctgtggacgtacatggaaaggaaattatgaaaatgagattcaaaaagggtgcggtgcttccgatcccaaatctggtaaaagttaaacttggggagaatgatacagaaaatctttcttctactatatcggcgacaccatcgaggtaaccacctctctggaagacagcgtgaataatgtactcatgaaacgtttggaaactatacgccatatgtggtctgttgtatatgatcattttgatattgtgaatggtaaagaatgctgttatgtgcatacgcatttgtctaatcaaaatcttataccgagtactgtaaaaacaaatttgtacatgaagactatgggatcatgcattcaaatggattccatggaagctctagagtatcttagcgaactgaaggaatcaggtggatggagtcccagaccagaaatgcaggaatttgaatatccagatggagtggaagacactgaatcaattgagagattggtagaggagttcttcaatagatcagaacttcaggctggtgaatcagtcaaatttggtaattctattaatgttaaacatacatctgtttcagctaagcaactaagaacacgtatacggcagcagcttccttctatactctcatcttttaccaacacaaagggtggatatttgttcattggagttgataataatacacacaaagtatttggattcacggtgggttacgactacctcagactgatagagaatgatatagaaaagcatatcaaaagactttgtgttgtgtatttctgtgagaagaaagaggacatcaagtacgcgtgtcgattcatcaaggtatataaacctggggatgaggctacctcgacatacgtgtgcgctatcaaagtggaaagatgctgttgtgctgtgtttgcagattggccagaatcatggtatatggatactaatggtatcaagaagtattctccagatgaatgggtgtcacatataaaattttaattaatgtaactatagagaacaaataataaggttgtaatatcatatagacaataactaacaattaattagtaactgttatctcttttttaattaaccaactaactatatacctattaatacatcgtaattatagttcttaacatctattaatcattaattcgcttctttaattttttataaactaacattgttaattgaaaagggataacatgttacagaatataaattatatatggatttttttaaaaaggaaatacttgactggagtatatatttatctcttcattatatagcacgcgtgttttccaatttttccacatcccatataatacaggattataatctcgttcgaacatacgagaaagtggataaaacaatagttgattttttatctaggttgccaaatttattccatattttagaatatggggaaaatattctacatatttattctatggatgatgctaatacgaatattataattttttttctagatagagtattaaatattaataagaacgggtcatttatacacaatctcgggttatcatcatccattaatataaaagaatatgtatatcaattagttaataatgatcatccagataataggataagactaatgcttgaaaatggacgtagaacaagacattttttgtcctatatatcagatacagttaatatctatatatgtattttaataaatcatggattttatatagatgccgaagacagttacggttgtacattattacatagatgtatatatcactataagaaatcagaatcagaatcatacaatgaattaattaagatattgttaaataatggatcagatgtagataaaaaagatacgtacggaaacacaccttttatcctattatgtaaacacgatatcaacaacgtggaattgtttgagatatgtttagagaatgctaatatagactctgtagactttaatagatatacacctcttcattatgtctcatgtcgtaataaatatgattttgtaaagttattaatttctaaaggagcaaatgttaatgcgcgtaataaattcggaactactccattttattgtggaattatacacggtatctcgcttataaaactatatttggaatcagacacagagttagaaatagataatgaacatatagttcgtcatttaataatttttgatgctgttgaatctttagattatctattatccagaggagttattgatattaactatcgtactatatacaacgaaacatctatttacgacgctgtcagttataatgcgtataatacgttggtctatctattaaacaaaaatggtgattttgagacgattactactagtggatgtacatgtatttcggaagcagtcgcaaacaacaacaaaataataatggaagtactattgtctaaacgaccatctttgaaaattatgatacagtctatgatagcaattactaaacataaacagcataatgcagatttattgaaaatgtgtataaaatatactgcgtgtatgaccgattatgatactcttatagatgtacagtcgctacagcaatataaatggtatattttaagatgtttcgatgaaatagatatcatgaagagatgttatataaaaaataaaactgtattccaattagttttttgtatcaaagacattaatactttaatgagatacggtaaacatccttctttcgtgaaatgcactagtctcgacgtatacggaagtcgtgtacgtaatatcatagcatctattagatatcgtcagagattaattagtctattatccaagaagctggatcctggagataaatggtcgtgttttcctaacgaaataaaatataaaatattggaaaactttaacgataacgaactatccacatatctaaaaatcttataaacattattaaaatataaaatctaagtaggataaaatcacactacatcattgtttccttttagtgctcgacagtgtatactatttttaacgctcataaataaaaatgaaaacgatttccgttgttacgttgttatgcgtactacctgctgttgtttattcaacatgtactgtacccactatgaataacgctaaattaacgtctaccgaaacatcgtttaatgataaccagaaagttacgtttacatgtgatcagggatatcattctttggatccaaatgctgtctgtgaaacagataaatggaaatacgaaaatccatgcaaaaaaatgtgcacagtttctgattatgtctctgaactatataataaaccgctatacgaagtgaattccaccatgacactaagttgcaacggcgaaacaaaatattttcgttgcgaagaaaaaaatggaaatacttcttggaatgatactgttacgtgtcctaatgcggaatgtcaacctcttcaattagaacacggatcgtgtcaaccagttaaagaaaaatactcatttggggaatatatgactatcaactgtgatgttggatatgaggttattggtgcttcgtacataagttgtacagctaattcttggaatgttattccatcatgtcaacaaaaatgtgatatgccgtctctatctaacggattaatttccggatctacattttctatcggtggcgttatacatcttagttgtaaaagtggttttacactaacggggtctccatcatccacatgtatcgacggtaaatggaatcccgtactcccaacatgtgtacgatctaacgaaaaatttgatccagtggatgatggtcccgacgatgagacagatttgagcaaactctcgaaagacgttgtacaatatgaacaagaaatagaatcgttagaagcaacttatcatataatcatagtggcgttgacaattatgggcgtcatatttttaatctccgttatagtattagtttgttcctgtgacaaaaataatgaccaatataagttccataaattgctaccgtgaatataaatccgttaaaataattaataatttaataacgaacaagtatcaaaagattaaagacttatagctagaatcaattgagatgtcttcttcagtggatgttgatatctacgatgccgttagagcatttttactcaggcactattataacaagagatttattgtgtatggaagaagtaacgccatattacataatatatacaggctatttacaagatgcgccgttataccgttcgatgatatagtacgtactatgccaaatgaatcacgtgttaaacaatgggtgatggatacacttaatggtataatgatgaatgaacgcgatgtttctgtaagcgttggcaccggaatactattcatggaaatgtttttcgattacaataaaaatagtatcaacaatcaactaatgtatgatataattaatagcgtatctataattctagctaatgagagatatagaagcgcttttaacgacgatggtatatacatccgtagaaatatgattaacaagttgtacggatacgcatctctaactactattggcacgatcgctggaggtgtttgttattatctgttgatgcatctagttagtttgtataaataattatttcaatatactagttaaaattttaagattttaaatgtataaaaaactaataacgtttttatttgtaataggtgcattagcatcctattcgaataatgagtacactccgtttaataaactgagtgtaaaactctatatagatggagtagataatatagaaaattcatatactgatgataataatgaattggtgttaaattttaaagagtacacaatttctattattacagagtcatgcgacgtcggatttgattccatagatatagatgttataaacgactataaaattattgatatgtataccattgactcgtctactattcaacgcagaggtcacacgtgtagaatatctaccaaattatcatgccattatgataagtacccttatattcacaaatatgatggtgatgagcgacaatattctattactgcagagggaaaatgctataaaggaataaaatatgaaataagtatgatcaacgatgatactctattgagaaaacatactcttaaaattggatctacttatatatttgatcgtcatggacatagtaatacatattattcaaaatatgatttttaaaaatttaaaatatattatcacttcagtgacagtagtcaaataacaaacaacaccatgagatatattataattctcgcagttttgttcattaatagtatacacgctaaaataactagttataagtttgaatccgtcaattttgattccaaaattgaatggactggggatggtctatacaatatatcccttaaaaattatggcatcaagacgtggcaaacaatgtatacaaatgtaccagaaggaacatacgacatatccgcatttccaaagaatgatttcgtatctttctgggttaaatttgaacaaggcgattataaagtggaagagtattgtacgggactatgcgtcgaagtaaaaattggaccaccgactgtaacattgactgaatacgacgaccatatcaatttgtacatcgagcatccgtatgctactagaggtagcaaaaagattcctatttacaaacgcggtgacatgtgtgatatctacttgttgtatacggctaacttcacattcggagattctaaagaaccagtaccatatgatatcgatgactacgattgcacgtctacaggttgcagcatagactttgtcacaacagaaaaagtgtgcgtgacagcacagggagccacagaagggtttctcgaaaaaattactccatggagttcgaaagtatgtctgacacctaaaaagagtgtatatacatgcgcaattagatccaaagaagatgttcccaatttcaaggacaaaatggccagagttatcaagagaaaatttaatacacagtctcaatcttatttaactaaatttctcggtagcacatcaaatgatgttaccacttttcttagcatgcttaacttgactaaatattcataactaatttttattaatgatacaaaaacgaaataaaactgcatattatacactggttaacgcccttataggctctaaccattttcaagatgaggtccctgattatagtccttctgttcccctctatcatctactccatgtctattagacgatgtgagaagactgaagaggaaacatggggattgaaaatagggttgtgtataattgccaaagatttctatcccgaaagaactgattgcagtgttcatctcccaactgcaagtgaaggattgataactgaaggcaatggattcagggatatacgaaacaccgataaattataaaaaaagcaatgtgtccgctgtttccgttaataatactattttcgtaactggcggattattcataaataactctaatagcacgatcgtggttaacaatatggaaaaacttgacatttataaagacaaacaatggtcgattatagaaatgcctatggctagggtatatcacggcatcgactcgacatttggaatgttatattttgccggaggtctatccgttaccgaacaatatggtaatttagagaaaaacaacgagatatcttgttacaatcctagaacgaataagtggtttgatatttcatatactatttataagatatccatatcatcattgtgtaaactaaataacgtcttctatgtatttagtaaggacattggatatgtggaaaagtatgatggtgcatggaagttagtacatgatcgtctccccgctataaaggcattatcaacttctccttattgattgaaaatgaaaatataaatagtttttatgtatagcagtattaccctatagttttattgcttactactaacatggatacagatgttacaaatgtagaagatatcataaatgaaatagatagagagaaagaagaaatactaaaaaatgtagaaattgaaaataataaaaacattaacaagaatcatcccaatgaatatattagagaagcactcgttattaataccagtagtaatagtgattccattgataaagaagttatagaatgtatcagtcacgatgtaggaatatagatcatatctactaatttttataatcgatacaaaacataaaaaacaactcgttattacatagcaggcatggaatccttcaagtattgttttgataacgatggcaagaaatggattatcggaaatactttatattctggtaattcaatactctataaggtcagaaaaaatttcactagttcgttctacaattacgtaatgaagatagatcacaaatcacacaagccattgttgtctgaaatacgattctatatatctgtattggatcctttgactatcgacaactggacacgggaacgtggtataaagtatttggctattccagatctgtatggaattggagaaaccgatgattatatgttcttcgttataaagaattcgggaagagtattcgccccaaaggatactgaatcagtcttcgaagcatgcgtcactatgataaacacgttagagtttatacactctcgaggatttacccatggaaaaatagaaccgaggaatatactgattagaaataaacgtctttcactaattgactattctagaactaacaaactatacaagagtggaaactcacatatagattacaacgaggacatgataacttcaggaaatatcaattatatgtgtgtagacaatcatcttggagcaacagtttcaagacgaggagatttagaaatgttgggatattgcatgatagaatggttcggtggcaaacttccatggaaaaacgaaagtagtataaaagtaataaaacaaaaaaaagaatataaaaaatttatagctactttctttgaggactgttttcctgaaggaaatgaacctctggaattagttagatatatagaattagtatacacgttagattattctcaaactcctaattatgacagactacgtaaactgtttatacaagattgaaattatattcttttttttatagagtgtggtagtgttacggatatctaatattaatattagactatctctatcgcgctacacgaccaatatcgattactatggatatcttctatgaaaggagagaatgtatttatttctccagcgtcaatctcgtcagtattgacaatactgtattatggagctaatggatccactgctgaacagctatcaaaatatgtagaaacggaggagaacacggataaggttagcgctcagaatatctcattcaaatccatgaataaagtatatgggcgatattctgccgtgtttaaagattcctttttgagaaaaattggcgataagtttcaaactgttgacttcactgattgtcgcactatagatgcaatcaacaagtgtgtagatatctttactgaggggaaaatcaatccactattggatgaaccattgtctcctagcaattagtgccgtatactttaaagcaaaatggttgacgccattcgaaaaggaatttaccagtgattatcccttttacgtatctccgacggaaatggtagacgtaagtatgatgtctatgtacggcaaggcatttaatcacgcatctgtaaaagaatcattcggcaacttttcaatcatagaactgccatatgttggagatactagtatgatggtcattcttccagacaagattgatggattagaatccatagaacaaaatctaacagatacaaattttaagaaatggtgtgactttatggatgctatgtttatagatgttcacattcccaagtttaaggtaacaggctcgtataatctggtggatactctagtaaagtcaggactgacagaggtgttcggttcaactggagattatagcaatatgtgtaatttagatgtgagtgtcgacgctatgatccacaaaacgtatatagatgtcaatgaagagtatacagaagcagctgcagcaacttctgtactagtggcagactgtgcatcaacaattacaaatgagttctgtgcagatcatccgttcatctatgtgattaggcatgttgatggaaaaattcttttcgttggtagatattgctctccgacaactaattgttaaccattttttttaaaaaaaatagaaaaaacatgtggtattagtgcaggtcgttgttcttccaattgcaattggtaagatgacggccaactttagtacccacgtcttttcaccacagcactgtggatgtgacagactgaccagtattgatgacgtcaaacaatgtttgactgaatatatttattggtcgtcctatgcataccgcaacaggcaatgcgctggacaattgtattccacactcctctcttttagagatgatgcggaattagtgttcatcgacattcgcgagctggtaaaaaatatgccgtgggatgatgtcaaagattgtacagaaatcatccgttgttatataccggatgagcaaaaaaccatcagagagatttcggccatcatcggactttgtgcatatgctgctacttactggggaggtgaagaccatcccactagtaacagtctgaacgcattgtttgtgatgcttgagatgctaaattacgtggattataacatcatattccggcgtatgaattgatgagttgtacatcttgacattttctttcttctcttctccctttcttctcttctcccttcctccctcttctccctttcccagaaacaaacttttttacccactataaaataaaatgagtatactacctgttatatttctttctatatttttttattcttcattcgttcagacttttaacgcgtctgaatgtatcgacaaagggcaatattttgcatcattcatggagttagaaaacgagccagtaatcttaccatgtcctcaaataaatacgctatcatccggatataatatattagatattttatgggaaaaacgaggagcggataatgatagaattataccgatagataatggtagcaatatgctaattctgaacccgacacaatcagactctggtatttatatatgcattaccacgaacgaaacctactgtgacatgatgtcgttaaatttgacaatcgtgtctgtctcagaatcaaatatagattttatctcgtatccacaaatagtaaatgagagatctactggcgaaatggtatgtcccaatattaatgcatttattgctagtaacgtaaacgcagatattatatggagcggacatcgacgccttagaaataagagacttaaacaacggacacctggaattattaccatagaagatgttagaaaaaatgatgctggttattatacatgtgttttagaatatatatacggtggcaaaacatataacgtaaccagaattgtaaaattagaggtacgggataaaataataccttctactatgcaattaccagatggcattgtaacttcaataggtagtaatttgactattgcatcgttgagacctcccacaacggatgcagacgtcttttggataagtaatggtatgtattacgaagaagatgatggggacggaaacggtagaataagtgtagcaaataaaatctatatgaccgataagagacgtgttattacatcccggttaaacattaatcctgtcaaggaagaagatgctacaacgtttacgtgtatggcgtttactattcctagcatcagcaaaacagttactgttagtataacgtgaatgtatgttgttacatttccatgtcaattgagtttataagaatttttatacattatcttccaacaaacaattgacgaacgtattgctatgattaactcccacgatactatgcatattattaatcattaacttgcagactatacctagtgctattttgacatactcatgttcttgtgtaattgcggtatctatattattaaagtacgtaaatctagctatagttttattatttaattttagataatataccgtctccttatttttaaaaattgccacatcctttattaaatcatgaatgggaatttctatgtcatcgttagtatattgtgaacaacaagagcagatatctataggaaagggtggaatgcgatacattgatctatgtagttttaaaacacacgcgaactttgaagaatttatataaatcattccatcgatacatccttctatgttgagatgtatatatccaggaattcgtttattaatatcgggaaatgtataaactaaaacattgcccgaaagcggtgcctctatctgcgttatatccgttcttaacttacaaaatgtaaccaatacctttgcatgacttgttttgttcggcaacgttagtttaaacttgacgaatggattaattacaatagcatgatccgcgcatctattaagtttttttactttaacgcccttgtatgtttttacagagactttatctaaatttctagtacttgtatgtgttataaatataacgggatatagaaccgaatcacctaccttagatacccaattacattttatcagatccagataataaacaaattttgtcgccctaactaattctatattgttatatattttacaattggttatgatatcatgtaataacttggagtctaacgcgcatcgtcgtacgtttatacaattgtgatttagtgtagtatatctacacatgtatttttccgcactatagtattctggactagtgataaaactatcgttatatctgtcttcaatgaactcatcgagatattgctctctgtcatattcatacacctgcataaactttctagacatcttacaatccgtgttattttaggatcatatttacatatttacgggtatatcaaagatgttagattagttaatgggaatcgtctataataatgaatattaaacaattatatgaggacttttaccacaaagcatcataaaaatgagtcgtcgtctgatttatgttttaaatatcaaccgcgaatcaactcataaaatacaagagaatgaaatatatacatattttagtcattgcaatatagaccatacttctacagaacttgattttgtagttaaaaactatgatctaaacagacgacaacctgtaactgggtatactgcactacactgctatttgtataataattactttacaaacgatgtactgaagatattattaaatcatggagtggatgtaacgatgaaaaccagtagcggacgtatgcctgtttatatattgcttactagatgttgtaatatttcacatgatgtagtgatagatatgatagacaaagataaaaaccacttatcgcatagagactattccaacctactactagagtatataaaatctcgttacatgttattaaaggaagaggatatcgatgagaacatagtatccactttattagataagggaatcgatcctaactttaaacaagacggatatacagcgttacattattatttgtgtctcgcacacgtttataaaccaggtgagtgtagaaaaccgataacgataaaaaaggccaagcgaattatttctttgtttatacaacatggagctaatctaaacgcgttagataattgtggtaatacaccattccatttgtatcttagtattgaaatgtgtaataatattcatatgactaaaatgctgttgacttttaatccgaatttcaaaatatgtaataatcatggattaacgcctatactatgttatataacttccgactacatacaacacgatattcttgttatgttaatacatcactatgaaacaaatgttggagaaatgccgatagatgagcgtcgtataatcgtattcgagtttatcaaaacatattctacacgtccggcagattcgataacttatttgatgaataggtttaaaaatataaatatttatacccgctatgaaggaaagacattattacacgtagcatgtgaatataataatacacacgtaatagattatcttatacgtatcaacggagatataaatgcgttaaccgacaataacaaacacgctatccaactcattatagataacaaagaaaattccccatataccattaattgtttactgtatatacttagatatattgtagataagaatgtgataagatcgttggtggatcaacttccatctctacctatctttcgtcgcttatcatactagtcatatcctaaatgttgatcatattccaccaaatgattgtgaaagagattgagattaaatcgtctaacaaacaattagtttttatgacattaacatataataaataaattaatcattattgacttaacgatgacgaaagttatcatcatcttaggattcttgattattaatacaaattcattgtctatgaaatgtgaacaaggtgtctcatattataattcacaagaattaaagtgttgtaaactatgtaagccaggaacatattcagatcatcgatgtgataaatacagcgataccatttgtggacattgtccgagtgacacattcacgtcaatatataatcgttctccttggtgtcatagttgtagaggtccatgtggtactaatcgagtagaggtcacaccttgtacacctaccacaaatagaatctgtcattgtgactcgaatagttattgtctccttaaagcttttgatggtaactgtgttacatgtgctcctaaaacaaaatgtggtcgtgggtatggaaagaaaggagaagatgaaatgggtaataccatttgtaagaaatgtcggaagggtacttattcagatattgtatctgactctgatcaatgtaaaccaatgacaagataagacttactcgcatctactggatagacataaaatatcctcctcgtaataatgaaatataatatacactaattattaatatcaataacaatcgagtattaatatataggtcatttttaaatcccttttgggttccgtcccaaacggcgtttcggtctgcgtcgccgccatggccatgccgagcctctccgcgtgctcctccatcgaggacgacttcaactatggcagctcggtggcgtctgccagcgtgcacatacgaatggcatttctaagaaaagtctacggtatcctttgtctacaatttcttttaacaacggcaacaactgcagtatttttatactttgactgcatgcggacatttatacaagggagtcctgttctaatattggcatcaatgttcggatctataggcttgattttcgcattgactttacacagacataaacatcccctgaatctgtacctgctttgtggatttacactgtcggaatctctaacgctggcctctgttgttactttctatgatgtgcatgtcgttatgcaagctttcatgctgactactgcagcgtttcttgctctgactacatatactctacaatcaaagagagatttcagtaaacttggagcaggattgtttgctgctttgtggattttaattttgtcaggactcttggggatatttgtgcaaaatgagacagtgaagctggtcctgtctgcttttggggcccttgtattctgtggattcattatctatgacacgcactcactaatacataagctctcgcctgaagagtatgtgttagcctctatcaatctctacttggatatcatcaatctgttcttgcatctgttgcagcttttggaagtatctaataagaaataaagtttaaaatagaattaataaaaacatataggtcattttttaaacatggattggaaaccaaggtagttagttaatacacacaagatatatttttttcacatcatccacccatgggtaacaccaaggttgttagttaataatatacaagatattttttctcactctgatccatgtaaaccaaggacgagataagacactctcattcctcatctacaaccccattaaaaaatggaaattaaagccctctattagcatagacggctacaggtctaccatcaggttaaccttcgtctaccttcacaatggcctttccttgtgcccagttcagaccctgtcattgccacgctactaaggactccctgaataccgtggccgacgtcagacattgtctgactgaatacatcctgtgggtttctcatagatggacccatagagaaagcgcagggtctctctacaggcttctcatctctttcagaactgatgcaacggagctctttggtggtgagttgaaggattcacttccgtgggacaattgcgtggagatcattaaatgtttcatcagaaatgactccatgaaaaccgccgaagaacttcgtgcaatcattggactttgtactcaatcagctatcgtctctggaagagtcttcaacgataagtatatcgacatactacttatgctgcgaaagattctgaacgagaacgactatctcaccctcttggatcatatccgcactgctaaatactaaatctccttcatgctctctcactacactttttatcatcttatgaggaatgattgccttcgtgaaataggaataattagcaccagaatagctatggattattgtggtagagagtgcactattctatgtcgtctactggatgaagatgtgacgtacaaaaaaataaaaccagagattgaaacgtgtcacaacttatcaaaacatatagatagacgaggaaacaatgcgctacattgttacgtcttcaataaatgcgatacagacattaagattgttcggctgttactctctcgcggagtcgagagactttgtagaaacaacgaaggattaactccgctaggagcatacagtaagcatagatacgtcaaatctcagattgtgcatctactgatatccagctattcgaattcctctaacgaactcaagtcgaatataaatgatttcgatctgtattcggataatatcgacttacgtctgctaaaatacctaattgtggataaacggatacgtccgtccaagaatacgaattatgcaatcaatggtctcggattggtggatatatacgtaacgacgcctaatccgagaccagaagtattgctatggcttcttaaatcagaatgttacagcaccggttacgtatttcgtacctgtatgtacgacagtgatatgtgtaagaactctcttcattactatatatcgtctcatagagaatctcaatctctatccaaggatgtaattaaatgtttgatcgataacaatgtttccatccatggcagagacgaaggaggatctttacccatccaatactactggtcttgctcaaccatagatatagagattgttaaattattaataaaggatgtggacacgtgtagagtatacgacgtcagccctatattagaggcgtattatctaaacaagcgatttagagtaaccccatataatgtagacatggaaatcgttaatcttcttattgagagacgtcatactcttgtcgacgtaatgcgtagtattacttcgtacgattccagagaatataaccactacatcatcgataacattctaaagagatttagacaacaggatgtacaagccatgttgataaactacttacattacggcgatatggtaagtatacctatcattcaatgcatgttggataacggagcaaccatggataagacgacggacaacaactatcctctacacgactactttgttaataataatctcgtcgatgtaaacgtcgtaaggtttatcgtggaaaatatggacacgcggctgtaaatcacatatctaacaatggccgtctatgtatgtacggtctgatattatcgagatttaataattgcgggtatcactgttatgaaaccatactgatagatgtatttgatatactaagcaagtacatggatgatatagatatgatcgataactctactatattacgcggtcgatgtcaataatatacaatttgcaaagcggttattggaatatggagcgagtgtcacgctcgataatcaatacggccatccagaaaagcagttaccaaagagaaaacaaaacgaggatagttgatttattacttagctaccatcccactctagagactatgattgacgcatttaatagagatatacgctatctatatcctgaaccattattcgcctgtatcagatacgccttaatcctagatgatgattttccttctaaagtaaagtatgatatctccggtcgtcataaggaactaaagcgctatagagtagacattaatagaatgaagaatgtctacatatcaggcgtctccatgtttgatatattctttaaacgaagcaaacgccacaaattgagatacgcaaagaatccgacatcaaatggtacaaaaaagaactaacgtccatcattacagaaactgtaaagaacaatgagaggatcgactccatagtggacaacattaatacagacgataacttgatttcgaaattacccatggagatactttattactccattaaataatttatcatggagcgataatgtcctgtttcatttgtttccatgacatattacaaaatcgattccgtccaagatgataaaaacatttaccggcatcataaacacggagtttattttatatgtctcgcataaacattactaaaaaaatatattgttctgtttttctttcacatctttaattatgaaaaagtaaatcattatgagatggacgagattgtacgcatcgttcgcgacagtatgtggtacatacctaacgtatttatggacgacggtaagaatgaaggtcacgtttctgtcaacaatgtctgtcatatgtattttacgttctttgatgtggatacatcgtctcatctgtttaagctagttattaaacactgcgatctgaataaacgaggtaactctccattacattgctatacgatgaatacacgatttaatccatctgtattaaagatattgttacaccacggcatgcgtaactttgatagcaaggatgaccactatcaatcgataacaagatctttgatatactaacggacaccattgatgactttagtaaatcatccgatctattgctgtgttatcttagatataaattcaatgggagcttaaactattacgttctgtacaaaggatccgaccctaattgcgccgacgaggatgaactcacttctcttcattactactgtaaacacatatccacgttctacgaaagcaattattacaagttaagtcacactaagatgcgagccgagaagcgattcatctacgcgataatagattatggagcaaacattaacgcggttacacacttaccttcaacagtataccaaacatagtcctcgtgtggtgtatgctcttttatctcgaggagccgatacgaggatacgtaataatcttgattgtacacccatcatggaacgattgtgcaacaggtcatattctcataatgttactcaattggcacgaacaaaaggaagaaggacaacatctactttatctattcataaaacataatcaaggatacactctcaatatactacggtatctattagataggttcgacattcagaaagacgaatactataataccgcctttcaaaattgtaacaacaatgttgcctcatacatcggatacgacatcaaccttccgactaaagacggtattcgacttggtgtttgaaaacagaaacatcatatacaaggcggatgttgtgaatgacatcatccaccacagactgaaagtatctctacctatgattaaatcgttgttctacaagatgtctctccctacgacgattactacgtaaaaaagatactagcctactgcctattaagggacgagtcattcgcggaactacatagtaaattctgtttaaacgaggactataaaagtgtatttatgaaaaatatatcattcgataagatagattccatcatcgtgacataagtcgcctcaaagagattcgaatctccgacaccgacctgtatacggtatcacagctatcttaaagccatacattcagacagtcacatttcatttcccatgtacgacgatctcatagaacagtgccatctatcgatggagcgtaaaagtaaactcgtcgacaaagcactcaataaattagagtctaccatcggtcaatctagactatcgtatttgcctccggaaattatgcgcaatatcatctaaacagtatgttgtacggaaagaaccattacaaatattatccatgatagaaagaaaatatctatatgattggagaagtaggaaacaggaacaagacaacgattactacattattaaatcatgaagtccgtattatactcgtatatattgtttctctcatgtataataataaacggaagagatatagcaccgcatgcaccatccgatggaaagtgtaaagacaacgaatacaaacgccataatttgtgtccgggaacatacgcttccagattatgcgatagcaagactaacacacgatgtacgccgtgtggttcgggtaccttcacatctcgcaataatcatttacccgcttgtctaagttgtaacggaagacgcgatcgtgtaacacgactcacaatagaatctgtgaatgctctcccggatattattgtcttctcaaaggatcatccggatgcaaggcatgtgtttcccaaacaaaatgtggaataggatacggagtatccggagacgtcatctgttctccgtgtggtctcggaacatattctcacaccgtctcttccgcagataaatgcgaacccgtacccagaaatacgtttaactatatcgatgtggaaattaacctgtatccagttaacgacacgtcgtgtactcggacgaccactaccggtctcagcgaatccatctcaacgtcggaactaactattactatgaatcataaagactgtaatcccgtctttcgtgatggatacttctccgttcttaataaggtagcaacttcaggattctttacaggagaaaggtgtgcactctgaatttcgagattaaatgcaataacaaagattcttcctccaaacagttaacgaaagcaaagaatgatactatcatgccgcattcggagacagtaactctagtgggcgacatctatatactatatagtaataccaatactcaagactacgaaactgatacaatctcttatcatgtgggtaatgttctcgatgtcgatagccatatgcccggtagttgcgatatacataaactgatcactaattccaaacccacccactttttatagtaagtttttcacccataaataataaatacaataattaatttctcgtaaaagtagaaaatatattctaatttattgcacggtaaggaagtagaatcataaagaacagtactcaatcaatagcaattatgaaacaatatatcgtcctggcatgcatgtgcctggcggcagctgctatgcctgccagtcttcagcaatcatcctcatcctcctcctcgtgtacggaagaagaaaacaaacatcatatgggaatcgatgttattatcaaagtcacaaagcaagaccaaacaccgaccaatgataagatttgccaatccgtaacggaaattacagagtccgagtcagatccagatcccgaggtggaatcagaagatgattccacatcagtcgaggatgtagatcctcctaccacttattactccatcatcggtggaggtctgagaatgaactttggattcaccaaatgtcctcagattaaatccatctcagaatccgctgatggaaacacagtgaatgctagattgtccagcgtgtccccaggacaaggtaaggactctcccgcgatcactcatgaagaagctcttgctatgatcaaagactgtgaagtgtctatcgacatcagatgtagcgaagaagagaaagacagcgacatcaagacccatccagtactcgggtctaacatctctcataagaaagtgagttacgaagatatcatcggttcaacgatcgtcgatacaaaatgcgtcaagaatctagagtttagcgttcgtatcggagacatgtgcaaggaatcatctgaacttgaggtcaaggatggattcaagtatgtcgacggatcggcatctgaaggtgcaaccgatgatacttcactcatcgattcaacaaaactcaaagcgtgtgtctgaatcgataactctattcatctgaaattggatgagtagggttaatcgaacgattcaggcacaccacgaattaaaaaagtgtaccggacactatattccggtttgcaaaacaaaaatgttcttaactacattcacaaaaagttacctctcgcgacttcttctttttctgtctcaatagtgtgatacgattatgacactattcctattcctattcctatttcctttcagagtatcacaaaaatattaaacctctttctgatggtctcataaaaaaagttttacaaaaatatttttattctctttctctctttgatggtctcataaaaaaagttttacaaaaatatttttattctctttctctctttgatggtctcataaaaaaagttttacaaaaatatttttattctctttctctctttgatggtctcataaaaaaagttttacaaaaatatttttattctctttctctctttgatggtctcataaaaaaagttttacaaaaatatttttattctctttctctctttgatggtctcataaaaaaagttttacaaaaatatttttattctctttctctctttgatggtctcataaaaaaagttttacaaaaatatttttattctctttctctctttgatggtctcataaaaaaagttttacaaaaatatttttattctctttctctctttgatggtctcataaaaaaagttttacaaaaatatttttattctctttctctctttgatggtctcataaaaaaagttttacaaaaatatttttattctctttctctctttgatggtctcataaaaaaagttttacaaaaatatttttattctctttctctctttgatggtctcataaaaaaagttttacaaaaatatttttattctctttctctctttgatggtctcataaaaaaagttttacaaaaatatttttattctctttctctctttgatggtctcataaaaaaagttttacaaaaatatttttattctctttctctctttgatggtctcataaaaaaagttttacaaaaatatttttattctctttctctctttgatggtctcataaaaaaagttttacaaaaatatttttattctctttctctctttgatggtctcataaaaaaagttttacaaaaatatttttattctctttctctctttgatggtctcataaaaaaagttttacaaaaatatttttattctctttctctctttgatggtctcataaaaaaagttttaatcg

SEQ ID NO: 59 - DNA, 188082 bp, Vaccinia virus
  LIVP 6.1.1
tcaaagagagaaagagaataaaaatatttttgtaaaactttttttatgagaccatcaaagagagaaagagaataaaaatatttttgtaaaactttttttatgagaccatcaaagagagaaagagaataaaaatatttttgtaaaactttttttatgagaccatcaaagagagaaagagaataaaaatatttttgtaaaactttttttatgagaccatcaaagagagaaagagaataaaaatatttttgtaaaactttttttatgagaccatcaaagagagaaagagaataaaaatatttttgtaaaactttttttatgagaccatcaaagagagaaagagaataaaaatatttttgtaaaactttttttatgagaccatcaaagagagaaagagaataaaaatatttttgtaaaactttttttatgagaccatcaaagagagaaagagaataaaaatatttttgtaaaactttttttatgagaccatcaaagagagaaagagaataaaaatatttttgtaaaactttttttatgagaccatcaaagagagaaagagaataaaaatatttttgtaaaactttttttatgagaccatcaaagagagaaagagaataaaaatatttttgtaaaactttttttatgagaccatcagaaagaggtttaatatttttgtgatactctgaaaggaaataggaataggaataggaatagtgtcataatcgtatcacactattgagacagaaaaagaagaagtcgcgagaggtaactttttgtgaatgtagttaagaacatttttgttttgcaaaccggaatatagtgtccggtacacttttttaattcgtggtgtgcctgaatcgttcgattaaccctactcatccaatttcagatgaatagagttatcgattcagacacacgctttgagttttgttgaatcgatgagtgaagtatcatcggttgcaccttcagatgccgatccgtcgacatacttgaatccatccttgacctcaagttcagatgattccttgcacatgtctccgatacgaacgctaaactctagattcttgacgcattttgtatcgacgatcgttgaaccgatgatatcttcgtaactcactttcttatgagagatgttagacccgagtactggatgggtcttgatgtcgctgtctttctcttcttcgctacatctgatgtcgatagacacttcacagtctttgatcatagcaagagcttcttcatgagtgatcgcgggagagtccttaccttgtcctggggacacgctggacaatctagcattcactgtgtttccatcagcggattctgagatggatttaatctgaggacatttggtgaatccaaagttcattctcagacctccaccgatgatggagtaataagtggtaggaggatctacatcctcgactgatgtggaatcatcttctgattccacctcgggatctggatctgactcggactctgtaatttccgttacggattggcaaatcttatcattggtcggtgtttggtcttgctttgtgactttgataataacatcgattcccatatgatgtttgttttcttcttccgtacacgaggaggaggatgaggatgattgctgaagactggcaggcatagcagctgccgccaggcacatgcatgccaggacgatatattgtttcataattgctattgattgagtactgttctttatgattctacttccttaccgtgcaataaattagaatatattttctacttttacgagaaattaattattgtatttattatttatgggtgaaaaacttactataaaaagtgggtgggtttggaattagtgatcagtttatgtatatcgcaactaccgggcatatggctatcgacatcgagaacattacccacatgataagagattgtatcagtttcgtagtcttgagtattggtattactatatagtatatagatgtcgcccactagagttactgtctccgaatgcggcatgatagtatcattctttgctttcgttaactgtttggaggaagaatctttgttattgcatttaatctcgaaattcagagtgcacacctttctcctgtaaagaaacctgaagtcgctaccttattaagaacggagaagtatccatcacgaaagacgggattacagtctttatgattcatagtaatagttagttccgacgttgagatggattcgctgagaccggtagtggtcgtccgagtacacgacgtgtcgttaactggatacaggttaatttccacatcgatatagttaaacgtatttctgggtacgggttcgcatttatctgcggaagagacggtgtgagaatatgttccgagaccacacggagaacagatgacgtctccggatactccgtatcctattccacattttgtttgggaaacacatgccttgcatccggatgatcctttgagaagacaataatatccgggagagcattcacagattctattgtgagtcgtgttacacgatcgcgtcttccgttacaacttagacaagcgggtaaatgattattgcgagatgtgaaggtacccgaaccacacggcgtacattgtgtgttagtcttgctatcgcataatctggaagcgtatgttcccggacacaaattatggcgtttgtattcgttgtctttacactttccatcggatggtgcatgcggtgctatatctcttccgtttattattatacatgagagaaacaatatatacgagtataatacggacttcatgatttaataatgtagtaatcgttgtcttgttcctgtttcctacttctccaatcatatagatattttctttctatcatggataatatttgtaatggttctttccgtacaacatactgtttagatgatattgcgcataatttccggaggcaaatacgatagtctagattgaccgatggtagactctaatttattgagtgctttgtcgacgagtttacttttacgctccatcgatagatggcactgttctatgagatcgtcgtacatgggaaatgaaatgtgactgtctgaatgtatggctttaagatagctgtgataccgtatacaggtcggtgtcggagattcgaatctctttgaggcgacttatgtcacgatgatggaatctatcttatcgaatgatatatttttcataaatacacttttatagtcctcgtttaaacagaatttactatgtagttccgcgaatgactcgtcccttaataggcagtaggctagtatcttttttacgtagtaatcgtcgtagggagagacatcttgtagaacaacgatttaatcataggtagagatactttcagtctgtggtggatgatgtcattcacaacatccgccttgtatatgatgtttctgttttcaaacaccaagtcgaataccgtctttagtcggaaggttgatgtcgtatccgatgtatgaggcaacattgttgttacaattttgaaaggcggtattatagtattcgtctttctgaatgtcgaacctatctaatagataccgtagtatattgagagtgtatccttgattatgttttatgaatagataaagtagatgttgtccttcttccttttgttcgtgccaattgagtaacattatgagaatatgacctgttgcacaatcgttccatgatgggtgtacaatcaagattattacgtatcctcgtatcggctcctcgagataaaagagcatacaccacacgaggactatgtttggtatactgttgaaggtaagtgtgtaaccgcgttaatgtttgctccataatctattatcgcgtagatgaatcgcttctcggctcgcatcttagtgtgacttgacttgtaataattgctttcgtagaacgtggatatgtgtttacagtagtaatgaagagaagtgagttcatcctcgtcggcgcaattagggtcggatcctttgtacagaacgtaatagtttaagctcccattgaatttatatctaagataacacagcaatagatcggatgatttactaaagtcatcaatggtgtccgttagtatatcaaagatcttgttatcgattgatagtggtcatccttgctatcaaagttacgcatgccgtggtgtaacaatatctttaatacagatggattaaatcgtgtattcatcgtatagcaatgtaatggagagttacctcgtttattcagatcgcagtgtttaataactagcttaaacagatgagacgatgtatctacatcaaagaacgtaaaatacatatgacagacattgttgacagaaacgtgaccttcattcttaccgtcgtccataaatacgttaggtatgtaccacatactgtcgcgaacgatgcgtacaatctcgtccatctcataatgatttactttttcataattaaagatgtgaaagaaaaaccgaacaatatatttttttagtaatgtttatgcgagacatataaaataaactccgtgtttatgatgccggtaaatgtttttatcatcttggacggaatcgattttgtaatatgtcatggaaacaaatgaaacaggacattatcgctccatgataaattatttaatggagtaataaagtatctccatgggtaatttcgaaatcaagttatcgtctgtattaatgttgtccactatggagtcgatcctctcattgttctttacagtttctgtaatgatggacgttagttcttttttgtaccatttgatgtcggattctttgcgtatctcaatctgtggcgtttgcttcgtttaaataatatatcaaacatggaaacgcctgatatgtagacattcttcattctattaatgtctactctatagcgctttagttccttatgacgaccggcgatatcatactttactttagaaggaaaatcatcatctaggattaaggcgtatctgatacaggcgaataatggttcaggatatagatagcgtatatctctattaaatgcgtcaatcatagtctctagagtgggatggtaactcagtaataaatcaactagcttcgttttgttttctctttggtaactgcttttctggatggccgtattgattatcgagcgtgacactcgctccatattccaataaccgctttgcaaattgtatattattgacatcgaccgcgtaatatagtagagttatcgatcatatctatatcatccatgtacttgcttagtatatcaaatacatctatcagtatggtttcataacagtgatacccgcaattattaaatctcgataatatcagaccgtacatacatagacggccattgttcgatacgtgatttacagccgcgtgtccatattttccacgataaaccttacgacgtttacatcgacgagattattattaacaaagtagtcgtgtagaggatagttgttgtccgtcgtcttatccatggttgctccgttatccaacatgcatcgaacgaccatatcgccgtaatgtaagtagtttatcagtatggcttgtacatcctgttgtctaaatctctttagaatgttatcgatgatgtagtggttatattctctggaatcgtacgaagtaatactacgcattacgtcgacaagagtatgacgtctctcaataagaagattaacgatttccatgtctacattatatggggttactctaaatcgcttgtttagataatacgcctctaatatagggctgacgtcgtatactctacacgtgtccacatcctttattaataataatttaacaatctctatatctatggttgagaaagaccagtagtattggatgggtaaagatcctccttcgtctctgccatggatggaaacattgttatcgatcaaacatttaattacatccttggatagagattgagattctctatgagacgatatatagtaatgaagagagttcttacacatatcactgtcgtacatacaggtacgaaatacgtaaccggtgctgtaacattctgatttaagaagccatagcaatacttctggtctcggattaggcgtcgttacgtatatatccaccaatccgagaccattgattgcataattcgtattcttggacggacgtatccgtttatccacaattaggtattttagcagacgtaagtcgatattatccgaatacagatcgaaatcatttatattcgacttgagttcgttagaggaattcgaatagctggatatcagtagatgcacaatttgagatttgacgtatctatgcttactgtatactcctagcggagttaatccttcgttgtttctacaaagtctctcgactccgcgagagaacaatcttaatgtctgtatcgcatttattggagacgtaacaatgtagcgcattgtttcctcgtctatctatatgttttgataagttgtgacacgtttcaatttctagttttatttttttgtacgtcacatcttcatccagtagacgacatagaatagtgcactctctaccacaataatccatagctattctggtgctaattattcctatttcacgaaggcaatcattcctcataagatgataaaaagtgtagtgagagagcatgaaggagatttagtatttagcagtgcggatatgatccaagagggtgagatagtcgttctcgttcagaatctttcgcagcataagtagtatgtcgatatacttatcgttgaagactctttataaaagtctatttgtttatatttattgcggatagcagtatttccctataaaaagtatacgtcctgtggtgtctttaatcatgtacatgaatggatggtttatgtagaccttcgtacgatataccatcgaaaagttaatcgtaaatactcctgtaacggccgatgcttctgtatactcctcattaacatctataaacgtcgtatgtagaaatttttctacagtgatagtttcattacacatcttgctaaaatctgcataatatccgaatatattagtaagtcctaaattttctaaaatcggtaccagattatacggttctgtcatttccactttaaactttggcatatacaagtctatacttttagtagataacataccacaccattttttaaatttttcatctgttatatttttttctatgttatatataccttctatgtcgtccggtagtataattaccatactagagtttccctcgtatggaatatcgataatagagaatcctccgaataattcattaatatgtacatattgcaagttattctcggtacccaccatcatatcaacgctggtaactatattcttagaaatataaaacttgtctgtatatgtaagatgtttagaaaatggatatttccacattgctttaaaatggacggcgctaacaactgtcatacgagtattaatggatagcggactagtcaataaggaattaattttaccatttgtcattgtcttaacccattcgttgattagttcctttgtttggttagcattattaaagtttacagtttgaaaatcgtcttttattttttgtaggaaggaggcgtggaactcgatactatcgctaccgtatattttatttgcggtagctagtgtcgcacaatacggaatatctacctccatgtcatcattattgtcatcgggtgtattctcattcatattctctatatattttgatagttgttcagctgtagaaccagctgctccatgatttagaatagataaagtagataaaatggaaactggagaaatcaaaacattttcatcagggtgttttacgattagttctttaaagatatccatggtatagacctaacgataacgatatatatcataaataaataatgttaaatttcagtttatgtttgtaccccgtattcatacttaacaaattggtattgcgtacacaatcaatcatattacataccattaataatgcaagcataaaaaatcgttagtagatgtttctaaatataggttccgtaagcaaagaatataagaatgaagcggtaatgataaaatcaatcgttatctaaaatgatcatactcatttattttattctattatattaacacatacatttttaacagcaacacattcaatattgtattgttatttttatattatttacacaattaacaatatattattagtttatattactgaattaataatataaaattcccaatcttgtcataaacacacactgagaaacagcataaacacagaatccatcaaaaatgttgataaattatctgatgttgttgttcgctgctatgataatcagatcattcgccgatagtggtaacgctatcgaaacgacattgccagaaattacaaacgctacaacagatattccagctatcagattatgcggtccagagggagatggatattgtttacacggtgactgtatccacgctagagatattgacggtatgtattgtagatgctctcatggttatacaggcattagatgtcagcatgtagtattagtagactatcaacgttcagaaaacccaaacactacaacgtcatatatcccatctcccggtattatgcttgtattagtaggcattattatgtgttgtctattatctgtttataggttcactcgacgaactaaactacctatacaagatatggttgtgccataatttttataaatttttttatgagtatttttacaaaaatgtataaagtgtatgtcttatgtatatttataaaaatgctaagtatgcgatgtatctatgttatttgtatttatctaaacaatacctctacctctagatattatacaaaaattttttatttcggcatattaaagtaaaatctagttaccttgaaaatgaatacagtgggtggttccgtatcaccagtaagaacataatagtcaaatacagtatccgattgagattttgcatacaatactagtctagaaagaaatttgtaatcatcttctgtgacgggagtccatatatctgtatcatcgtctagtttatcagtgtcccatgctatattcctgttatcatcattagttaatgaaaataactctcgtgcttcagaaaagtcaaatattgtatccatacatacatctccaaaactatcgcttatacgtttatctttaacgatacctatacctagatggttatttactaacagacattttccagatctattgactataactcctatagtttccacatcaaccaagtaatgatcatctattgttatataacaataacataactcttttccatttttatcagtatgtatatctatatcaacgtcgtcgttgtagtgaatagtagtcattgatctattatatgaaacggatatgtctagaacggcaattgttttacgtccagttaacactttctttgatttaaagtctagagtctttgcaaacataatatccttatccgactttatatttcctgtagggtggtataattttattttgcctccacatatcggtgtttccaaatatattactagacaatattccatatagttattagttaagggtacccaattagaacacgtacgcttattatcatcatttggatcgtatttcataaaagttattgtgttatcgatgtcaacacattctacattttttaatcgtctatatagtatttttctgatattttctataatatcagaattgtcttccatcggaagttgtatactatcggaatcagttacatgtttaaataattctctgatgtcattccttatacaatcaaattcattattaaacagtttaatagtctgtagacctttatcgtcgtaaatatccattgtcttattagttacgcttatttttatgtgtttttacgttgctttattatattttataagaatgattgtttgacgaatcacgagaactattaagacacattattaggtatatattataaaaaagtttttgattacgatgttataagaggaaagaggacacattaacatcatacatcaattaactacattcttataacatcgtaatcaaaagaattgcaattttgatgtataacaactgtcaatgggttatggaattgtatattacatattatacggtatgttggtaacgacaaataccggtcggtaattgtctgccggtgtaatagaattatatatatctatctattacaccggccttgtatacataataataagttgtggtagtatgatctccatatttataatttaggactttgtattcagtatttttggaatcataaaaaataaaaaaaagttttactaatttaaaatttaaaaagtatttacatttttttcactgtttagtcgcggatatggaattcgatcctgccaaaatcaatacatcatctatagatcatgtaacaatattacaatacatagatgaaccaaatgatataagactaacagtatgcattatccgaaatattatatcaatatcacaaaaataaatacacatttggctaatcaatttcgggcttggaaaaaacgtatcgccggaagggactatatgactaacttatctagagatacaggaatacaacaatcaaaacttactgaaactatacgtaactgtcaaaaaaatagaaacatatatggtctatatatacactacaatttagttattaattggataaccgatgtgattatcaatcaatattaagagggttggtaaattggtacatagctaataatacctatacacccaataatacaacaaccatttctgagttggatatcatcaaaatactaaataaatacgaggacgtgtatagagtaagtaaagaaaaagaatgtggaatttgctatgaagttgtttactcaaaacgatagatactttggtttattggattcgtgtactcatatattttgcataacatgcatcaatatatggcataaaacacgaagagaaaccggtgcgtcggataattgtcctatatgccgtacccgttttagaaacataacaatgagcaagttctataagctagttaactaataaataaaaagtttaatttgttgacgacgtatgtcgttattttttctcgtataaaagattaatttgattctaatataatctttagtattggataaatatcaattcaaattaattccattagattatatcataaataaaaatagtagcacacaactacttcagcaaacattctttttataaatgccatctagcgtagcgaggacacaagtgaacctataattatcaaatttattagtatcagtcacatgaaggactttacgtagagtgacgattccactatctgtggtacgaacggtttcatcttctttgatgccatcacccagatgttctataaacttggtatcctcgtccgatctcatatcctttgccaaccaatacatgtagctaaaattaggcataaatttcacacatcctgaacaatgaaattctccagaagatgttacaatgtctagatttggacatttggtttcaaccgcgttaacatatgagtgaacacacccatacatgaaagcgatgagaaataggattctcatcttgccaaaatatcactagaaaaaatttatttatcagttttaaaggtataaaaaatacttattgttgctcgaatattttgtatttgatggtatacggaagattagaaatgtaggtattatcatcaactgattctatggttttatgtattctatcatgtttcactattgcgttggaaataatatcatatgcttccacatatattttattttgttttaactcataatactcacgtaattctggattattggcatatctatgaataattttagctccatgatcagtaaatattaatgagaacatagtattaccacctaccattatttttttcatctcattcaattcttaattgcaaagatctatataatcattatagcgttgacttatggactctggaatcttagacgatgtacagtcatctataatcatggcatatttaatacattgttttatagcatagtcgttatctacgatgttagatatttctctcaatgaatcaatcacacaatctaatgtaggtttatgacataatagcattttcagcagttcaatgtttttagattcgttgatggcaatggctatacatgtatatccgttatttgatctaatgttgacatctgaaccggattctagcagtaaagatactagagattgtttattatatctaacagccttgtgaagaagtgtttctcctcgtttgtcaatcatgttaatgtctttaagataaggtaggcaaatgtttatagtactaagaattgggcaagcataagacatgtcacaaagacccttttttgtatgtataagtgtaaaaattataacatccatagttggatttacataggtgtccaatcgggatctctccatcatcgagataattgatggcatctcccttccttttttagtagatatttcatcgtgtaagaatcaatattaatatttctaaagtatccgtgtatagcctctttatttaccacagctccatattccactagagggatatcgccgaatgtcatatactcaattagtatatgttggaggacatccgagttcattgttttcaatatcaaagagatggtttccttatcatttctccatagtggtacaatactacacattattccgtgcggctttccattttccaaaaacaatttgaccaaatctaaatctacatctttattgtatctataatcactatttagataatcagccataattcctcgagtgcaacatgttagatcgtctatatatgaataagcagtgttatctattcctttcattaacaatttaacgatgtctatatctatatgagatgacttaatataatattgaagagctgtacaatagtttttatctataaaagacggcttgattccgtgattaattagacatttaacaacttccggacgcacatatgctctcgtatccgactctgaatacagatgagagatgatatacagatgcaatacggtaccgcaatttcgtagttgataatcatcatacgcgtatcagtactcgtcctcataaagaacactgcagccattttctatgaacaaatcaataattttagaaacaggatcattgtcattacataattttctataactgaacgatggttttcacatttaacactcaagtcaaatccatgttctaccaacacctttatcaagtcaacgtctacatttttggatttcatatagctgaatatattaaagttatttatgttgctaaatccagtggcttctagtagagccatcgctatatccttattaactttaacatgtctactatttgtgtattcttctaatggggtaagctgtctccaatttttgcgtaatggattagtgccactgtctagtagtagtttgacgacctcgacattattacaatgctcattaaaaaggtatgcgtgtaaagcattattcttgaattggttcctggtatcattaggatctctgtctttcaacatctgtttaagttcatcaagagccacctcctcattttccaaatagtcaaacattttgactgaatgagctactgtgaactctatacacccacacaactaatgtcattaaatatcatgtcaaaaacttgtacaattattaataaaaataatttagtgtttaaattttaccagttccagattttacacctccgttaatacctccattaaccccactggacgatcctcctccccacattccaccgccaccagatgtataagttttagatcctttattactaccatcatgtccatggataaagacactccacatgccgccactaccccctttagaagacatattaataagacttaaggacaagtttaacaataaaattaatcacgagtaccctactaccaacctacactattatatgattatagtttctatttttacagtaccttgactaaagtttctagtcacaagagcaatactaccaacctacactattatatgattatagtttctatttttataggaacgcgtacgagaaaatcaaatgtctaatttctaacggtagtgttgataaacgattgttatccgcggatacctcctctatcatgtcgtctattttcttactttgttctattaacttattagcattatatattatttgattataaaacttatattgcttattagcccaatctgtaaatatcggattattaacatatcgtttctttgtaggtttatttaacatgtacatcactgtaagcatgtccttaccatttattttaatttgacgcatatccgcaatttctttttcgcagtcggttataaattctatatatgatggatacatgctacatgtgtacttataatcgactaatatgaagtacttgatacatattttcagtaacgatttattattaccacctatgaataagtacctgtgatcgtctaggtaatcaactgttttcttaatacattcgatggttggtaatttactcagaataatttccaatatcttaatatataattctgctatttctgggatatatttatctgccagtataacacaaatagtaatacatgtaaacccatattttgttattatattaatgtctgcgccattatctattaaccattctactaggctgacactatgcgactcaatacaatgataaagtatactacatccatgtttatctattttgtttatatcatcaatatacggcttacaaagttttagtatcgataacacatccaactcacgcatagagaaggtagggaataatggcataatatttattaggttatcatcattgtcattatctacaactaagtttccattttttaaaatatactcgacaactttaggatctctattgccaaatttttgaaaatatttatttatatgcttaaatctatataatgtagctccttcatcaatcatacatttaataacattgatgtatactgtatgataagatacatattctaacaatagatcttgtatagaatctgtatatcttttaagaattgtggatattaggatattattacataaactattacacaattctaaaatataaaacgtatcacggtcgaataatagttgatcaactatataattatcgattttgtgatttttcttcctaaactgtttacgtaaatagttagatagaatattcattagttcatgaccactatagttactatcgaataacgcgtcaaatatttcccgtttaatatcgcatttgtcaagataataatagagtgtggtatgttcacgataagtataataacgcatctctttttcgtgtgaaattaaatagtttattacgtccaaagatgtagcataaccatcttgtgacctagtaataatataataatagagaactgttttacccattctatcatcataatcagtggtgtagtcgtaatcgtaatcgtctaattcatcatcccaattataatattcaccagcacgtctaatctgttctattttgatcttgtatccatactgtatgttgctacatgtaggtattcctttatccaataatagtttaaacacatctacattgggatttgatgttgtagcgtatttttctacaatattaataccatttttgatactatttatttctatacctttcgaaattagtaatttcaataagtctatattgatgttatcagaacatagatattcgaatatatcaaaatcattgatatttttatagtcgactgacgacaataacaaaatcacaacatcgtttttgatattattatttttcttggtaacgtatgcctttaatggagtttcaccatcatactcatataatggatttgcaccactttctatcaatgattgtgcactgctggcatcgatgttaaatgttttacaactatcatagagtatcttatcgttaaccatgattggttgttgatgctatcgcattttttggtttctttcatttcagttatgtatggatttagcacgtttgggaagcatgagctcatatgatttcagtactgtagtgtcagtactattagtttcaataagatcaatctctagatctatagaatcaaaacacgataggtcagaagataatgaatatctgtaggcttcttgttgtactgtaacttctggttttgttagatggttgcatcgtgctttaacgtcaatggtacaaattttatcctcgctttgtgtatcatattcgtccctactataaaattgtatattcagattatcatgcgatgtgtatacgctaacggtatcaataaacggagcacaccatttagtcataaccgtaatccaaaaatttttaaagtatatcttaacgaaagaagttgtgtcattgtctacggtgtatggtactagatcctcataagtgtatatatctagagtaatgtttaatttattaaatggttgataatatggatcctcgtgacaatttccgaagatggaaataagacataaacacgcaataaatctaattgcggacatggttactccttaaaaaaatacgaataatcaccttggctatttagtaagtgtcatttaacactatactcatattaatccatggactcataatctctatacgggattaacggatgttctatatacggggatgagtagttctcttctttaactttatactttttactaatcatatttagactgatgtatgggtaatagtgtttgaagagctcgttctcatcatcagaataaatcaatatctctgtttttttgttatacagatgtattacagcctcatatattacgtaatagaacgtgtcatctaccttattaactttcaccgcatagttgtttgcaaatacggttaatcctttgacctcgtcgatttccgaccaatctgggcgtataatgaatctaaactttaattgcttgtaatcattcgaaataatttttagtttgcatccgtagttatcccctttatgtaactgtaaatttctcaacgcgatatctccattaataatgatgtcgaattcgtgctgtatacccatactgaatggatgaacgaataccgacggcgttaatagtaatttactttttcatctttacatattgggtactagttttactatcataagtttataaattccacaagctactatggaataagccaaccatcttagtataccacacatgtcttaaagtttattaattaattacatgttgttttatatatatcgctacgaatttaaagagaaattagtttaggaagaaaaattatctatctacatcatcacgtctctgtattctacgatagagtgctactttaagatgcgacagatccgtgtcatcaaatatatactccattaaaatgattattccggcagcgaacttgatattggatatatcacaacctttgttaatatctacgacaatagacagcagtcccatggttccataaacagtgagtttatctttctttgaagagatattttgtagagatcttataaaactgtcgaatgacatcgcatttatatctttagctaaatcgtatatgttaccatcgtaatatctaaccgcgtctatcttaaacgtttccatcgctttaaagacgtttccgatagatggtctcatttcatcagtcatactgagccaacaaatataatcgtgtataacatctttgatagaatcagactctaaagaaaacgaatcggctttattatacgcattcatgataaacttaatgaaaaatgtttttcgttgtttaagttggatgaatagtatgtcttaataattgttattatttcattaattaatatttagtaacgagtacactctataaaaacgagaatgacataactaatcataactagttatcaaagtgtctaggacgcgtaattttcatatggtatagatcctgtaagcattgtctgtattctggagctattttctctatcgcattagtgagttcagaatatgttataaatttaaatcgaataacgaacataactttagtaaagtcgtctatattaactcttttattttctagccatcgtaataccatgtttaagatagtatattctctagttactacgatctcatcgttgtctagaatatcacatactgaatctacatccaattttagaaattggtctgtgttacatatctcttctatattattgttgatgtattgtcgtagaaaactattacgtagaccattttctttataaaacgaatatatagtactccaattatctttaccgatatatttgcacacataatccattctctcaatcactacatctttaagattttcgttgttaagatatttggctaaactatataattctattagatcatcaacagaatcagtatatatttttctagatccaaagacgaactctttggcgtcctctataatattcccagaaaagatattttcgtgttttagtttatcgagatctgatctgttcatatacgccatgattgtacggtacgttatgataaccgcataaaataaaaatccattttcatttttaaccaatactattcataattgagattgatgtaatactttgttactttgaacgtaaagacagtacacggatccgtatctccaacaagcacgtagtaatcaaatttggtgttgttaaacttcgcaatattcatcaatttagatagaaacttatactcatcatctgttttaggaatccatgtattattaccactttccaacttatcattatcccaggctatgtttcgtccatcatcgttgcgcagagtgaataattcttttgtattcggtagttcaaatatatgatccatgcatagatcggcaaagctattgtagatgtgatttttcctaaatctaatataaaactcgtttactagcaaacactttcctgatttatcgaccaagacacatatggtttctaaatctatcaagtggtggggatccatagttatgacgcagtaacatatattattacattcttgactgtcgctaatatctaaatatttattgttatcgtattggattctgcatatagatggcttgtatgtcaaagatatagaacacataaccaatttatagtcgcgctttacattctcgaatctaaagttaagagatttagaaaacattatatcctcggatgatgttatcactgtttctggagtaggatatattaaagtctttacagatttcgtccgattcaaataaatcactaaataatatcccacattatcatctgttagagtagtatcattaaatctattatattttatgaaagatatatcactgctcacctctatatttcgtacatttttaaactgtttgtataatatctctctgatacaatcagatatatctattgtgtcggtagacgataccgttacatttgaattaatggtgttccattttacaacttttaacaagttgaccaattcatttctaatagtatcaaactctccatgattaaatattttaatagtatccattttatatcactacggacacaaagtagctgacataaaccattgtataatttttatgttttatgtttattagcgtacacattttggaagttccggcttccatgtatttcctggagagcaagtagatgatgaggaaccagatagtttatatccgtacttgcacttaaagtctacattgtcgttgtatgagtatgatcttttaaacccgctagacaagtatccgtttgatattgtaggatgtggacatttaacaatctgacacgtgggtggatcggaccattctcctcctgaacacaggacactagagttaccaatcaacgaatatccactattgcaactataagttacaacgctcccatcggtataaaaatcctcgtatccgttatgtcttccgttggatatagatggaggggattggcatttaacagattcacaaataggtgcctcgggattccataccatagatccagtagatcctaattcacaatacgatttagattcaccgatcaactgatatccgctattacaagagtacgttatactagagccaaagtctactccaccaatatcaagttggccattatcgatatctcgaggcgatgggcatctccgtttaatacattgattaaagagtgtccatccagtacctgtacatttagcatatataggtcccattttttgctttctgtatccaggtagacatagatattctatagtgtctcctatgttgtaattagcattagcatcagtctccacactattcttaaatttcatattaatgggtcgtgacggaatagtacagcatgatagaacgcatcctattcccaacaatgtcaggaacgtcacgctctccaccttcatatttatttatccgtaaaaatgttatcctggacatcgtacaaataataaaaagcccatatatgttcgctattgtagaaattgtttttcacagttgctcaaaaacgatggcagtgacttatgagttacgttacactttggagtctcatctttagtaaacatatcataatattcgatattacgagttgacatatcgaacaaattccaagtatttgattttggataatattcgtattttgcatctgctataattaagatataatcaccgcaagaacacacgaacatctttcctacatggttaaagtacatgtacaattctatccatttgtcttccttaactatatatttgtatagataattacgagtctcgtgagtaattccagtaattacatagatgtcgccgtcgtactctacagcataaactatactatgatgtctaggcatgggagacttttttatccaacgatttttagtgaaacattccacatcgtttaatactacatatttttcatacgtggtataaactccacccattacatatatatcatcgtttacgaataccgacgcgcctgaatatctaggagtaattaagtttggaagtcttatccatttcgaagtgccgtgtttcaaatattctgccacacccgttgaaatagaaaattctaatcctcctattacatataactttccatcgttaacacaagtactaacttctgattttaacgacgacatattagtaaccgttttccattttttcgttttaagatctacccgcgatacggaataaacatgtctattgttaatcatgccgccaataatgtatagacaattatgtaaaacatttgcattatagaattgtctatctgtattaccgactatcgtccaatattctgttctaggagagtaatgggttattgtggatatataatcagagtttttaatgactactatattatgttttataccatttcgtgtcactggctttgtagatttggatatagttaatcccaacaatgatatagcattgcgcatagtattagtcataaacttgggatgtaaaatgttgatgatatctacatcgtttggatttttatgtatccactttaataatatcatagctgtaacatcctcatgatttacgttaacgtcttcgtgggataagatagttgtcagttcatcctttgataattttccaaattctggatcggatgtcaccgcagtaatattgttgattatttctgacatcgacgcattatatagttttttaattccatatcttttagaaaagttaaacatccttatacaatttgtgaaattaatattatgaatcatagtttttacacatagatctactacaggcggaacatcaattattatggcagcaactagtatcatttctacattgtttatggtgatgtttatcttcttccagcgcatatagtctaatagcgattcaaacgcgtgatagtttataccattcaatataatcgcttcatcctttagatggtgatcctgaatgcgtttaaaaaaattatacggagacgccgtaataatttccttattcacttgtataatttccccattgatagaaaatatcacgctttccattcttaaagtactataagtaattatagtataatgtaaacgtttatatattcaatatttttataaaaatcattttgacattaattcctttttaaatttccgtctatcatctatagaaacgtattctatgaatttataaaatgcttttacgtgtcctatcgtaggcgatagaaccgctaaaaagcctatcgaatttctacaaaagaatctgttatatggtatagggagagtataaaacattaaatgtccgtacttattaaagtattcagtagccaatcctaactctttcgaatacttattaatggctcttgttctgtacgaatctatttttttgaacaacggacctagtggtatatcttgttctatgtatctaaaataatgtctgactagatccgttagtttaatatccgcagtcatcttgtctagaatggcaaatctaactgcgggtttaggctttagtttagtttctatatctacatctatgtctttatctaacaccaaaaatataatagctaatattttattacaatcatccggatattcttctacgatctcactaactaatgtttctttggttatactagtatagtcactatcggacaaataaagaaaatcagatgatcgatgaataatacatttaaattcatcatctgtaagatttttgagatgtctcattagaatattattagggttagtactcattatcattcggcagctattacttattttattatttttcaccatatagatcaatcattagatcatcaaaatatgtttcaatcatcctaaagagtatggtaaatgactcttcccatctaatttctgaacgttcaccaatgtctctagccactttggcactaatagcgatcattcgcttagcgtcttctatattattaactggttgattcaatctatctagcaatggaccgtcggacagcgtcattctcatgttcttaatcaatgtacatacatcgccgtcatctaccaattcatccaacaacataagctttttaaaatcatcattataataggtttgatcgttgtcatttctccaaagaatatatctaataagtagagtcctcatgcttagttaacaactattttttatgttaaatcaattagtacaccgctatgtttaatacttattcatattttagtttttaggattgagaatcaatacaaaaattaatgcatcattaattttagaaatacttagtttccacgtagtcaatgaaacatttgaactcatcgtacaggacgttctcgtacaggacgtaactataaaccggtttatatttgttcaagatagatacaaatccgataactttttttacgaattctacgggatccactttaaaagtgtcataccgggttctttttatttttttaaacagatcaatggtgtgatgttgattaggtcttttacgaatttgatatagaatagcgtttacatatcctccataatggtcaatcgccatttgttcgtatgtcataaattctttaattatatgacactgtgtattatttagttcatccttgttcattgttaggaatctatccaaaatggcaattatactagaactataggtgcgttgtatacacatattgatgtgtctgtttatacaatcaatgctactaccttcgggtaaaattgtagcatcatataccatttctagtactttaggttcattattatccattgcagaggacgtcatgatcgaatcataaaaaaatatattatttttatgttattttgttaaaaataatcatcgaatacttcgtaagatactccttcatgaacataatcagttacaaaacgtttatatgaagtaaagtatctacgatttttacaaaagtccggatgcataagtacaaagtacgcgataaacggaataataatagatttatctagtctatctttttctatagctttcatagttagatacatggtctcagaagtaggattatgtaacatcagcttcgataaaatgactgggttatttagtcttacacattcgctcatacatgtatgaccgttaactacagagtctacactaaaatgattgaacaatagatagtctaccattgtttcgtattcagatagtacagcgtagtacatggcatcttcacaaattatatcattgtctaatagatatttgacgcatcttatggatcccacttcaacagccatcttaaaatcggtagaatcatattgctttcctttatcattaataatttctagaacatcatctctatcataaaagatacaaatattaactgtttgatccgtaataacattgctagtcgatagcaatttgttaataagatgcgctgggctcaatgtcttaataagaagtgtaagaggactatctccgaatttgttttgtttattaacatccgttgatggaagtaaaagatctataatgtctacattcttgactgttttagagcatacaatatggagaggtgtatttccatcatgatctggttttgagggactaattcctagtttcatcatccatgagattgtagaagcttttggattgtctgacataagatgtctatgaatatgatttttgccaaatttatccactatcctggcttcgaatccgatggacattatttttttaaacactctttctgaaggatctgtacacgccaacaacggaccacatccttcttcatcaaccgagttgttaatcttggctccatactgtaccaataaatttattctctctatgacttcatcatctgttcccgagagataatatagaggcgttttatgctgtttatcacacgcgtttggatctgcgccgtgcgtcagcagcatcgcgactattctattattattaattttagaagctatatgcaatggataatttccatcatcatccgtctcatttggagagtatcctctatgaagaagttcttcgacaaatcgttcatctagtcctttaattccacaatacgcatgtagaatgtgataattatttccagaaggttcgatagcttgtagcatattcctaaatacatctaaatttttactattatatttggcataaagagatagataatactcggccgacataatgttgtccattgtagtataaaaattaatatttctatttctgtatatttgcaacaatttactctctataacaaatatcataacttagttcttttatgtcaagaaggcactggtttagttcatctataaatgtcacgccataactaccacgcatgccatactcagaattatgataaagatatttatccttggggtgtaggtaatggggattaatctttgttggatcagtctctaagttaacacatgtcacacatgatccatttatagttatatcacacgatgatgatttatgaattgattccggaagatcgctatcgtattttgtggttccacaattcatttccatacatgttattgtcacactaatattatgatgaactttatctagccgctgagtggtaaacaacagaacagatagtttattatctttaccaacaccctcagccgctgccacaaatctctgatccgtatccatgatggtcatgtttatttctagtccgtatccagtcaacactatgttagcatttctgtcgatatagctttcactcatatgacactcaccaataatagtagaattaatgtcgtaatttacaccaatagtgagttcggcggcaaagtaccaataccggtaatcttgtcgaggaggacatatagtattcttgtattctaccgaatacccgagagatgcgatacaaaagagcaagactaatttgtaaaccatcttactcaaaatatgtaacaatagtacgatgcaatgagtaagacaataggaaatctatcttatatacacataattattctatcaattttaccaattagttagtgtaatgttaacaaaaatgtgggagaatctaattagtttttctttacacaattgacgtacatgagtctgagttccttgtttttgctaattatttcatccaatttattattcttgacgatatcgagatcttttgtataggagtcaaacttgtattcaacatgcttttctataatcattttagctatttcggcatcatccaatagtacattttccagattagcagaatagatattaatgtcgtatttgaacagagcctgtaacatctcaatgtctttattatctatagccaatttaatgtccggaatgaagagaagggaattattggtgtttgtcgacgtcatatagtcgagcaagagaatcatcatatccacgtgtccattttttatagtgatgtgaatacaactaaggagaatagccagatcaaaagtagatggtatctctgaaagaaagtaggaaacaatacttacatcattaagcatgacggcatgataaaatgaagttttccatccagttttcccatagaacatcagtctccaatttttcttaacaaacagttttaccgtttgcatgttaccactatcaaccgcataatacaatgcggtgtttcccttgtcatcaaattgtgaatcatccagtccactgaatagcaaaatctttactattttggtatcttccaatgtggctgcctgatgtaatggaaattcattctctagaagatttttcaatgctccagcgttcaacaacgtacatactagacgcacgttattatcagctattgcataatacaaggcactatgtccatggacatccgccttaaatgtatctttactagagagaaagcttttcagctgcttagacttccaagtattaattcgtgacagatccatgtctgaaacgagacgctaattagtgtatattttttcattttttataattttgtcatattgcaccagaattaataatatctttaatagatctgattagtagatacatggctatcgcaaaacaacatatacacatttaataaaaataatatttattaagaaaattcagatttcacgtacccatcaatataaataaaataatgattccttacaccgtacccatattaaggagattccaccttacccataaacaatataaatccagtaatatcatgtctgatgatgaacacaaatggtgtattaaattccagtttttcaggagatgatctcgccgtagctaccataatagtagatgcctctgctacagttccttgttcgtcgacatctatctttgcattctgaaacattttataaatatataatgggtccctagtcatatgtttaaacgacgcattatctggattaaacatactaggagccatcatttcggctatcgacttaatatccctcttattttcgatagaaaatttagggagtttaagattgtacactttattccctaattgagacgaccaatagtctaattttgcagccgtgatagaatctgtgaaatgggtcatattatcacctattgccaggtacatactaatattagcatccttatacggaaggcgtaccatgtcatattctttgtcatcgattgtgattgtatttccttgcaatttagtaactacgttcatcatgggaaccgttttcgtaccgtacttattagtaaaactagcattgcgtgttttagtgatatcaaacggatattgccatatacctttaaaatatatagtattaatgattgcccatagagtattattgtcgagcatattagaatctactacattagacataccggatctacgttctactatagaattaattttattaaccgcatctcgtctaaagtttaatctatataggccgaatctatgatattgttgataatacgacggtttaatgcacacagtattatctacgaaactttgataagttagatcagtgtacgtatatttagatgttttcagcttagctaatcctgatattaattctgtaaatgctggacccagatctctttttctcaaatccatagtcttcaataattctattctagtattacctgatgcaggcaatagcgacataaacatagaaaacgaataaccaaacggtgagaagacaatattatcatcttgaatatttttatacgctactataccggcattggtaaatccttgtagacgataggcggacgctgaacacgctaacgatagtatcaataacgcaatcatgattttatggtattaataattaaccttatttttatgttcggtataaaaaaattattgatgtctacacatccttttgtaattgacatctatatatccttttgtataatcaactctaatcactttaacttttacagttttccctaccagtttatccctatattcaacatatctatccatatgcatcttaacactctctgccaagatagcttcagagtgaggatagtcaaaaagataaatatatagagcataatcattctcgtatactctgccctttattacatcacccgcattgggcaacgaataacaaaatgcaagcatcttgttaacgggctcgtaaattgggataaaaattatgtttttattgtcttatatctattttattcaagagaatattcaggaatttctttttccggttgtatctcgtcgcagtatatatcatttgtacattgtttcatattttttaatagtttacaccttttagtaggactagtatcgtacaattcatagctgtattttgaattccaatcacgcataaaaatatcttccaattgttgacgaagacctaatccatcatccggtgtaatattaatagatgctccacatgtatccgtaaagtaatttcctgtccaatttgaggtacctatataggccgttttatcggttaccatatatttggcatggtttaccctagaatacggaatgggaggatcagcatctggtacaataaatagctttacttctatatttatgtttttagattttagcatagcgatagatcttaaaaagtttctcatgataaacgaagatcgttgccagcaactaatcaatagcttaacggatacttgtctgtctatagcggatcttcttaattcatcttctatataaggccaaaacaaaattttacccgccttcgaataaataatagggataaagttcataacagatacataaacgaatttactcgcatttctaatacatgacaataaagcggttaaatcattggttctttccatagtacatagttgttgcggtgcagaagcaataaatacagagtgtggaacgccgcttacgttaatactaagaggatgatctgtattataatacgacggataaaagtttttccaattatatggtagattgttaactccaagataccagtatacctcaaaaatttgagtgagatccgctgccaagttcctattattgaagatcgcaatacccaattccttgacctgagttagtgatctccaatccatgttagcgcttcctaaataaatatgtgtattatcagatatccaaaattttgtatgaagaactcctcctaggatatttgtaatatctatgtatcgtacttcaactccggccatttgtagtctttcaacatcctttaatggtttgttagatttattaacggctactctaactcgtactcctcttttgggtaattgtacaatctcgtttaatattatcgtgccgaaattcgtacccacttcatccgataaactccaataaaaagatgatatatctagtgtttttgtggtattggatagaatttccctccacatgttaaatgtagacaaatatactttatcaaattgcatacctataggaatagtttctgtaatcactgcgattgtattatccggattcattttatttgttaaaagaataatcctatatcacttcactctattaaaaatccaagtttctatttctttcatgactgattttttaacttcatccgtttccttatgaagatgatgtttggcaccttcataaatttttatttctctattacaatttgcatgttgcatgaaataatatgcacctaaaacatcgctaatcttattgtttgttccctggagtatgagagtcgggggggtgttaatcttggaaattatttttctaaccttgttggtagccttcaagacctgactagcaaatccagccttaattttttcatgattgactaatgggtcgtattggtatttataaactttatccatatctctagatactgattctggacatagctttccgactggcgcatttggtgtgatggttcccataagtttggcagctagcagattcagtcttgaaacagcatctgcattaactagaggagacattagaatcattgctgtaaacaagtttggattatcgtaagaggctagctcccatggaatgacccaataagtagatttaatagttaccacgtgctgtaccaaagtcatcaatcatcattttttcaccattacttcttccatgtccaatatgatcatgtgagaatactaaaattcctaacgatgatatgttttcagctagttcgtcataacgtccagaatgtttaccagctccatgacttatgaatactaatgccttaggatatgtaataggtttccaatatttacaatatatgtaatcattgtccagattgaacatacagtttgcactcatgattcacgttatataactatcaatattaacagttcgtttgatgatcatattatttttatgttttattgataattgtaaaaacatacaattaaatcaatatagaggaaggagacggctactgtcttttgtaagatagtcatggcgactaaattagattatgaggatgctgttttttactttgtggatgatgataaaatatgtagtcgcgactccatcatcgatctaatagatgaatatattacgtggagaaatcatgttatagtgtttaacaaagatattaccagttgtggaagactgtacaaggaattgatgaagttcgatgatgtcgctatacggtactatggtattgataaaattaatgagattgtcgaagctatgagcgaaggagaccactacatcaattttacaaaagtccatgatcaggaaagtttattcgctaccataggaatatgtgctaaaatcactgaacattggggatacaaaaagatttcagaatctagattccaatcattgggaaacattacagatttgatgaccgacgataatataaacatcttgatactttttctagaaaaaaaattgaattgatgatataggggtcttcataacgcataattattacgttagcattctatatccgtgttaaaaaaaattatcctatcatgtatttgagagttttatatgtagcaaacatgatagctgtgatgccaataagctttagatattcacgcgtgctagtgttagggatggtattatctggtggtgaaatgtccgttatataatctacaaaacaatcatcgcatatagtatgcgatagtagagtaaacatttttatagtttttactggattcatacatcgtctacccaattcggttataaatgaaattgtcgccaatcttacacccaaccccttgttatccattagcatagtattaacttcgttatttatgtcataaactgtaaatgattttgtagatgccatatcatacatgatattcatgtccctattataatcattactaactttatcacaatatatgttgataatatctatatatgatctagtctttgtgggcaactgtctatacaagtcgtctaaacgttgtttactcatatagtatcgaacagccatcattacatggtcccgttccgttgatagataatcgagtatgttagtggacttgtcaaatctatataccatattttctggaagtggatatacatagtcgtgatcaacattattgctagcctcatcttctatatcctgtactataccattatctatatcatctacataatctatgatattattacacataaacatcgacaacatactattgtttattatctaagtcctgttgatccaaacccttgatctcctctatttgtactatctagagattgtacttcttccagttctggataatatatacgttgatagattagctgagctattctatctccagtatttacattaaacgtacattttccattattaataagaatgactcctatgtttcccctataatcttcgtctattacaccacctcctatatcaatgccttttagtgacagaccagacctaggagctattctaccatagcagaacttaggcatggacatactaatatctgtcttaattaactgtctttctcctggagggatagtataatcgtaagcgctatacaaatcatatccggcagcacccggcgattgcctagtaggagatttagctctgttagtttccttaacaaatctaactggtgagttaatattcatgttgaacataaaactaatattttatttcaaaattatttaccatcccatatattccatgaataagtgtgatgattgtacacttctatagtatctatatacgatccacgataaaatcctcctatcaatagcagtttattatccactatgatcaattctggattatccctcggataaataggatcatctatcagagtccatgtattgctggattcacaataaaattccgcatttctaccaaccaagaataaccttctaccgaacactaacgcgcatgatttataatgaggataataagtggatggtccaaactgccactgatcatgattgggtagcaaatattctgtagttgtatcagtttcagaatgtcctcccattacgtatataacattgtttatggatgccactgctggattacatctaggtttcagaagactcggcatattaacccaagcagcatccccgtggaaccaacgctcaacagatgtgggatttggtagacctcctactacgtataatttattgttagcgggtatcccgctagcatacagtctggggctattcatcggaggaattggaatccaattgtttgatatataatttaccgctatagcattgttatgtatttcattgttcatccatccaccgatgagatatactacttctccaacatgagtacttgtacacatatggaatatatctataatttgatccatgttcataggatactctatgaatggatacttgtatgatttgcgtggttgtttatcacaatgaaatattttggtacagtctagtatccattttacattatttatacctctgggagaaagataatttgacctgattacatttttgataaggagtagcagatttcctaatttatttcttcgctttatataccacttaatgacaaaatcaactacataatcctcatctggaacatttagttcatcgctttctagaataagtttcatagatagataatcaaaattgtctatgatgtcatcttccagttccaaaaagtgtttggcaataaagtttttagtatgacataagagattggatagtccgtattctatacccatcatgtaacactcgacacaatattcctttctaaaatctcgtaagataaagtttatacaagtgtagatgataaattctacagaggttaatatagaagcacgtaataaattgacgacgttatgactatctatatatacctttccagtatacgagtaaataactatagaagttaaactgtgaatgtcaaggtctagacaaaccctcgtaactggatctttatttttcgtgtatttttgacgtaaatgtgtgcgaaagtaaggagataactttttcaatatcgtagaattgactattatattgcctcctatggcatcaataattgttttgaatttcttagtcatagacaatgctaatatattcttacagtacacagtattgacaaatatcggcatttatgtttctttaaaagtcaacatctagagaaaaatgattatctttttgagacataactcccattttttggtattcacccacacgtttttcgaaaaaattagtttttccttccaatgatatattttccatgaaatcaaacggattggtaacattataaatttttttaaatcccaattcagaaatcaatctatccgcgacgaattctatatatgttttcatcatttcacaattcattcctataagtttaactggaagagccgcagtaagaaattcttgttcaatggatactgcatctgttataatagatctaacggtttcttcactcggtggatgcaataaatgtttaaacatcaaacatgcgaaatcgcagtgcagaccctcgtctctactaattagttcgttggaaaacgtgagtccgggcattaggccacgctttttaagccaaaatatggaagcgaatgatccggaaaagaagattccttctactgcagcaaaggcaataagtctctctccataaccggcgctgtcatgtatccacttttgagcccaatcggccttcttttttacacaaggcatcgtttctatggcattaaagagatagtttttttcattactatctttaacataagtatcgatcaaaagactatacatttccgaatgaatgttttcaatggccatctgaaatccgtagaaacatctagcctcggtaatctgtacttctgtacaaaatcgttccgccaaattttcattcactattccgtcactggctgcaaaaaacgccaatacatgttttataaaatatttttcgtctggtgttagtttattccaatcattgatatctttagatatatctacttcttccactgtccaaaatgatgcctctgcctttttatacatgttccagatgtcatgatattggattgggaaaataacaaatctatttggatttggtgcaaggatgggttccataactaaattaacaataacaataaattttttttcagttatctatatgcctgtacttggattttttgtacatcgatatcgccgcaatcactacaataattacaagtattattgatagcattgttattagtactatcataattaaattatctacattcatgggtgctgaataatcgttattatcatcattatcattttgtaattgtgacatcatactagataaatcgtttgcgagattgttgtgggaagcgggcatggaggatgcattatcattattatttaacgccttccatttggattcacaaatgttacgcacattcaacattttatggaaactataattttgtgaaaacaaataacaagaaaactcgtcatcgttcaaatttttaacgatagtaaaccgattaaacgtcgagctaatttctaacgctagcgactctgttggatatgggtttccagatatatatcttttcagttcccctacgtatctataatcatctgtaggaaatggaagatatttccatttatctactgttcctaatatcatatgtggtggtgtagtagaaccattaagcgcgaaagatgttatttcgcatcgtattttaacttcgcaataatttctggttagataacgcactctaccagtcaagtcaatgatattagcctttacagatatattcatagtagtcgtaacgatgactccatcttttagatgcgatactcctttgtatgtaccagaatcttcgtacctcaaactcgatatatttaaacaagttaatgagatattaacgcgttttatgaatgatgatatataaccagaagttttatcctcggtggctagcgctataaccttatcattataataccaactagtgtgattaatatgtgacacgtcagtgtgggtacaaatatgtacattatcgtctacgtcgtattcgatacatccgcatacagccaacaaatataaaatgacaaatactctaacgccgttcgtacccatcttgatgcggtttaataaatgttttgatttcaatttattgtaaaaaaagattcggttttatactgttcgatattctcattgcttatattttcatctatcatctccacacagtcaaatccgtggttagcatgcacctcatcaaccggtaaaagactatcggactcttctatcattataactctagaatatttaatttggtcattattaatcaagtcaattatcttatttttaacaaacgtgagtattttactcattttttataaaaacttttagaaatatacagactctatcgtgtgtctatatcttctttttatatccaatgtatttatgtctgatttttcttcatttatcatatataatggtccaaattctacacgtgcttcggattcatccagatcattaaggttcttataattgtaacatccttctcttccctcttctacatcttccttcttattcttattcttagcgtcacagaatctaccacagcaggatcccatgacgagcgtcatattaaactaatccattttcaattataatatatgattagtaatgaccattaaaataaaaaatattcttcataaccggcaagaaagtgaaaagttcacattgaaactatgtcagtagtatacatcatgaaatgatgatatatatatactctattttggtggaggattatatgatataattcgtggataatcatttttaagacacatttctttattcgtaaatcttttcacgttaaatgagtgtccatattttgcaatttcttcatatgatggcggtgtacgtggacgaggctgctcctgttcttgttgtggtcgccgactgtcgtgtctgcgtttagatccctccattatcgcgattgcgtagatggagtactattttataccttgtaattaaatttttttattaattaaacgtataaaaacgttccgtatctgtatttaagagccagatttcgtctaatagaacaaatagctacagtaaaaataactagaataattgctacacccactagaaaccacggatcgtaatacggcaatcggttttcgataataggtggaacgtatattttatttaaggacttaacaattgtctgtaaaccacaatttgcttccgcggatcctgtattaactatctgtaaaagcatatgttgaccgggcggagccgaacattctccgatatctaatttctgtatatctataatattattaacctccgcatacgcattacagttcttttctagcttggataccgcactaggtacatcgtctagatctattcctatttcctcagcgatagctcttctatccttttccggaagcaatgaaatcacttcaataaatgattcaaccatgagtgtgaaactaagtcgagaattactcatgcatttgttagttattcggagcgcgcaatttttaaactgtcctataacctctcctatatgaatagcacaagtgacattagtagggatagaatgttgagctaatttttgtaaataactatctataaaaagattatacaaagttttaaactctttagtttccgccatttatccagtctgagaaaatgtctctcataataaatttttccaagaaactaattgggtgaagaatggaaacctttaatctatatttatcacagtctgttttggtacacatgatgaattcttccaatgccgtactaaattcgatatctttttcgatttctggatatgtttttaataaagtatgaacaaagaaatggaaatcgtaataccagttatgtttaactttgaaattgttttttattttcttgttaatgattccagccacttgggaaaagtcaaagtcgtttaatgccgatttaatacgttcattaaaaacaaactttttatcctttagatgaattattattggttcattggaatcaaaaagtaagatattatcgggtttaagatctgcgtgtaaaaagttgtcgcaacagggtagttcgtagattttaatgtataacagagccatctgtaaaaagataaactttatgtattgtaccaaagatttaaatcctaatttgatagctaactcggtatctactttatctgccgaatacagtgctaggggaaaaattataatgtttcctctttcatattcgtagttagttctcttttcatgttcgaaaaagtgaaacatgcggttaaaatagtttataacattaatattactgttaataactgccggataaaagtgggatagtaatttcacgaatttgatactgtcctttctctcgttaaacgcctttaaaaaaactttagaagaatatctcaatgagagttcctgaccatccatagtttgtatcaataatagcaacatatgaagaacacgtttatacagagtatgtaaaaatgttaatttatagtttaatcccatggcccacgcacacacgattaattttttttcatctccctttagattgttgtatagaaatttgggtactgtgaactccgccgtagtttccatgggactatataattttgtggcctcgaatacaaattttactacatagttatctatcttaaagactataccatatcctcctgtagatatgtgataaaaatcgtcgtttataggataaaatcgtttatccttttgttggaaaaaggatgaattaatgtaatcattctcttctatctttagtagtgtttccttattaaaattcttaaaataatttaacaatctaactgacggagcccaattttggtgtaaatctaattgggacattatattgttaaaatacaaacagtctcctaatataacagtatctgataatctatggggagacatccattgatattcaggggatgaatcattggcaacacccatttattgtacaaaaagccccaatttacaaacgaaagtccaggtttgatagagacaaacaattaactattttgtctctgtttttaacacctccacagtttttaatttctttagtaatgaaattattcacaatatcagtatcttctttatctaccagagattttactaacttgataaccttggctgtctcattcaatagggtagtaatatttgtatgtgtgatattgatatctttttgaattgtttcttttagaagtgattctttgatggtgccagcatacgaattacaataatgcagaaactcggttaacatgcaggaattatagtaagccaattccaattgttgcctgtgttgtattagagtgtcaatatgagcaatggtgtccttgcgtttctctgatagaatgcgagcagcgattttggcgttatcatttgacgatatttctggaatgacgaatcctgtttctactaactttttggtaggacaaagtgaaacaatcaagaagatagcttctcctcctatttgtggaagaaattgaactcctctagatgatctactgacgatagtatctccttgacagatattggaccgaattacagaagtacctggaatgtaaagccctgaaaccccctcattttttaagcagattgttgccgtaaatcctgcactgtgaccaagatagagagctcctttggtgaatccatctctatgtttcagtttaaccaagaaacagtcagctggtctaaaatttccatctctatctaatacagcatctaacttgatgtcaggaactatgaccggtttaatgttatatgtaacattgagtaaatccttaagttcataatcatcactgtcatcagttatgtacgatccaaacaatgtttctaccggcatagtggatacgaagatgctatccatcagaatgtttccctgattagtattttctatatagctattcttctttaaacgattttccaaatcagtaactatgttcatttttttaggagtaggacgcctagccagtatggaagaggattttctagatcctctcttcaacatctttgatctcgatggaatgcaaaaccccatagtgaaacaaccaacgataaaaataatattgtttttcactttttataattttaccatctgactcatggattcattaatatctttataagagctactaacgtataattctttataactgaactgagatatatacaccggatctatggtttccataattgagtaaatgaatgctcggcaataactaatggcaaatgtatagaacaacgaaattatactagagttgttaaagttaatattttctatgagctgttccaataaattatttgttgtaactgcgttcaagtcataaatcatcttgatactatccagtaaaccgtttttaagttctggaatattatcatcccattgtaaagcccctaattcgactatcgaatatcctgctctgatagcagtttcaatatcgacggacgtcaatactgtaataaaggtggtagtattgtcatcatcgtgataaactactggaatatggtcgttagtaggtacagtaactttacacaacgcgatatataactttccttttgtaccatttttaacgtagttgggacgtcctgcagggtattgttttgaagaaatgatatcgagaacagatttgatacgatatttgttggattcctgattattcactataatataatctagacagatagatgattcgataaatagagaaggtatatcgttggtaggataatacatccccattccagtattctcggatactctattgatgacactagttaagaacatgtcttctattctagaaaacgaaaacatcctacatggactcattaaaacttctaacgctcctgattgtgtctcgaatgcctcgtacaaggatttcaaggatgccatagattctttgaccaacgatttagaattgcgtttagcatctgatttttttattaaatcgaatggtcggctctctggtttgctaccccaatgataacaatagtcttgtaaagataaaccgcaagaaaatttatacgcatccatccaaataaccctagcaccatcggatgatattaatgtattattatagattttccatccacaattattgggccagtatactgttagcaacggtatatcgaatagattactcatgtaacctactagaatgatagttcgtgtactagtcataatatctttaatccaatctaaaaaatttaaaattagattttttacactgttaaagttaacaaaagtattacccgggtacgtggatatcatatatggcattggtccattatcagtaatagctccataaactgatacggcgatggtttttatatgtgtttgatctaacgaggaagaaattcgcgcccacaattcatctctagatatgtatttaatatcaaacggtaacacatcaatttcgggacgcgtatatgtttctaaatttttaatccaaatataatgatgacctatatgccctattatcatactgtcaactatagtacacctagggaacttacgatacatctgtttcctataatcgttaaattttacaaatctataacatgctaaaccttttgacgacagccattcattaatttctgatatggaatctgtattctcgataccgtatcgttctaaagccagtgctatatctccctgttcgtgggaacgctttcgtataatatcgatcaacggataatctgaagtttttggagaataatatgactcatgatctatttcgtccataaacaatctagacataggaattggaggcgatgatcttaattttgtgcaatgagtcgtcaatcctataacttctaatcttgtaatattcatcatcgacataatactatctatgttatcatcgtatattagtataccatgaccttcttcatttcgtgccaaaatgatatacagtcttaaatagttacgcaatatctcaatagtttcataattgttagctgttttcatcaaggtttgtatcctgtttaacatgatggcgttctataacgtctctattttctatttttaattttttaaatttttaacgatttactgtggctagatacccaatctctctcaaatatttttttagcctcgcttacaagctgtttatctatactattaaaactgacgaatccgtgattttggtaatgggttccgtcgaaatttgccgaagtgatatgaacatattcgtcgtcgactatcaacaattttgtattattctgaatagtgaaaaccttcacagatagatcattttgaacacacaacgcatctagacttttggcggttgccatagaatatacgtcgttcttatcccaattaccaactagaagtctgatcttaactcctctattaatggctgcttctataatggagttgtaaatgtcgggccaatagtagctattaccgtcgacacgtgtagtgggaactatggccaaatgttcaatatctatactagtcttagctgacctgagtttatcaataactacatcggtatctagatctctagaatatcccaataggtgttccggagaatcagtaaagaacactccacctataggattcttaatatgatacgcagtgctaactggcaaacaacaagccgcagagcataaattcaaccatgaattttttgcgctattaaaggctttaaaagtatcaaatcttctacgaagatctgtggccagcgggggataatcagaatatacacctaacgttttaatcgtatgtatagatcctccagtaaatgacgcgtttcctacataacatctttcatcatctgacacccaaaaacaaccgagtagtagtcccacattattttttttatctatattaacggttataaaatttatatccgggcagtgactttgtagctctcccagatttcttttccctcgttcatctagcaaaactattattttaatccctttttcagatgcctcttttagtttatcaaaaataagcgctcccctagtcgtactcagaggattacaacaaaaagatgctatgtatatatatttcttagctagagtgataatttcgttaaaacattcaaatgttgttaaatgatcggatctaaaatccatattttctggtagtgtttctaccagcctacattttgctcccgcaggtaccgatgcaaatggccacatttagttaacataaaaacttatacatcctgttctatcaacgattctagaatatcatcggctatatcgctaaaattttcatcaaagtcgacatcacaacctaactcagtcaatatattaagaagttccatgatgtcatcttcgtctatttctatatccgtatccattgtagattgttgaccgattatcgagtttaaatcattactaatactcaatccttcagaatacaatctgtgtttcattgtaaatttataggcggtgtatttaagttggtagattttcaattatgtattaatatagcaacagtagttcttgctcctccttgattctagcatcctcttcattattttcttctacgtacataaacatgtccaatacgttagacaacacaccgacgatggcggccgctacagacacgaatatgactaaaccgatgaccatttaaaaacccctctctagctttcacttaaactgtatcgatcattcttttagcacatgtataatataaaaacattattctatttcgaatttaggcttccaaaaatttttcatccgtaaaccgataataatatatatagacttgttaatagtcggaataaatagattaatgcttaaactatcatcatctccacgattagagatacaatatttacattctttttgctgtttcgaaactttatcaatacacgttaatacaaacccaggaaggagatattgaaactgaggctgttgaaaatgaaacggtgaatacaataattcagataatgtaaaatcatgattccgtattctgatgatattagaactgctaatggatgtcgatggtatgtatctaggagtatctattttaacaaagcatcgatttgctaatatacaattatccttttgattaattgttattttattcatattcttaaaaggtttcatatttatcaattcttctacattaaaaatttccatttttaatttatgtagccccgcaatactcctcattacgtttcattttttgtctataatatccattttgttcatctcggtacatagattatccaattgagaagcgcatttagtagttttgtacattttaagtttattgacgaatcgtcgaaaactagttatagttaacattttattatttgataccctgatattaatacccctgccgttactattatttataactgatgtaatccacgtaacattagaattaattatcgatagtaatgcatcgacgcttccaaaattgtctattataaactcaccgataatttttttattacatgttttcatattcattaggattatcaaatctttaatcttattacgattgtatgcgttgatattgcaagacgtcattctaaaagacggaggatctccatcaaatgccaaacaatcacgtacaaagtacatggaaataggttttgttctattgcgcatcatagatttatatagaacacccgtagaaatactaatttgttttactctataaaatactaatgcatctatttcatcgttttgtataacgtctttccaagtgtcaaattccaaatttttttcattgatagtaccaaattcttctatctctttaactacttgcatagataggtaattacagtgatgcctacatgccgttttttgaaactgaatagatgcgtctagaagcgatgctacgctagtcacaatcaccactttcatatttagaatatatgtatgtaaaaatatagtagaatttcattttgttttttctatgctataaatgaattctcattttgcatctgctcatactccgttttatatcaataccaaagaaggaagatatctggttctaaaagccgttaaagtatgcgatgttagaactgtagaatgcgaaggaagtaaagcttcctgcgtactcaaagtagataaaccctcatcgcccgcgtgtgagagaagaccttcgtccccgtccagatgcgagagaatgaataaccctggaaaacaagttccgtttatgagaacggacatgctacaaaatatgttcgcggctaatcgcgacaacgtggcgtcgagacttttgtcctaaaatacaattatatctttttcgatattaataaatccgtgtcgtccaggttttttatctctttcagtatgtgaatagataggtattttatctctattcatcatcgaatttaagagatccgataaacattgtttgtattctccagatgtcagcatctgatacaacaatatatgtgcacataaacctctggcacttatttcatgtaccttccccttatcactaaggagaatagtatttgagaaatatgtatacatgatattatcatgaattagatatacagaatttgtaacactctcgaaatcacacgatgtgtcggcgttaagatctaatatatcactcgataacacattttcatctagatacactagacattttttaaagctaaaatagtctttagtagtaacagtaactatgcgattattttcatcgatgatacatttcatcggcatattattacgcgtaccatcaaagactataccatgtgtatatctaacgtattctagcatggttgccatacgcgcattaaacttttcaggatctttggatagatcttccaatctatctatttgagaaaacatttttatcatgttcaatagttgaaacgtcggatccactatatagatattatctataaagattttaggaactacgttcatggtatcctggcgaatattaaaactatcaatgatatgattatcgttttcatcttttatcaccatatagtttctaagatatgggattttacttaatataatattatttcccgtgataaattttattagaaaggccaaatctataagaaaagtcctagaattagtctgaagaatatctatatcgccgtatagtatatttggattaattagatatagagaatatgatccgtaacatatacaacttttattatggcgtctaagatattcttccatcaacttattaacatttttgactagggaagatacattatgacgtcccattacttttgccttgtctattactgcgacgttcatagaatttagcatatctcttgccaattcttccattgatgttacattataagaaattttagatgaaattacatttggagctttaatagtaagaactcctaatatgtccgtgtatgtggtcactaatacagattgtagttctataatcgtaaataatttacctatattatatgtttgagtctgtttagaaaagtagctaagtatacgatcttttatttctgatgcagatgtattaacatcggaaaaaaatctttttttattcttttttactaaagatacaaatatgtctttgttaaaaacagttattttctgaatatttctagcttgtaattttaacatatgatattcgttcacactaggtactctgcctaaataggtttctataatctttaatgtaatattaggaaaagtattctgatcaggattcctattcattttgaggatttaaaactctgattattgtctaatatggtctctacgcaaactttttcacagagcgatagagtttttgataactcgtttttcttaagaaatataaaactactgtttccagagctcgctctatcttttattttatctaattcgatacaaactcctgatactggttcagaaagtaattcattaattttcagtcctttatagaagatatttaatatagataatacaaaattttcagttcttgatatcgatctgattgatcctagaactagatatattaataacgtgctcattaggcagtttatggcagcttgataattagatatagtatattccagttcatatttattagataccgcattgcccagattttgatattctatgaattcctctgaaaataaatccaaaataactagacattctattttttgtggattagtgtactctcttccctctatcatgttcactactggtgtccacgatgataaatatctagagggaatataatatagtccataggatgccaatctagcaatgtcgaataactgtaatttgattcttcgttcttcattatgaattgattcttgaggtataaacctaacacaaattatattattagacttttcgtatgtaatgtctttcatgttataagtttttaatcctggaatagaatctattttaatgaggcttttaaacgcagagttctccaacgagtcaaagcataatactctgttgtttttcttatatacgatgttacgattttcttctttgaatggaataggtttttgaattagtttataattacaacataatagataaggaagtgtgcaaatagtacgcggaaaaaacataatagctcccctgttttcatccatggttttaagtaaatgatcactggcttctttagtcaatggatattcgaacattaaccgtttcatcatcattggacagaatccatatttcttaatgtaaagagtgatcaaatcattgtgtttattgtaccatcttgttgtaaatgtgtattcggttatcggatctgctcctttttctattaaagtatcgatgtcaatctcgtctaagaattcaactatatcgacatatttcatttgtatacacataaccattactaacgtagaatgtataggaagagatgtaacgggaacagggtttgttgattcgcaaactattctaatacataattcttctgttaatacgtcttgcacgtaatctattatagatgccaagatatctatataattattttgtaagatgatgttaactatgtgatctatataagtagtgtaataattcatgtattttgatatatgttccaactctgtctttgtgatgtctagtttcgtaatatctatagcatcctcaaaaaatatattcgcatatattcccaagtcttcagttctatcttctaaaaaatcttcaacgtatggaatataataatctattttacctcttctgatatcattaatgatatagtttttgacactatcttctgtcaattgattcttattcactatatctaagaaacggatagcgtccctaggacgaactactgccattaatatctctattatagcttctggacataattcatctattataccagaattaatgggaactattccgtatctatctaacatagttttaagaaagtcagaatctaagacttgatgttcatatattggttcatacatgaaatgatctctattgatgatagtgactatttcattctctgaaaattggtaactcattctatatatgctttccttgttgatgaaggatagaatatactcaatagaatttgtaccaacaaactgttctcttatgaatcgtatatcatcatctgaaataatcatgtaaggcatacatttaacaattagagacttgtctcctgttatcaatatactattcttgtgataatttatgtgtgaggcaaatttgtccacgttctttaattttgttatagtagatatcaaatccaatggagctacagttcttggcttaaacagatatagtttttctggaacaaattctacaacattattataaaggactttgggtaaataagtgggatgaaatcctattttaattaatgcgatagccttgtcctcgtgcagatatccaaacgcttttgtgatagtatggcattcattgtctagaaacgctctacgaatatctgtgacagatatcatctttagagaatatactagtcgcgttaatagtactacaatttgtattttttaatctatctcaataaaaaaattaatatgtatgattcaatgtataactaaactactaactgttattgataactagaatcagaatctaatgatgacgtacccaagaagtttatctactgccaatttagctgcattatttttagcatctcgtttagattttccatctgccttatcgaatactcttccgtcgatatctacacaggcataaaatgtaggagagttactaggcccaactgattcaatacgaaaagaccaatctctcttagttatttggcagtactcattaataacggtgacagggttagcatctttccaatcaataatttttttagccggaataacatcatcaaaagacttatgatcctctctcattgatttttcgcgggatacatcatctattatgacgtcagccataacatcagcatccggcttatccgcctccgttgtcataaaccaacgaggaggaatatcgtcggagctgtacaccatagcactacgttgaagatcgtacagagctttattaacttctcgcttctccatattaagttgtctagttagttgtgcagcagtagctccttcgattccaatggttttaatagcctcacacacaatctctgcgttagaacgttcgtcgatatagattttagacatttttagagagaactaacacaaccagcaataaaactgaacctactttatcatttttttattcatcatcctctggtggttcgtcgttcctatcaaatgtagctctgattaacccgtcatctataggtgatgctggttctggagattctggaggagatggattattatctggaagaatctctgttatttccttgttttcatgtatcgattgcgttgtaacattaagattgcgaaatgctctaaatttgggaggcttaaagtgttgtttgcaatctctacacgcgtgtctaactagtggaggttcgtcagctgctctagtttgaatcatcatcggcgtagtattcctacttttacagttaggacacggtgtattgtatttctcgtcgagaacgttaaaataatcgttgtaactcacatcctttattttatctatattgtattctactcctttcttaatgcattttataccgaataagagatagcgaaggaattctttttcggtgccgctagtacccttaatcatatcacatagtgttttatattccaaatttgtggcaatagacggtttatttctatacgatagtttgtttctggaatcctttgagtattctataccaatattattctttgattcgaatttagtttcttcgatattagattttgtattacctatattcttgatgtagtactttgatgatttttccatggcccattctattaagtcttccaagttggcatcatccacatattgtgatagtaattctcggatatcagtagcggctaccgccattgatgtttgttcattggatgagtaactactaatgtatacattttccatttataacacttatgtattaactttgttcatttatattttttcattattatgttgatattaacaaaagtgaatatatatatatgttaataattgtattgtggttatacggctacaattttataatgagtgaaagtcagtgtccgatgatcaatgacgatagctttactctgaaaagaaagtatcaaatcgatagtgcggagtcaacaataaaaatggataagaagaggataaagtttcagaatagagccaaaatggtaaaagaaataaatcagacaataagagcagcacaaactcattacgagacattgaaactaggatacataaaatttaagagaatgattaggactactactctagaagatatagcaccatctattccaaataatcagaaaacttataaactattctcggacatttcagccatcggcaaagcatcacagaatccgagtaagatggtatatgctctgctgctttacatgtttcccaatttgtttggagatgatcatagattcattcgttatagaatgcatccaatgagtaaaatcaaacacaagatcttctctcctttcaaacttaatcttattagaatattagtggaagaaagattctataataatgaatgcagatctaataaatggaaaataattggaacacaagttgataaaatgttgatagctgaatctgataaatatacaatagatgcaaggtataacctaaaacccatgtatagaatcaagggagaatctgaagaagataccctcttcatcaaacagatggtagaacaatgtgtgacatcccaggaattggtggaaaaagtgttgaagatactgtttagagatttgttcaagagtggagaatacaaagcgtacagatacgatgatgatgtagaaaatggattcattggattggatacactaaaattaaacattgttcatgatatagttgaaccatgtatgcctgttcgtaggccagtggctaagatactgtgtaaagaaatggtaaataaatactttgagaatccgctacatattattggtaagaatcttcaagagtgcattgactttgttagtgaataggcatttcatctttctccaatactaattcaaattgttaaattaataatggatagtataaatagtaaaaataattattagaataagagtgtagtatcatagataactctcttctataaaaatggattttattcgtagaaagtatcttatatacacagtagaaaataatatagattttttaaaggatgatacattaagtaaagtaaacaattttaccctcaatcatgtactagctctcaagtatctagttagcaattttcctcaacacgttattactaaggatgtattagctaataccaatttttttgttttcatacatatggtacgatgttgtaaagtgtacgaagcggttttacgacacgcatttgatgcacccacgttgtacgttaaagcattgactaagaattatttatcgtttagtaacgcaatacaatcgtacaaggaaaccgtgcataaactaacacaagatgaaaaatttttagaggttgccgaatacatggacgaattaggagaacttataggcgtaaattatgacttagttcttaatccattatttcacggaggggaacccatcaaagatatggaaatcatttttttaaaactgtttaagaaaacagacttcaaagttgttaaaaaattaagtgttataagattacttatttgggcatacctaagcaagaaagatacaggcatagagtttgcggataatgatagacaagatatatacactctatttcaacaaactggtagaatcgtccatagcaatctaacagaaacgtttagagattatatctttcccggagataagactagctattgggtgtggttaaacgaaagtatagctaatgatgcggatatcgttcttaatagacccgccattaccatgtatgataaaattcttagttatatatactctgagataaaacaaggacgcgttaataaaaacatgcttaagttagtttatatctttgagcctgaaaaagatatcagagaacttctgctagaaatcatatatgatattcctggagatatcctatctattattgatgcaaaaaacgacgattggaaaaaatattttattagtttttataaagctaattttattaacggtaatacatttattagtgatagaacgtttaacgaggacttattcagagttgttgttcaaatagatcccgaatatttcgataatgaacgaattatgtctttattctctacgagtgctgcggacattaaacgatttgatgagttagatattaataacagttatatatctaatataatttatgaggtgaacgatatcacattagatacaatggatgatatgaagaagtgtcaaatctttaacgaggatacgtcgtattatgttaaggaatacaatacatacctgtttttgcacgagtcggatcccatggtcatagagaacggaatactaaagaaactgtcatctataaaatccaagagtagacggctgaacttgtttagcaaaaacattttaaaatattatttagacggacaattggctcgtctaggtcttgtgttagatgattataaaggagacttgttagttaaaatgataaaccatcttaagtctgtggaggatgtatccgcattcgttcgattttctacagataaaaaccctagtattcttccatcgctaatcaaaactattttagctagttataatatttccatcatcgtcttatttcaaaggtttttgagagataatctatatcatgtagaagaattcttggataaaagcatccatctaaccaagacggataagaaatatatacttcaattgataagacacggtagatcatagaacagaccaaatatattattaataatttgtatatacatagatataattatcacatatttttgataaatgggaactgctgcaacaattcagactcccaccaaattaatgaataaagaaaatgcagaaatgattttggaaaaaattgttgatcatatagttatgtatattagtgacgaatcaagtgattcagaaaataatcctgaatatattgattttcgtaacagatacgaagactatagatctctcattataaaaagtgatcacgagtttgtaaagctatgtaaaaatcatgcggagaaaagttctccagaaacgcaacaaatgattatcaaacacatatacgaacaatatcttattccagtatctgaagtactattaaaacctataatgtccatgggtgacataattacatataacggatgtaaagacaatgaatggatgctagaacaactctctaccctaaactttaacaatctccgcacatggaactcatgtagcataggcaatgtaacgcgtctgttttatacattttttagttatctgatgaaagataaactaaatatataagtataatcccattctaatactttaacctgatgtattagcatcttattagaatattaacctaactaaaagacataacataaaaactcattacatagttgataaaaagcggtaggatataaatattatggctgccaccgttccgcgttttgacgacgtgtacaaaaatgcacaaagaagaattctagatcaagaaacattttttagtagaggtctaagtagaccgttaatgaaaaacacatatctatttgataattacgcgtatggatggataccagaaactgcaatttggagtagtagatacgcaaacttagatgcaagtgactattatcccatttcgttgggattacttaaaaagttcgagtttctcatgtctctatataaaggtcctattccagtatacgaagaaaaagtaaatactgaattcattgctaatggatctttctccggtagatacgtatcatatcttagaaagttttctgctcttccaacaaacgagtttattagttttttgttactgacttccattccaatctataatatcttgttctggtttaaaaatactcagtttgatattactaaacacacattattcagatacgtctatacagataatgccaaacacctggcgttggctaggtatatgtatcaaacaggagactataagcctttgtttagtcgtctcaaagagaattatatatttaccggtcccgttccaatatgtatcaaagatatagatcaccctaatcttagtagagcaagaagtccatccgattatgagacattagctaatattagtactatattgtactttaccaagtatgatccggtattaatgtttttattgttttacgtacctgggtattcaattactacaaaaattactccagccgtagaatatctaatggataaactgaatctaacaaagagcgacgtacaactgttgtaaattattttatgcttcgtaaaatgtaggttttgaaccaaacattctttcaaagaatgagatgcataaaactttattatccaatagattgactatttcggacgtcaatcgtttaaagtaaacttcgtaaaatattctttgatcactgccgagtttaaaacttctatcgataattgtttcatatgttttaatatttacaagttttttggtccatggtccattaggacaaatatatgcaaaataatatcgttctccaagttctatagtctctggattatttttattatattcagtaaccaaatacatattagggttatctgcggatttataatttgagtgatgcattcgactcaacataaataattctagaggagacgatctactatcaaattcggatcgtaaatctgtttctaaagaacggagaatatctatacatacctgattagaattcatccgtccttcagacaacatctcagacagtctggtcttgtatgtcttaatcatattcttatgaaacttggaaacatctcttctagtttcactagtacctttattaattctctcaggtacagattttgaattcgacgatgccgagtatttcatcgttgtatatttcttcttcgattgcataatcagattcttatataccgcctcaaactctattttaaaattattaaacaatactctattattaatcagtcgttctaactctttcgctatttctatagacttatctacatcttgactgtctatctctgtaaacacggagtcggtatctccatacacgctacgaaaacgaaatctgtaatctataggcaacgatgttttcacaatcggattaatatctctatcgtccatataaaatggattacttaatggattggcaaaccgtaacataccgttagataactctgctccatttagtaccgattctagatacaagatcattctacgtcctatggatgtgcaactcttagccgaagcgtatgagtatagagcactatttctaaatcccatcagaccatatactgagttggctactatcttgtacgtatattgcatggaatcatagatggccttttcagttgaactggtagcctgttttagcatctttttatatctggctctctctgccaaaaatgttcttaatagtctaggaatggttccttctatcgatctatcgaaaattgctatttcagagatgaggttcggtagtctaggttcacaatgaaccgtaatatatctaggaggtggatatttctgaagcaatagctgattatttatttcttcttccaatctattggtactaacaacgacaccgactaatgtttccggagatagatttccaaagatacacacattaggatacagactgttataatcaaagattaatacattattactaaacattttttgttttggagcaaataccttaccgccttcataaggaaacttttgttttgtttctgatctaactaagatagttttagtttccaacaatagctttaacagtggacccttgatgactgtactcgctctatattcgaataccatggattgaggaagcacatatgttgacgcacccgcgtctgtttttgtttctactccataatactcccacaaatactgacacaaacaagcatcatgaatacagtatctagccatatctaaagctatgtttagattataatccttatacatctgagctaaatcaacgtcatcctttccgaaagataatttatatgtatcattaggtaaagtaggacataatagtacgactttaaatccattttcccaaatatctttacgaattactttacatataatatcctcatcaacagtcacataattacctgtggttaaaacctttgcaaatgcagcggctttgcctttcgcgtctgtagtatcgtcaccgatgaacgtcatttctctaactcctctatttaatactttacccatgcaactgaacgcgttcttggatatagaatccaatttgtacgaatccaatttttcaaatttttgaatgaatgaatatagatcgaaaaatatagttccattattgttattaacgtgaaacgtagtattggccatgccgcctactcccttatgactagactgatttctctcataaatacagagatgtacagcttcctttttgtccggagatctaaagataatcttctctcctgttaataactctagacgattagtaatatatctcagatcaaagttatgtccgttaaaggtaacgacgtagtcgaacgttagttccaacaattgtttagctattcgtaacaaaactatttcagaacataaaactagttctcgttcgtaatccatttccattagtgactgtatcctcaaacatcctctatcgacggcttcttgtatttcctgttccgttaacatctcttcattaatgagcgtaaacaataatcgtttaccacttaaatcgatataacagtaacttgtatgcgagattgggttaataaatacagaaggaaacttcttatcgaagtgacactctatatctagaaataagtacgatcttgggatatcgaatctaggtatttttttagcgaaacagttacgtggatcgtcacaatgataacatccattgttaatctttgtcaaatattgctcgtccaacgagtaacatccgtctggagatatcccgttagaaatataaaaccaactaatattgagaaattcatccatggtggcattttgtatgctgcgtttctttggctcttctatcaaccacatatctgcgacggagcattttctatctttaatatctagattataacttattgtctcgtcaatgtctatagttctcatctttcccaacggcctcgcattaaatggaggaggagacaatgactgatatatttcgtccgtcactacgtaataaaagtaatgaggaaatcgtataaatacggtctcaccatttcgacatctggatttcagatataaaaatctgttttcaccgtgactttcaaaccaattaatgcaccgaacatccatttatagaatttagaaatatattttcatttaaatgaatcccaaacattggggaagagccgtatggaccattatttttatagtactttcgcaagcgggtttagacggcaacatagaagcgtgtaaacgaaaactatatactatagttagcactcttccatgtcctgcatgtagacggcacgcgactatcgctatagaggacaataatgtcatgtctagcgatgatctgaattatatttattattttttcatcagattatttaacaatttggcatctgatcccaaatacgcgatcgatgtgacaaaggttaaccctttataaacttaacccattataaaacttatgattagtcacgactgaaataaccgcgtgattattttttggtataattctacacggcatggtttctgtgactatgaattcaacccccgttacattagtgaaatctttaacaaacagcaagggttcgtcaaagacataaaactcattgtttacgatcgaaatagaccccctatcacacttaaaataaaaaatatccttatcctttaccaccaaataaaattctgattggtcaatgtgaatgtattcacttaacagttccacaaatttatttattaactccgaggcacatacatcgtcggtattttttatggcaaactttactcttccagcatccgtttctaaaaaaatattaacgagttccatttatatcatccaatattattgaaatgacgttgatggacagatgatacaaataagaaggtacggtacctttgtccaccatctcctccaattcatgctctattttgtcattaactttaatgtatgaaaacagtacgccacatgcttccatgacagtgtgtaacactttggatacaaaatgtttgacattagtataattgtccaagactgtcaatctataatagatagtagctataatatattctatgatggtattgaagaagatgacaaccttggcatattgatcatttaacacagacatggtatcaacagatagcttgaatgaaagagaatcagtaattggaataagcgtcttctcgatagagtgtccgtataccaacatgtctgatattttgatgtattccattaaattatttagttttttctttttattttcgttaaacagcatttctgtcaacggaccccaacatcgttgaccgattaagttttgattgatttttccgtgtaatgcgtatctagtcagatcgtatagcctatccaataatccatcgtctgtgtgtagatcacatcgtacactttttaattctctatagaagagcgacagacatctggagcaattacagacagcaatttctttattctctacagatgtaagatacttgaagacattcctatgatgatgcagaattttggataacacggtattgatggtatctgttaccataattcctttgatggctgatagtgtcagagcacaagatttccaatctttgacaatttttagcaccattatctttgttttgatatctatatcagacagcatggtgcgtctgacaacacagggattaagacggaaagatgaaatgattctctcaacatcttcaatagataccttgctattttttctggcattatctatatgtgcgagaatatcctctagagaatcagtatcctttttgatgatagtggatctcaatgacatgggacgtctaaaccttcttattctatcaccagattgcatggtgatttgtcttctttcttttatcataatgtaatctctaaattcatcggcaaattgtctatatctaaaatcataatatgagatgtttacctctacaaatatctgttcgtccaatgttagagtatttacatcagttttgtattccaaattaaacatggcaacggatttaattttatattcctctattaagtcctcgtcgataataacagaatgtagataatcatttaatccatcgtacatggttggaagatgcttgttgacaaaatctttaattgtcttgatgaaggtgggactatatctaacatcttgattaataaaatttataacattgtccataggatactttgtaactagttttatacacatctcttcatcggtaagtttagacagaatatcgtgaacaggtggtatattatattcatcagatatacgaagaacaatgtccaaatctatattgtttaatatattatatagatgtagcgtagctcctacaggaatatctttaactaagtcaatgatttcatcaaccgttagatctattttaaagttaatcatataggcattgatttttaaaaggtatgtagccttgactacattctcattaattaaccattccaagtcactgtgtgtaagaagattatattctatcataagcttgactacatttggtcccgataccattaaagaattcttatgatataaggaaacagcttttaggtactcatctactctacaagaattttggagagccttaacgatatcagtgacgtttattatttcaggaggaaaaaacctaacattgagaatatcggaattaatagcttccagatacagtgattttggcaatagtccgtgtaatccataatccagtaacacgagctggtgcttgctagacaccttttcaatgtttaatttttttgaaataagctttgataaagccttcctcgcaaattccggatacatgaacatgtcggcgacatgattaagtattgttttttcattattttctcaataccccaatagatgatagaatatcacccaatgcgtccatgttgtctatttccaacaggtcgctatatccaccaatagaagtttttccaaaaaagattctaggaacagttctaccaccagtaatttgttcaaaatagtcacgcaattcattttcgggtttaaattctttaatatcgacaatttcatacgctcctcttttgaaactaaacttatttagaatatccagtgcatttctacaaaaaggacatgtatacttgacaaaaattgtcactttgttattggccaacctttgttgtacaaattcctcggccattttaatatttaagtgatataaaactatctcgacttatttaactctttagtcgagatatatggacgcagatagctatatgatagccaactacagaaggcaaacgctataaaaaacataattacgacgagcatatttataaatatttttattcagcattacttgatatagtaatattaggcacagtcaaacattcaaccactctcgatacattaactctctcattttctttaacaaattctgcaatatcttcgtaaaaagattcttgaaactttttagaatatctatcgactctagatgaaatagcgttcgtcaacatactatgttttgtatacataaaggcgcccattttaacagtttctagtgacaaaatgctagcgatcctaggatcctttagaatcacatagattgacgattcgtctctcttagtaactctagtaaaataatcatacaatctagtacgcgaaataatattatccttgacttgaggagatctaaacaatctagttttgagaacatcgataagttcatcgggaatgacatacatactatctttaatagaactcttttcatccagttgaatggattcgtccttaaccaactgattaatgagatcttctattttatcattttccagatgatatgtatgtccattaaagttaaattgtgtagcgcttctttttagtctagcagccaatactttaacatcactaatatcgatatacaaaggagatgatttatctatggtattaagaattcgtttttcgacatctgtcaaaaccaattcctttttgcctgtatcatccagttttccatcctttgtaaagaaattattttctactagactattaataagactgataaggattcctccataattgcacaatccaaactttttcacaaaactagactttacaagatctacaggaatgcgtacttcaggttttttagcttgtgattttttcttttgcggacattttcttgtgaccaactcatctaccatttcattgattttagcagtgaaataagctttcaatgcacgggcactgatactattgaaaacgagttgatcttcaaattccgccatttaagttcaccaaacaacttttaaatacaaatatatcaatagtagtagaataagaactataaaaaaaataataattaaccaataccaaccccaacaaccggtattattagttgatgtgactgttttctcatcacttagaacagatttaacaatttctataaagtctgtcaaatcatcttccggagaccccataaatacaccaaatatagcggcgtacaacttatccatttatacattgaatattggcttttctttatcgctatcttcatcatattcatcatcaatatcaacaagtcccagattacgagccagatcttcttctacattttcagtcattgatacacgttcactatctccagagagtccgataacgttagccaccacttctctatcaatgattagtttcttgagcgcgaaagtaatttttgtttccgttccggatctatagaagacgataggtgtgataattgccttggccaattgtctttctcttttactgagtgattctagttcaccttctatagatctgagaatggatgattctccagtcgaaacatattctaccatggatccgtttaatttgttgatgaagatggattcatccttaaatgttttctctgtaatagtttccaccgaaagactatgcaaagaatttggaatgcgttccttgtgcttaatgtttccatagacggcttctagaagttgatacaacataggactagccgcggtaacttttatttttagaaagtatccatcgcttctatcttgtttagatttatttttataaagtttagtctctccttccaacataataaaagtggaagtcatttgactagataaactatcagtaagttttatagagatagacgaacaattagcgtattgagaagcatttagtgtaacgtattcgatacattttgcattagatttactaatcgattttgcatactctataacacccgcacaagtctgtagagaatcgctagatgcagtaggtcttggtgaagtttcaactctcttcttgattaccttactcatgattaaacctaaataattgtactttgtaatataatgatatatattttcactttatctcatttgagaataaaaatgtttttgtttaaccactgcatgatgtacagatttcggaatcgcaaaccaccagtggttttattttatccttgtccaatgtgaattgaatgggagcggatgcgggtttcgtacgtagatagtacattcccgtttttagaccgagactccatccgtaaaaatgcatactcgttagtttggaataactcggatctgctatatggatattcatagattgactttgatcgatgaaggctcccctgtctgcagccatttttatgatcgtcttttgtggaatttcccaaatagttttataaactcgcttaatatcttctggaaggtttgtattctgaatggatccaccatctgccataatcctattcttgatctcatcattccataattttctctcggttaaaactctaaggagatgcggattaactacttgaaattctccagacaatactctccgagtgtaaatattactggtatacggttccaccgactcattatttcccaaaatttgagcagttgatgcagtcggcataggtgccaccaataaactatttctaagaccgtatgttctgattttatcttttagaggttcccaattccaaagatccgacggtacaacattccaaagatcatattgtagaataccgttactggcgtacgatcctacatatgtatcgtatggtccttccttctcagctagttcacaactcgcctctaatgcaccgtaataaatggtttcgaagatcttcttatttagatcttgtgcttccaggctatcaaatggataatttaagagaataaacgcgtccgctaatccttgaacaccaataccgataggtctatgtctcttattagagatttcagcttctggaataggataataattaatatctataattttattgagatttctgacaattactttgaccacatccttcagtttgagaaaatcaaatcgcccatctattacaaacatgttcaaggcaacagatgccagattacaaacggctacctcattagcatccgcatattgtattatctcagtgcaaagattactacacttgatagttcctaaattttgttgattactctttttgttacacgcatccttataaagaatgaatggagtaccagtttcaatctgagattctataatcgctttccagacgactcgagcctttattatagatttgtatctcctttctctttcgtatagtgtatacaatcgttcgaactcgtctccccaaacattgtccaatccaggacattcatccggacacatcaacgaccactctccgtcatccttcactcgtttcataaagagatcaggaatccaaagagctataaatagatctctggttctatgttcctcgtttcctgtattctttttaagatcgaggaacgccataatatcagaatgccacggttccaagtatatggccataactccaggccgtttgtttcctccctgatctatgtatctagcggtgttattataaactctcaacattggaataataccgtttgatataccattggtaccggagatatagcttccactggcacgaatattactaattgatagacctattccccctgccattttagagattaatgcgcatcgttttaacgtgtcatagataccctctatgctatcatcgatcatgttaagtagaaaacagctagacatttggtgacgactagttcccgcattaaataaggtaggagaagcgtgcgtaaaccatttttcagaaagtagattgtacgtctcaatagctgagtctatatcccattgatgaattcctactgcgacacgcattaacatgtgctgaggtctttcaacgatcttgttgtttattttcaacaagtaggatttttccaaagttttaaaaccaaaatagttgtatgaaaagtctcgttcgtaaataataaccgagttgagtttatccttatatttgttaactatatccatggtgatacttgaaataatcggagaatgtttcccatttttaggattaacatagttgaataaatcctccatcacttcactaaatagtttttttgtttccttgtgtagatttgatacggctattctggcggctagaatggcataatccggatgttgtgtagtacaagtggctgctatttcggctgccagagtgtccaattctaccgttgttactccattatatattccttgaataaccttcatagctattttaataggatctatatgatccgtgtttaagccataacataattttctaatacgagacgtgattttatcaaacatgacattttccttgtatccatttcgtttaatgacaaacatttttgttggtgtaataaaaaaattatttaacttttcattaatagggatttgacgtatgtagcgtacaaaatgatcgttcctggtatatagataaagagtcctatatatttgaaaatcgttacggctcgattaaactttaatgattgcatagtgaatatatcattaggatttaactccttgactatcatggcggcgccagaaattaccatcaaaagcattaatacagttatgccgatcgcagttaaaacggttatagcatccaccatttatatctaaaaattagatcaaagaatatgtgacaaagtcctagttgtatactgagaattgacgaaacaatgtttcttacatatttttttcttattagtaactgacttaatagtaggaactggaaagctagacttgattattctataagtatagatacccttccagataatgttctctttgataaaagttccagaaaatgtagaattttttaaaaagttatcttttgctattaccaagattgtgtttagacgcttattattaatatgagtgatgaaatccacaccgcctctagatatcgcctttatttccacattagatggtaaatccaatagtgaaactatctttttaggaatgtatggactcgcgtttagaggagtgaacgtcttgggcgtcggaaaggatgattcgtcaaacgaataaacaatttcacaaatggatgttaatgtattagtaggaaatttcttgacgctattggaattgaagattctaatggatgatgttctacctatttcatccgataacatgttaatttccgacaccaacggttttaatatttcgatgatatacggtagtctctctttcggacttatatagcttattccacaatacgagtcattatatactccaaaaaacaaaataactagtataaaatctgtatcgaatgggaaaaacgaaattatcgacataggtatagaatccggaacattgaacgtattaatacttaattctttttctgtggtaagtaccgataggttattgacattgtatggttttaaatattctataacttgagacttgatagatattagtgatgaattgaaaattatttttatcaccacgtgtgtttcaggatcatcgtcgacgcctgtcaaccaaccgaatggagtaaaataaatatcattaatatatgctctagatattagtatttttattaatcctttgattatcatcttctcgtaggcgaatgattccatgatcaagagtgatttgagaacatcctccggagtattaatgggcttagtaaacagtccatcgttgcaataataaaagttatccaagttaaaggatattatgcattcgtttaaagatatcacctcatctgacggagacaattttttggtaggttttagagactttgaagctacttgtttaacaaagttattcatcgtcgtctactattctatttaattttgtagttaatttatcacatatcacattaattgactttttggtccatttttccatacgtttatattcttttaatcctgcgttatccgtttccgttatatccagggatagatcttgcaagttaaatagaatgctcttaaataatgtcattttcttatccgctaaaaatttaaagaatgtataaacctttttcagagatttgaaactcttaggtggtgtcctagtacacaatatcataaacaaactaataaacattccacattcagattccaacagctgattaacttccacattaatacagcctattttcgctccaaatgtacattcgaaaaatctgaataaaacatcgatgtcacaatttgtattatccaatacagaatgtttgtgattcgtgttaaaaccatcggagaaggaatagaaataaaaattattatagtggtggaattcagttggaatattgcctccggagtcataaaaggatactaaacattgttttttatcataaattacacatttccaatgagacaaataacaaaatccaaacattacaaatctagaggtagaacttttaattttgtctttaagtatatacgataagatatgtttattcataaacgcgtcaaatttttcatgaatcgctaaggagtttaagaatctcatgtcaaattgtcctatataatccacttcggatccataagcaaactgagagactaagttcttaatacttcgattgctcatccaggctcctctctcaggctctattttcatcttgacgacctttggattttcaccagtatgtattcctttacgtgataaatcatcgattttcaaatccatttgtgagaagtctatcgccttagatactttttcccgtagtcgaggtttaaaaaaatacgctaacggtatactagtaggtaactcaaagacatcatatatagaatggtaacgcgtctttaactcgtcggttaactctttcttttgatcgagttcgtcgctactattgggtctgctcaggtgccccgactctactagttccaacatcataccgataggaatacaagacactttgccggcggttgtagatttatcatatttttccactacatatccgttacaatttgttaaaaatttagatacatctatattgctacataatccagctagtgaatatatatgacataataaattggtaaatcctagttctggtattttactaattactaaatctgtatatctttccatttatcatggaaaagaatttaccagatatcttcttttttccaaactgcgttaatgtattctcttacaaatattcacaagatgaattcagtaatatgagtaaaacggaacgtgatagtttctcattggccgtgtttccagttataaaacatagatggcataacgcacacgttgtaaaacataaaggaatatacaaagttagtacagaagcacgtggaaaaaaagtatctcctccatcactaggaaaacccgcacacataaacctaaccgcgaagcaatatatatacagtgaacacacaataagctttgaatgttatagttttctaaaatgtataacaaatacagaaatcaattcgttcgatgagtatatattaagaggactattagaagctggtaatagtttacagatattttccaattccgtaggtaaacgaacagatactataggtgtactagggaataagtatccatttagcaaaattccattggcctcattaactcctaaagcacaacgagagatattttcagcgtggatttctcatagacctgtagttttaactggaggaactggagtgggtaagacgtcacaggtacccaagttattgctttggtttaattatttatttggtggattctctactctagataaaatcactgactttcacgaaagaccagtcattctatctcttcctaggatagctttagttagattgcatagcaataccattttaaaatcattgggatttaaggtactagatggatctcctatttctttacggtacggatctataccggaagaattaataaacaaacaaccaaaaaaatatggaattgtattttctacccataagttatctctaacaaaactatttagttatggcactcttattatagacgaagttcatgagcatgatcaaataggagatattattatagcagtagcgagaaagcatcatacgaaaatagattctatgtttttaatgactgccacgttagaggatgacagggaacggctaaaagtatttttacctaatcccgcatttatacatattcctggagatacactgtttaaaattagcgaggtatttattcataataagataaatccatcttccagaatggcatacatagaagaagaaaagagaaatttagttactgctatacagatgtatactcctcctgatggatcatccggtatagtctttgtggcatccgttgcacagtgtcacgaatataaatcatatttagaaaaaagattaccgtatgatatgtatattattcatggtaaggtcttagatatagacgaaatattagaaaaagtgtattcatcacctaatgtatcgataattatttctactccttatttggaatccagcgttactatacgcaatgttacacacatttatgatatgggtagagtttttgtccccgctccttttggaggatcgcaacaatttatttctaaatctatgagagatcaacgaaaaggaagagtaggaagagttaatcctggtacatacgtctatttctatgatctgtcttatatgaagtctatacagcgaatagattcagaatttctacataattatatattgtacgctaataagtttaatctaacactccccgaagatttgtttataatccctacaaatttggatattctatggcgtacaaaggaatatatagactcgttcgatattagtacagaaacatggaataaattattatccaattattatatgaagatgatagagtatgctaaactttatgtactaagtcctattctcgctgaggagttggataactttgagaggacgggagaattaactagtattgtacgagaagccattttatctctaaatttacaaattaagattttaaattttaaacataaagatgatgatacgtatatacacttttgtaaaatattattcggtgtctataacggaacaaacgctactatatattatcatagacctctaacgggatatatgaatatgatttcagatactatatttgttcctgtagataataactaaaaatcaaactctaatgaccacatctttttttagagatgaaaaattttccacatctccttttgtagacacgactaaacattttgcagaaaaaagtttattagtgtttagataatcgtatacttcatcagtgtagatagtaaatgtgaacagataaaaggtattcttgctcaatagattggtaaattccatagaatatattaatcctttcttcttgagatcccacatcatttcaaccagagacgttttatccaatgatttacctcgtactataccacatacaaaactagattttgcagtgacgtcgtacctggtattcctaccaaacaaaattttacttttagttcttttagaaaattctaaggtagaatctctatttgccaatatgtcatctatggaattaccactagcaaaaaatgatagaaatatatattgatacatcgcagctggttttgatctactatactttaaaaacgaatcagattccataattgcctgtatatcatcagctgaaaaactatgttttacacgtattccttcggcatttctttttaatgatatatcttgtttagacaatgataaagttatcatgtccatgagagacgcgtctccgtatcgtataaatatttcattagatgttagacgcttcattaggggtatacttctataaggtttcttaatcagtccatcattggttgcgtcaagaactactatcggatgttgttgggtatctctagtgttacacatggccttactaaagtttgggtaaataactatgatatctctattaattatagatgcatatatttcattcgtcaaggatattagtatcgacttgctatcgtcattaatacgtgtaatgtaatcatataaatcatgcgatagccaaggaaaatttaaatagatgttcatcatataatcgtcgctataattcatattaatacgttgacattgactaatttgtaatatagcctcgccacgaagaaagctctcgtattcagtttcatcgataaaggataccgttaaatataactggttgccgatagtctcatagtctattaagtggtaagtttcgtacaaatacagaatccctaaaatattatctaatgttggattaatctttaccataactgtataaaatggagacggagtcataactattttaccgtttgtacttactggaatagatgaaggaataatctccggacatgctggtaaagacccaaatgtctgtttgaagaaatccaatgttccaggtcctaatctcttaacaaaaattacgatattcgatcccgatatcctttgcattctatttaccagcatatcacgaactatattaagattatctatcatgtctattctcccaccgttatataaatcgcctccgctaagaaacgttagtatatccatacaatggaatacttcatttctaaaatagtattcgttttctaattctttaatgtgaaatcgtatactagaaagggaaaaattatctttgagttttccgttagaaaagaaccacgaaactaatgttctgattgcgtccgattccgttgctgaattaatggatttacaccaaaaactcatataacttctagatgtagaagcattcgctaaaaaattagtagaatcaaaggatataagtagatgttccaacaagtgagcaattcccaagatttcatctatatcattctcgaatccgaaattagaaattcccaagtagatatcctttttcatccgatcgttgatgaaaatacgaactttattcggtaagacaatcatttactaaggagtaaaataggaagtaatgttcgtatgtcgttatcatcgtataaattaaaggtgtgttttttaccattaagtgacattataattttaccaatattggaattataatataggtgtatttgcgcactcgcgacggttgatgcatcggtaaatatagctgtatctaatgttctagtcggtatttcatcatttcgctgtctaataatagcgttttctctatctgtttccattacagctgcctgaagtttattggtcggataatatgtaaaataataagaaatacatacgaataacaaaaataaaataagatataataaagatgccatttagagatctaattttgtttaacttgtccaaattcctacttacagaagatgaggaatcgttggagatagtgtcttccttatgtagaggatttgaaatatcttataatgacttgataacttactttccagataggaaataccataaatatatttataaagtatttgaacatgtagatttatcggaggaattaagtatggaattccatgatacaactctgagagatttagtctatcttagattgtacaagtattccaagtgtatacggccgtgttataaattaggagataatctaaaaggcatagttgttataaaggacaggaatatttatattagggaagcaaatgatgacttgatagaatatctcctcaaggaatacactcctcagatttatacatattctaatgagcgcgtccccataactggttcaaaattaattctttgtggattttctcaagttacatttatggcgtatacaacgtcgcatataacaacaaataaaaaggtagatgttctcgtttccaaaaaatgtatagatgaactagtcgatccaataaattatcaaatacttcaaaatttatttgataaaggaagcggaacaataaacaaaatactcaggaagatattttattcggtaacaggtggccaaactccataggtagctttttctatttcggattttagaatttccaaattcaccagcgatttatcggttttggtgaaatccaaggatttattaatgtccacaaatgccatttgttttgtctgtggattgtatttgaaaatggaaacgatgtagttagatagatgcgctgcgaagtttcctattagggttccgcgcttcacgtcacccagcatacttgaatcaccatcctttaaaaaaaatgataagatatcaacatggagtatatcatactcggattttaattcttctactgcatcactgacattttcacaaatactacaatacggtttaccgaaaataatcagtacgttcttcatttatgggtatcaaaaacttaaaatcgttactgctggaaaataaatcactgacgatattagatgataatttatacaaagtatacaatggaatatttgtggatacaatgagtatttatatagccgtcgccaattgtgtcagaaacttagaagagttaactacggtattcataaaatacgtaaacggatgggtaaaaaagggagggcatgtaaccctttttatcgatagaggaagtataaaaattaaacaagacgttagagacaagagacgtaaatattctaaattaaccaaggacagaaaaatgttagaattagaaaagtgtacatccgaaatacaaaatgttaccggatttatggaagaagaaataaaggcagaaatgcaattaaaaatcgataaactcacatttcaaatatatttatctgattctgataacataaaaatatcattgaatgagatactaacacatttcaacaataatgagaatgttacattattttattgtgatgaacgagacgcagaattcgttatgtgtctcgaggctaaaacacatttctctaccacaggagaatggccgttgataataagtaccgatcaggatactatgctatttgcatctgctgataatcatcctaagatgataaaaaacttaactcaactgtttaaatttgttccctcggcagaggataactatttagcaaaattaacggcgttagtgaatggatgtgatttctttcctggactctatggggcatctataacacccaccaacttaaacaaaatacaattgtttagtgattttacaatcgataatatagtcactagtttggcaattaaaaattattatagaaagactaactctaccgtagacgtgcgtaatattgttacgtttataaacgattacgctaatttagacgatgtctactcgtatattcctccttgtcaatgcactgttcaagaatttatattttccgcattagatgaaaaatggaatgaatttaaatcatcttatttagaaagcgtgccgttaccctgccaattaatgtacgcgttagaaccacgcaaggagattgatgtttcagaagttaaaactttatcatcttatatagatttcgaaaatactaaatcagatatcgatgttataaaatctatatcctcgatcttcggatattctaacgaaaactgtaacacgatagtattcggcatctataaggataatttactactgagtataaataattcattttactttaacgatagtctgttaataaccaatactaaaagtgataatataataaatataggttactagattaaaaatggtgttccaactcgtgtgctctacatgcggtaaagatatttctcacgaacgatataaattgattatacgaaaaaaatcattaaaggatgtactcgtcagtgtaaagaacgaatgttgtaggttaaaattatctacacaaatagaacctcaacgtaacttaacagtgcaacctctattggatataaactaatatggatccggttaattttatcaagacatatgcgcctagaggttctattatttttattaattataccatgtcattaacaagtcatttgaatccatcgatagaaaaacatgtgggtatttattatggtacgttattatcggaacacttggtagttgaatctacctatagaaaaggagttcgaatagtcccattggatagtttttttgaaggatatcttagtgcaaaagtatacatgttagagaatattcaagttatgaaaatagcagctgatacgtcattaactttattgggtattccgtatggatttggtcataatagaatgtattgttttaaattggtagctgactgttataaaaatgccggtattgatacatcgtctaaacgaatattgggcaaagatatttttctgagccaaaacttcacagacgataatagatggataaagatatatgattctaataatttaacattttggcaaattgattaccttaaagggtgagttaatatgcataactactcctccgttgttttttccctcgttctttttcttaacgttgtttgccatcactctcataatgtaaagatattctaaaatggtaaacttttgcatatcggacgcagaaattggtataaatgttgtaattgtattatttcccgtcaatggactagtcacagctccatcagttttatatcctttagagtatttctcactcgtgtctaacattctagagcattccatgatctgtttatcgttgatattggccggaaagatagattttttattttttattatattactattggcaattgtagatataacttctggtaaatatttttctaccttttcaatctcttctattttcaagccggctatatattctgctatattgttgctagtatcaataccttttctggctaagaagtcatatgtggtattcactatatcagttttaactggtagttccattagcctttccacttctgcagaataatcagaaattggttctttaccagaaaatccagctactataataggctcaccgatgatcattggcaaaatcctatattgtaccagattaatgagagcatatttcatttccaataattctgctagttcttgagacattgatttatttgatgaatctagttggttctctagatactctaccatttctgccgcatacaataacttgttagataaaatcagggttatcaaagtgtttagcgtggctagaatagtgggcttgcatgtattaaagaatgcggtagtatgagtaaaccgttttaacgaattatatagtctccagaaatctgtggcgttacatacatgagccgaatgacatcgaagattgtccaatatttttaatagctgctctttgtccattatttctatatttgactcgcaacaattgtagataccattaatcaccgattcctttttcgatgccggacaatagcacaattgtttagctttggactctatgtattcagaattaatagatatatctctcaatacagattgcactatacattttgaaactatgtcaaaaattgtagaacgacgctgttctgcagccatttaactttaaataatttacaaaaatttaaaatgagcatccgtataaaaatcgataaactgcgccaaattgtggcatatttttcagagttcagtgaagaagtgtctataaatgtagactcgacggatgagttaatgtatatttttgccgccttgggcggatctgtaaacatttgggcaattatacctctaagtgcatcagtgttttaccgaggagccgaaaatattgtgtttaatcttcctgtgtccaaggtaaaatcgtgtttgtgtagttttcacaatgatgccatcatagatatagaacctgatctggaaaataatctagtaaaactttctagttatcatgtagtaagtgtcgattgtaacaaggaactgatgcctattaggacagatactactatttgtctaagtatagatcaaaagaaatcttacgtgtttaattttcacaagtatgaagaaaaatgttgtggtagaaccgtcattcatctagaatggttgttgggctttatcaagtgtattagtcagcatcagcatctggctattatgtttaaagatgacaatattattatgaagactcctggtaatactgatgcattttccagggaatattctatgactgaatgttctcaagaactacaaaagttttctttcaaaatagctatctcgtctctcaacaaactacgaggattcaaaaagagagtcaatgtttttgaaactagaatcgtaatggataatgacgataacattctaggaatgttgttttcggatagagttcaatcctttaagatcaacatctttatggcgtttttagattaatactttcaatgagataaatatgggtggcggagtaagtgttgagctccctaaacgggatccgcctccgggagtacccactgatgagatgttattaaacgtggataaaatgcatgacgtgatagctcccgctaagcttttagaatatgtgcatataggaccactagcaaaagataaagaggataaagtaaagaaaagatatccagagtttagattagtcaacacaggacccggtggtctttcggcattgttaagacaatcgtataatggaaccgcacccaattgctgtcgcacttttaatcgtactcattattggaagaaggatggaaagatatcagataagtatgaagagggtgcagtattagaatcgtgttggccagacgttcacgacactggaaaatgcgatgttgatttattcgactggtgtcagggggatacgttcgatagaaacatatgccatcagtggatcggttcagcctttaataggagtgatagaactgtagagggtcaacaatcgttaataaatctgtataataagatgcaaacattatgtagtaaagatgctagtgtaccaatatgcgaatcatttttgcatcatttacgcgcacacaatacagaagatagcaaagagatgatcgattatattctaagacaacagtctgcggactttaaacagaaatatatgagatgtagttatcccactagagataagttagaagagtcattaaaatatgcggaacctcgagaatgttgggatccagagtgttcgaatgccaatgttaatttcttactaacacgtaattataataatttaggactttgcaatattgtacgatgtaataccagcgtgaacaacttacagatggataaaacttcctcattaagattgtcatgtggattaagcaatagtgatagattttctactgttcccgtcaatagagcaaaagtagttcaacataatattaaacattcgttcgacctaaaattgcatttgatcagtttattatctcttttggtaatatggatactaattgtagctatttaaatgggtgccgcggcaagcatacagacgacggtgaatacactcagcgaacgtatctcgtctaaattagaacaagaagcgaacgctagtgctcaaacaaaatgtgatatagaaatcggaaatttttatatccgacaaaaccatggatgtaacctcactgttaaaaatatgtgctctgcggacgcggatgctcagttggatgctgtgttatcagccgctacagaaacatatagtggattaacaccggaacaaaaagcatacgtgccagctatatttactgctgcgttaaacattcagacgagtgtaaacactgttgttagagattttgaaaattatgtgaaacagacttgtaattctagcgcggtcgtcgataacaaattaaagatacaaaacgtaatcatagatgaatgttacggagccccaggatctccaacaaatttggaatttattaatacaggatctagcaaaggaaattgtgccattaaagcgttgatgcaattgacgactaaggccactactcaaatagcacctagacaagttgctggtacaggagttcagttttatatgattgttatcggtgttataatattggcagcgttgtttatgtactatgccaagcgtatgttgttcacatccaccaatgataaaatcaaacttattttagccaataaggaaaacgtccattggactacttacatggacacattctttagaacttctccgatggttattgctaccacggatatgcaaaactgaaaatatattgataatattttaatagattaacatggaagttatcgctgatcgtctagacgatatagtgaaacaaaatatagcggatgaaaaatttgtagattttgttatacacggtctagagcatcaatgtcctgctatacttcgaccattaattaggttgtttattgatatactattatttgttatagtaatttatatttttacggtacgtctagtaagtagaaattatcaaatgttgttggtggtgctagtcatcacattaactattttttattactttatactataatagtactagactgacttctaacaaacatctcacctgccataaataaatgcttgatattaaagtcttctatttctaacactattccatctgtggaaaataatactctgacattatcgctaattgacacatcggtgagtgatatgcctataaagtaataatcttctttgggcacatataccagtgtaccaggttctaacaacctatttactggtgctcctgtagcatactttttctttaccttgagaatatccatcgtttgcttggtcaatagcgatatgtgattttttatcaaccactcaaaaaagtaattggagtgttcatatcctctacgggctattgtctcatggccgtgtatgaaatttaagtaacacgactgtggtagatttgttctatagagccgattgccgcaaatagatagaactaccaatatgtctgtacaaatgttaaacattaattgattaacagaaaaaacaatgttcgttctgggaatagaaaccagatcaaaacaaaattcgttagaatatatgccacgtttatacatggaatataaaataactacagtttgaaaaataacagtatcatttaaacatttaacttgcggggttaatctcacaactttactgtttttgaactgttcaaaatatagcatcgatccgtgagaaatacgtttagccgcctttaatagaggaaatcccaccgcctttctggatctcaccaacgacgatagttctgaccagcaactcatttcttcatcatccacctgttttaacatataataggcaggagatagatatccgtcattgcaatattccttctcgtaggcacacaatctaatattgataaaatctccattctcttctctgcatttattatcttgtctcggtggctgattaggctgtggtcttggtttaggccttggtctatcgttgttgaatctattttggtcattaaatctttcatttcttcctggtatatttctatcacctcgtttggttggatttttgtctatattatcgtttgtaacatcggtacgggtattcatttatcacaaaaaaaacttctctaaatgagtctactgctagaaaacctcatcgaagaagataccatattttttgcaggaagtatatctgagtatgatgatttacaaatggttattgccggcgcaaaatccaaatttccaagatctatgctttctatttttaatatagtacctagaacgatgtcaaaatatgagttggagttgattcataacgaaaatatcacaggagcaatgtttaccacaatgtataatataagaaacaatttgggtctaggagatgataaactaactattgaagccattgaaaactatttcttggatcctaacaatgaagttatgcctcttattattaataatacggatatgactgccgtcattcctaaaaaaagtggtaggagaaagaataagaacatggttatcttccgtcaaggatcatcacctatcttgtgtattttcgaaactcgtaaaaagattaatatttataaagaaaatatggaatccgcgtcgactgagtatacacctatcggagacaacaaggctttaatatctaaatatgcgggaattaatgtcctgaatgtgtattctccttccacatccataagattgaatgccatttacggattcaccaataaaaataaactagagaaacttagtactaataaggaactagaatcgtatagttctagccctcttcaagaacccattaggttaaatgattttctgggactattggaatgtgttaaaaagaatattcctctaacagatattccgacaaaggattgattactataaatggagaatgttcctaatgtatactttaatcctgtgtttatagagcccacgtttaaacattctttattaagtgtttataaacacagattaatagttttatttgaagtattcgttgtattcattctaatatatgtattttttagatctgaattaaatatgttcttcatgcctaaacgaaaaatacccgatcctattgatagattacgacgtgctaatctagcgtgtgaagacgataaattaatgatctatggattaccatggatgacaactcaaacatctgcgttatcaataaatagtaaaccgatagtgtataaagattgtgcaaagcttttgcgatcaataaatggatcacaaccagtatctcttaacgatgttcttcgcagatgatgattcattttttaagtatttggctagtcaagatgatgaatcttcattatctgatatattgcaaatcactcaatatctagactttctgttattattattgatccaatcaaaaaataaattagaagctgtgggtcattgttatgaatctctttcagaggaatacagacaattgacaaaattcacagactttcaagattttaaaaaactgtttaacaaggtccctattgttacagatggaagggtcaaacttaataaaggatatttgttcgactttgtgattagtttgatgcgattcaaaaaagaatcctctctagctaccaccgcaatagatcctgttagatacatagatcctcgtcgtgatatcgcattttctaacgtgatggatatattaaagtcgaataaagtgaacaataattaattctttattgtcatcatgaacggcggacatattcagttgataatcggccccatgttttcaggtaaaagtacagaattaattagacgagttagacgttatcaaatagctcaatataaatgcgtgactataaaatattctaacgataatagatacggaacgggactatggacgcatgataagaataattttgaagcattggaagcaactaaactatgtgatgtcttggaatcaattacagatttctccgtgataggtatcgatgaaggacagttctttccagacattgtttaattctgtgagcgtatggcaaacgaaggaaaaatagttatagtagccgcactcgatgggacatttcaacgtaaaccgtttaataatattttgaatcttattccattatctgaaatggtggtaaaactaactgctgtgtgtatgaaatgctttaaggaggcttccttttctaaacgattgggtgaggaaaccgagatagagataataggaggtaatgatatgtatcaatcggtgtgtagaaagtgttacgtcggctcataatattatattttttatctaaaaaactaaaaataaacattgattaaattttaatataatacttaaaaatggatgttgtgtcgttagataaaccgtttatgtattttgaggaaattgataatgagttagattacgaaccagaaagtgcaaatgaggtcgcaaaaaaactgccgtatcaaggacagttaaaactattactaggagaattattttttcttagtaagttacagcgacacggtatattagatggtgccaccgtagtgtatataggatcggctcctggtacacatatacgttatttgagagatcatttctataatttaggagtgatcatcaaatggatgctaattgacggccgccatcatgatcctattttaaatggattgcgtgatgtaactctagtgactcggttcgttgatgaggaatatctacgatccatcaaaaaacaactgcatccttctaagattattttaatttctgatgtaagatccaaacgaggaggaaatgaacctagtacggcggatttactaagtaattacgctctacaaaatgtcatgattagtattttaaaccccgtggcatctagtcttaaatggagatgcccgtttccagatcaatggatcaaggacttttatatcccacacggtaataaaatgttacaaccttttgctccttcatattcagctgaaatgagattattaagtatttataccggtgagaacatgagactgactcgagttaccaaattagacgctgtaaattatgaaaaaaagatgtactaccttaataagatcgtccgtaacaaagtagttgttaactttgattatcctaatcaggaatatgactattttcacatgtactttatgctgaggaccgtgtactgcaataaaacatttcctactactaaagcaaaggtactatttctacaacaatctatatttcgtttcttaaatattccaacaacatcaactgaaaaagttagtcatgaaccaatacaacgtaaaatatctagcaaaaattctatgtctaaaaacagaaatagcaagagatccgtacgcggtaataaatagaaacgtactactgagatatactaccgatatagagtataatgatttagttactttaataaccgttagacataaaattgattctatgaaaactgtgtttcaggtatttaacgaatcatccataaattatactccggttgatgatgattatggagaaccaatcattataacatcgtatcttcaaaaaggtcataacaagtttcctgtaaattttctatacatagatgtggtaatatctgacttatttcctagctttgttagactagatactacagaaactaatatagttaatagtgtactacaaacaggcgatggtaaaaagactcttcgtcttcccaaaatgttagagacggaaatagttgtcaagattctctatcgccctaatataccattaaaaattgttagatttttccgcaataacatggtaactggagtagagatagccgatagatctgttatttcagtcgctgattaatcaattagtagagatgagataagaacattataataatcaataatatatcttatatcttatatcttatatcttatatcttgtttagaaaaatgctaatattaaaatagctaacgctagtaatccaatcggaagccatttgatatctataatagggtatctaatttcctgatttaaatagcggacagctatattctcggtagctactcgtttggaatcacaaacattatttacatctaatttactatctgtaatggaaacgtttcccaatgaaatggtacaatccgatacattgcattttgttatatttttttttaaagaggctggtaacaacgcatcgcttcgtttacatggctcgtaccaacaataatagggtaatcttgtatctattcctatccgtactatgcttttatcaggataaatacatttacatcgtatatcgtctttgttagcatcacagaatgcataaatttgttcgtccgtcatgataaaaatttaaagtgtaaatataactattatttttatagttgtaataaaaagggaaatttgattgtatactttcggttctttaaaagaaactgacttgataaaaatggctgtaatctctaaggttacgtatagtctatatgatcaaaaagagattaatgctacagatattatcattagtcatgttaaaaatgacgacgatatcggtaccgttaaagatggtagactaggtgctatggatggggcattatgtaagacttgtgggaaaacggaattggaatgtttcggtcactggggtaaagtaagtatttataaaactcatatagttaagcctgaatttatttcagaaattattcgtttactgaatcatatatgtattcactgcggattattgcgttcacgagaaccgtattccgacgatattaacctaaaagagttatcgggacacgctcttaggagattaaaggataaaatattatccaagaaaaagtcatgttggaacagtgaatgtatgcaaccgtatcaaaaaattactttttcaaagaaaaaggtttgtttcgtcaacaagttggatgatattaacgttcctaattctctcatctatcaaaagttaatttctattcatgaaaagttttggccattattagaaattcatcaatatccagctaacttattttatacagactactttcccatccctccgttgattattagaccggctattagtttttggatagatagtatacccaaagagaccaatgaattaacttacttattaggtatgatcgttaagaattgtaacttgaatgctgatgaacaggttatccagaaggcggtaatagaatacgatgatattaaaattatttctaataacactaccagtatcaatttatcatatattacatccggcaaaaataatatgattagaagttatatcgtcgcccgacgaaaagatcagaccgctagatctgtaattggtcccagtacatctatcaccgttaatgaggtaggaatgcccgcatatattagaaatacacttacagaaaagatatttgttaatgcctttacagtggataaagttaaacaactattagcgtcaaaccaagttaaattttactttaataaacgattaaaccaattaacaagaatacgccaaggaaagtttattaaaaataaaatacatttattgcctggtgattgggtagaagtagctgttcaagaatatacaagtattatttttggaagacagccgtctctacatagatacaacgtcatcgcttcatctatcagagctaccgaaggagatactatcaaaatatctcccggaattgccaactctcaaaatgctgatttcgacggggatgaggaatggatgatattagaacaaaatcctaaagctgtaattgaacaaagtattcttatgtatccgacgacgttactcaaacacgatattcatggagcccccgtttatggatctattcaagatgaaatcgtagcagcgtattcattgtttaggatacaagatctttgtttagatgaagtattgaacatcttggggaaatatggaagagagttcgatcctaaaggtaaatgtaaattcagcggtaaagatatctatacttacttgataggtgaaaagattaattatccgggtctcttaaaggatggtgaaattattgcaaacgacgtagatagtaattttgttgtggctatgaggcatctgtcattggctggactcttatccgatcataagtcgaacgtggaaggtatcaactttattatcaagtcatcttatgtttttaagagatatctatctatttacggttttggggtgacattcaaagatctgagaccaaattcgacgttcactaataaattggaggccatcaacgtagaaaaaatagaacttatcaaagaagcatacgccaaatatctcaacgatgtaagagacgggaaaatagttccattatctaaagctttagaggcggactatgtggaatccatgttatccaacttgacaaatcttaatatccgagagatagaagaacatatgagacaaacgctgatagatgatccagataataacctcctgaaaatggccaaagcgggttataaagtaaatcccacagaactaatgtatattctaggtacgtatggacaacaaaggattgatggtgaaccagcagagactcgagtattgggtagagttttaccttactatcttccagactctaaggatccagaaggaagaggttatattcttaattctttaacaaaaggattaacgggttctcaatattacttttcgatgctggttgcaagatctcaatctactgatatcgtctgtgaaacatcacgtaccggaacactggctagaaaaatcattaaaaagatggaggatatggtggtcgacggatacggacaagtagttataggtaatacgctcatcaagtacgccgccaattataccaaaattctaggctcagtatgtaaacctgtagatcttatctatccagatgagtccatgacttggtatttggaaattagtgctctgtggaataaaataaaacagggattcgtttactctcagaaacagaaacttgcaaagaagacattggcgccgtttaatttcctagtattcgtcaaacccaccactgaggataatgctattaaggttaaggatctgtacgatatgattcataacgtcattgatgatgtgagagagaaatacttctttacggtatctaatatagattttatggagtatatattcttgacgcatcttaatccttctagaattagaattacaaaagaaacggctatcactatctttgaaaagttctatgaaaaactcaattatactctaggtggtggaactcctattggaattatttctgcacaggtattgtctgagaagtttacacaacaagccctgtccagttttcacactactgaaaaaagtggtgccgtcaaacaaaaacttggtttcaacgagtttaataacttgactaatttgagtaagaataagaccgaaattatcactctggtatccgatgatatctctaaacttcaatctgttaagattaatttcgaatttgtatgtttgggagaattaaatccagacatcactcttcgaaaagaaacagataggtatgtagtagatataatagtcaatagattatacatcaagagagcagaaataaccgaattagtcgtcgaatatatgattgaacgatttatctcctttagcgtcattgtaaaggaatggggtatggagacattcattgaggacgaggataatattagatttactgtctatctaaatttcgttgaaccggaagaattgaatcttagtaagtttatgatggttcttccgggggcagccaacaagggaaagattagtaaattcaagattcctatctctgattatacgggttatgacgacttcaatcaaacaaaaaagctcaataagatgactgtagaactcatgaatctaaaagaattgggttctttcgatttggaaaacgtcaacgtgtatcctggagtatggaatacatacgatatcttcggtatcgaggccgctcgtgaatacttgtgcgaagccatgttaaacacctatggagaagggttcgattatctgtatcagccttgtgatcttctcgctagtttactatgtgctagttacgaaccagaatcagtgaataaattcaagttcggcgcagctagtactcttaagagagctacgttcggagacaataaagcattgttaaacgcggctcttcataaaaagtcagaacctattaacgataatagtagctgccacttttttagcaaggtccctaatataggaactggatattacaaatactttatcgacttgggtcttctcatgagaatggaaaggaaactatctgataagatatcttctcaaaagatcaaggaaatggaagaaacagaagacttttaattcttatcaataacatatttttctatgatctgtcttttaaacgatggattttccacaaatgcgcctctcaagtccctcatagaatgatacacgtataaaaaatatagcataggcaatgactccttatttttagacattagatatgccaaaatcatagccccgcttctatttactcccgcagcacaatgaaccaacacgggctcgtttcgttgatcacatttagataaaaaggcggttacgtcgtcaaaatatttactaatatcggtagttgtatcatctaccaacggtatatgaataatattaatattagagttaggtaatgtatatttatccatcgtcaaatttaaaacatatttgaacttaacttcagatgatggtgcatccatagcatttttataatttcccaaatacacattattggttacccttgtcattatagtgggagatttggctctgtgcatatctccagttgaacgtagtagtaagtatttatacaaacttttcttatccatttataacgtacaaatggataaaactactttatcggtaaacgcgtgtaatttagaatacgttagagaaaaggctatagtaggcgtacaagcagccaaaacatcaacacttatattctttgttattatattggcaattagtgcgctattactctggtttcagacgtctgataatccagtctttaatgaattaacgagatatatgcgaattaaaaatacggttaacgattggaaatcattaacggatagcaaaacaaaattagaaagtgatagaggtagacttctagccgctggtaaggatgatatattcgacttcaaatgtgtggatttcggcgcctattttatagctatgcgattggataagaaaacatatctgccgcaagctattaggcgaggtactggagacgcgtggatggttaaaaaggcggcaaaggtcgatccatctgctcaacaattttgtcagtatttgataaaacacaagtctaataatgttattacttgtggtaatgagatgttaaatgaattaggttatagcggttattttatgtcaccgcattggtgttccgattttagtaatatggaatagtgttagataaatgcggtaacgaatgttcctgtaaggaaccataacagcttagatttaacgttaaagatgagcataaacataataaacaaaattacaatcaaacctataacattaatatcaaacaatccaaaaaatgaaatcagtggagtagtaaacgcgtacataactcctggataacgtttagcagctgccgttcctattctagaccaaaaattcggtttcatgttttcgaaacggtattctgcaacaagtcgaggatcgtgttctacatatttggcggcgttatccagtatctgcctattgatcttcatttcgttttcgattctggctatttcaaaataaaatcccgatgatagacctccagactttataatttcatctacgatgttcagcgccgtagtaactctaataatataggctgataagctaacatcataccctcctgtatatgtgaatatggcatgatttttgtccattacaagctcggttttaactttattgcctgtaataatttctctcatctgtaggatatctatttttttgtcatgcattgccttcaagacgggacgaagaaacgtaatatcctcaataacgttatcgttttctacaataactacatattctacctttttattttctaactcggtaaaaaaattagaatcccatagggctaaatgtctagcgatatttcttttcgtttcctctgtacacatagtgttacaaaaccctgaaaagaagtgagtatacttgtcatcatttctaatgtttcctccagtccactgtataaacgcataatccttgtaatgatctggatcatccttgactaccacaacatttcttttttctggcataacttcgttgtcctttacatcatcgaacttctgatcattaatatgctcatgaacattaggaaatgtttctgatggaggtctatcaataactggcacaacaataacaggagttttcaccgccgccatttagttattgaaattaatcatatacaactctttaatacgagttatattttcgtctatccattgtttcacattgacatatttcgacaaaaagatataaaatgcgtattccaatgcttctctgtttaatgaattactaaaatatacaaacacgtcactgtctggcaataaatgatatcttagaatattgtaacaatttattttgtattgcacatgttcgtgatctatgagttcttcttcgaatggcataggatctccgaatctgaaaacgtataaataggagttagaataataatatttgagagtattggtaatatataaactctttagcggtataattagtttttttctctcaatttctatttttagatgtgatggaaaaatgactaattttgtagcattagtatcatgaactctaattaaaatcttaatatcttcgtcacacgttagctctttgaagtttttaagagatgcatcagttggttctacagatggagtaggtgcaacaattttttgttctacacatgtatgtactggagccattgttttaactataatggtgcttgtatcgaaaaactttaatgcagatagcggaagctcttcgccgcgactttctacgtcgtaattgggttctaacgccgatctctgaatggatactagttttctaagttctaatgtgattctctgaaaatgtaaatccaattcctccggcattatagatgtgtatacatcggtaaataaaactatagtatccaacgatcccttctcgcaaattctagtcttaaccaaaaaatcgtatataaccacggagatggcgtatttaagagtggattcttctaccgttttgttcttggatgtcatataggaaactataaagtccgcactactgttaagaatgattactaacgcaactatatagtttaaattaagcattttggaaacataaaataactctgtagacgatacttgactttcgaataagtttgcagacaaacgaagaaagaacagacctctcttaatttcagaagaaaactttttttcgtattcctgacgtctagagtttatatcaataagaaagttaagaattagtcggttaatgttgtatttcattacccaagtttgagatttcataatattatcaaaagacatgataatattaaagataaagcgctgactatgaacgaaatagctatatggttcgctcaagaatatagtcttgttaaacgtggaaacgataactgtatttttaatcacgtcagcggcatctaaattaaatataggtatatttattccacacactctacaatatgccacaccatcttcataataaataaattcgttagcaaaattattaattttagtgaaatagttagcgtcaactttcatagcttccttcaatctaatttgatgctcacacggtgcgaattccactctaacatcccttttccatgcctcaggttcatcgatctctataatatctagttttttgcgtttcacaaacacaggctcgtctctcgcgatgagatctgtatagtaactatgtaaatgataactagatagaaagatgtagctatatagatgacgatcctttaagagaggtataataactttaccccaatcagatagactgttgttatggtcttcggaaaaagaatttttataaatttttccagtattttccaaatatacgtacttaacatctaaaaaatccttaatgataataggaatggataatccgtctattttataaagaaatacatatcgcacattatacttttttttggaaatgggaataccgatgtgtctacataaatatgcaaagtctaaatattttttagagaatcttagttggtccaaattcttttccaagtacggtaatagatttttcatattgaacggtatcttcttaatctctggttctagttccgcattaaatgatgaaactaagtcactatttttataactaacgattacatcacctctaacatcatcatttaccagaatactgatcttcttttgtcgtaaatacatgtctaatgtgttaaaaaaaagatcatacaagttatacgtcatttcatctgtggtattcttgtcattgaaggataaactcgtactaatctcttctttaacagcctgttcaaatttatatcctatatacgaaaaaatagcaaccagtgtttgatcatccgcgtcaatattctgttctatcgtagtgtataacaatcgtatatcttcttctgtgatagtcgatacgttataaaggttgataacgaaaatatttttatttcgtgaaataaagtcatcgtaggattttggacttatattcgcgtctagtagatatgcttttatttttggaatgatctcaattagaatagtctctttagagtccatttaaagttacaaacaactaggaaattggtttatgatgtataatttttttagtttttatagattctttattctatacttaaaaaatgaaaataaatacaaaggttcttgagggttgtgttaaattgaaagcgagaaataatcataaattatttcattatcgcgatatccgttaagtttgtatcgtaatggcgtggtcaattacgaataaagcggatactagtagcttcacaaagatggctgaaatcagagctcatctaaaaaatagcgctgaaaataaagataaaaacgaggatattttcccggaagatgtaataattccatctactaagcccaaaaccaaacgagccactactcctcgtaaaccagcggctactaaaagatcaaccaaaaaggaggaagtggaagaagaagtagttatagaggaatatcatcaaacaactgaaaaaaattctccatctcctggagtcagcgacattgtagaaagcgtggccgctgtagagctcgatgatagcgacggggatgatgaacctatggtacaagttgaagctggtaaagtaaatcatagtgctagaagcgatctctctgacctaaaggtggctaccgacaatatcgttaaagatcttaagaaaattattactagaatctctgcagtatcgacggttctagaggatgttcaagcagctggtatctctagacaatttacttctatgactaaagctattacaacactatctgatctagtcaccgagggaaaatctaaagttgttcgtaaaaaagttaaaacttgtaagaagtaaatgcgtgcacttttttataaagatggtaaactctttaccgataataattttttaaatcctgtatcagacgataatccagcgtatgaggttttgcaacatgttaaaattcctactcatttaacagatgtagtagtatatgaacaaacgtgggaggaggcgttaactagattaatttttgtgggaagcgattcaaaaggacgtagacaatacttttacggaaaaatgcatgtacagaatcgcaacgctaaaagagatcgtatttttgttagagtatataacgttatgaaacgaattaattgttttataaacaaaaatataaagaaatcgtccacagattccaattatcagttggcggtttttatgttaatggaaactatgttttttattagatttggtaaaatgaaatatcttaaggagaatgaaacagtagggttattaacactaaaaaataaacacatagaaataagtcccgatgaaatagttatcaagtttgtaggaaaggacaaagtttcacatgaatttgttgttcataagtctaatagactatataaaccgctattgaaactgacggatgattctagtcccgaagaatttctgttcaacaaactaagtgaacgaaaggtatacgaatgtatcaaacagtttggtattagaatcaaggatctccgaacgtatggagtcaattatacgtttttatataatttttggacaaatgtaaagtccatatctcctcttccgtcaccaaaaaagttaatagcgttaactatcaaacaaactgctgaagtggtaggtcatactccatcaatttcaaaaagagcttatatggcaacgactattttagaaatggtaaaggataaaaattttttagatgtagtatctaaaactacgttcgatgaattcctatctatagtcgtagatcacgttaaatcatctacggatggatgatatagatctttacacaaataattacaagaccgataaatggaaatggataagcgtatgaaatctctcgcaatgacagctttcttcggagagctaaacacattagatattatggcattgataatgtctatatttaaacgccatccaaacaataccattttttcagtggataaggatggtcagtttatgattgatttcgaatacgataattataaggcttctcaatatttggatctgaccctcactccgatatttggagatgaatgcaagactcacgcatcgagtatagccgaacaattggcgtgtgcggatattattaaagaggatattagcgaatatatcaaaactactccccgtcttaaacgatttataaaaaaataccgcaatagatcagatactcgcatcagtcgagatacagaaaagcttaaaatagctctagctaaaggcatagattacgaatatataaaagacgcttgttaataagtaaatgaaaaaaaactagtcgtttataataaaacacgatatggatgccaacgtagtatcatcttctactattgcgacgtatatagacgctttagcgaagaatgcttcagaattagaacagaggtctaccgcatacgaaataaataatgaattggaactagtatttattaagccgccattgattactttgacaaatgtagtgaatatctctacgattcaggaatcgtttattcgatttaccgttactaataaggaaggtgttaaaattagaactaagattccattatctaaggtacatggtctagatgtaaaaaatgtacagttagtagatgctatagataacatagtttgggaaaagaaatcattagtgacggaaaatcgtcttcacaaagaatgcttgttgagactatcgacagaggaacgtcatatatttttggattacaagaaatatggatcctctatccgactagaattagtcaatcttattcaagcaaaaacaaaaaactttacgatagactttaagctaaaatattttctaggatccggtgcccaatctaaaagttctttattacacgctattaatcatccaaagtcaaggcctaatacatctctggaaatagaattcacacctagagacaatgaaacagttccatatgatgaactaataaaggaattgacgactctatcacgtcatatatttatggcttctccagagaatgtaattctttctccgcctattaacgcgcctataaaaacctttatgttgcctaaacaagatatagtaggtttggatctggaaaatctatatgccgtaactaagactgacggcattcctataactatcagagttacatcaaacgggttgtattgttattttacacatcttggttatattattagatatcctgttaagagaataatagattccgaagtagtagtctttggtgaggcagttaaggataagaactggaccgtatatctcattaagctaatagagcccgtgaatgctatcagtgatagactagaagaaagtaagtatgttgaatctaaactagtggatatttgtgatcggatagtattcaagtcaaagaaatacgaaggtccgtttactacaactagtgaagtcgtcgatatgttatctacatatttaccaaagcaaccagaaggtgttattctgttctattcaaagggacctaaatctaacattgattttaaaattaaaaaggaaaatactatagaccaaactgcaaatgtagtatttaggtacatgtccagtgaaccaattatctttggagaatcgtctatctttgtagagtataagaaatttagcaacgataaaggctttcctaaagaatatggttctggtaagattgtgttatataacggcgttaattatctaaataatatctattgtttggaatatattaatacacataatgaagtgggtattaagtccgtggttgtacctattaagtttatagcagaattcttagttaatggagaaatacttaaacctagaattgataaaaccatgaaatatattaactcagaagattattatggaaatcaacataatatcatagtcgaacatttaagagatcaaagcatcaaaataggagatatctttaacgaggataaactatcggatgtgggacatcaatacgccaataatgataaatttagattaaatccagaagttagttattttacgaataaacgaactagaggaccgttgggaattttatcaaactacgtcaagactcttcttatttctatgtattgttccaaaacatttttagacgattccaacaaacgaaaggtattggcgattgattttggaaacggtgctgacctggaaaaatacttttatggagagattgcgttattggtagcgacggatccggatgctgatgctatagctagaggaaatgaaagatacaacaaattaaactctggaattaaaaccaagtactacaaatttgactacattcaggaaactattcgatccgatacatttgtctctagtgtcagagaagtattctattttggaaagtttaatatcatcgactggcagtttgctatccattattcttttcatccgagacattatgctaccgtcatgaataacttatccgaactaactgcttctggaggcaaggtattaatcactaccatggacggagacaaattatcaaaattaacagataaaaagacttttataattcataagaatttacctagtagcgaaaactatatgtctgtagaaaaaatagctgatgatagaatagtggtatataatccatcaacaatgtctactccaatgactgaatacattatcaaaaagaacgatatagtcagagtgtttaacgaatacggatttgttcttgtagataacgttgatttcgctacaattatagaacgaagtaaaaagtttattaatggcgcatctacaatggaagatagaccgtctacaaaaaactttttcgaactaaatagaggagccattaaatgtgaaggtttagatgtcgaagacttacttagttactatgttgtttatgtcttttctaagcggtaaataataatatggtatgggttctgatatccccgttctaaatgcattaaataattccaatagagcgatttttgttcctataggaccttccaactgtggatactctgtattgttaatagatatattaatacttttgtcgggtaacagaggttctacgtcttctaaaaataaaagttttataacatctggcctgttcataaataaaaacttggcgattctatatatactcttattatcaaatctagccattgtcttatagatgtgagctactgtaggtgtaccatttgattttctttctaatactatatatttctctcgaagaagttcttgcacatcatctgggaataaaatactactgttgagtaaatcagttattttttttatatcgatattgatggacatttttatagttaaggataataagtatcccaaagtcgataacgacgataacgaagtatttatacttttaggaaatcacaatgactttatcagattaaaattaacaaaattaaaggagcatgtatttttttctgaatatattgtgactccagatacatatggatctttatgcgtcgaattaaatgggtctagttttcagcacggcggtagatatatagaggtggaggaatttatagatgctggaagacaagttagatggtgttctacatccaatcatatatctgaagatatacccgaagatatacacactgataaatttgtcatttatgatatatacacttttgattcgttcaagaataaacgattggtatttgtacaggtacctccgtcgttaggagatgatagtcatttgactaatccgttattgtctccgtattatcgtaattcagtagccagacaaatggtcaatgatatgatttttaatcaagattcatttttaaaatatttattagaacatctgattagaagccactatagagtttctaaacatataacaatagttagatacaaggataccgaagaattaaatctaacgagaatatgttataatagagataagtttaaggcgtttgtattcgcttggtttaacggcgtttcggaaaatgaaaaggtactagatacgtataaaaaggtatctaatttgatataatgaattcagtgactgtatcacacgcgccatatactattacttatcacgatgattgggaaccagtaatgagtcaattggtagagttttataacgaagtagccagttggctgctacgagacgagacgtcgcctattcctgataagttctttatacagttgaaacaaccgcttagaaataaacgagtatgtgtgtgcggtatagatccgtatccgaaagatggaactggtgtaccgttcgaatcaccaaattttacaaaaaaatcaattaaggagatagcttcatctatatctagattaaccggagtaattgattataaaggttataaccttaatataatagacggggttataccctggaattattacttaagttgtaaattaggagaaacaaaaagtcacgcgatctactgggataagatttccaagttactgctgcagcatataactaaacacgttagtgttctttattgtttgggtaaaacagatttctcgaatatacgggcaaagttagaatccccggtaactaccatagtcggatatcatccagcggctagagaccgccaattcgagaaagatagatcatttgaaattatcaacgttttactggaattagacaacaaggcacctataaattgggctcaagggtttatttattaatgctttagtgaaattttaacttgtgttctaaatggatgcggctattagaggtaatgatgttatctttgttcttaagactataggtgtcccgtcagcgtgcagacaaaatgaagatccaagatttgtagaagcatttaaatgcgacgagttagaaagatatattgagaataatccagaatgtacactattcgaaagtcttagggatgaggaagcatactctatagtcagaattttcatggatgtagatttagacgcgtatctagacgaaatagattatttaacggctattcaagattttattatcgaggtgtcaaactgtgtagctagattcgcgtttacagaatgcggcgccattcatgaaaatgtaataaaatccatgagatctaatttttcattgactaagtctacaaatagagataaaacaagttttcatattatctttttagacacgtataccactatggatacattgatagctatgaaacgaacactattagaattaagtagatcatctgaaaatccactaaccagatcgatagacactgccgtatataggagaaaaacaactcttcgggttgtaggtactaggaaaaatccaaattgcgacactattcatgtaatgcaaccaccgcatgataatatagaagattacctattcacttacgtggatatgaacaacaatagttattacttttctctacaacaacgattggaggatttagttcctgataagttatgggaaccagggtttatttcattcgaagacgctataaaaagagtttcaaaaatattcattaattctataataaactttaatgatctcgatgaaaataattttacaacggtaccactggtcatagattacgtaacaccttgtgcattatgtaaaaaacgatcgcataaacatccgcatcaactatcgttggaaaatggtgctattagaatttacaaaactggtaatccacatagttgtaaagttaaaattgttccgttggatggtaataaactgtttaatattgcacaaagaattttagacactaactctgttttattaaccgaacgaggagaccatatagtttggattaataattcatggaaatttaacagcgaagaacccttgataacaaaactaattttgtcaataagacatcaactacctaaggaatattcaagcgaattactctgtccgaggaaacgaaagactgtagaagctaacatacgagacatgttagtagattcagtggagaccgatacctatccggataaacttccgtttaaaaatggtgtattggacctggtagacggaatgttttactctggagatgatgctaaaaaatatacgtgtactgtatcaaccggatttaaatttgacgatacaaagttcgtcgaagacagtccagaaatggaagagttaatgaatatcattaacgatatccaaccattaacggatgaaaataagaaaaatagagagctatatgaaaaaacattatctagttgtttatgcggtgctaccaaaggatgtttaacattcttttttggagaaactgcaactggaaagtcgacaaccaaacgtttgttaaagtctgctatcggtgacctgtttgttgagacgggtcaaacaattttaacagatgtattggataaaggacctaatccatttatcgctaacatgcatttgaaaagatctgtattctgtagcgaactacctgattttgcatgtagtgggtcaaagaaaatcagatctgataatattaaaaagttgacagaaccttgtgtcattggaagaccgtgtttctccaataaaattaataatagaaaccatgcgacaatcattatcgatactaattacaaacctgtttttgataggatagataacgcattaatgagaagaattgccgtcgtgcgattcagaacacacttttctcaaccttctggtagagaggctgctgaaaataatgacgcgtacgataaagtcaaactattagacgaggggttagatggtaaaatacaaaataatagatatagattcgcatttctatacttgttggtgaaatggtacagaaaatatcatgttcctattatgaaactatatcctacacccgaagagattcctgactttgcattctatctcaaaataggtactctgttggtatctagctctgtaaagcatattccattaatgacggacctctccaaaaagggatatatattgtacgataatgtggtcactcttccgttgactactttccaacagaaaatatccaagtattttaattctagactatttggacacgatatagagagcttcatcaatagacataagaaatttgccaatgttagtgatgaatatctgcaatatatattcatagaggatatttcatctccgtaaatatatgctcatatatttatagaagatatcacatatctaaatgaataccggaatcatagatttatttgataatcatgttgatagtataccaactatattacctcatcagttagctactctagattatctagttagaactatcatagatgagaacagaagcgtgttattgttccatattatgggatcaggtaaaacaataatcgctttgttgttcgccttggtagcttccagatttaaaaaggtttacattctagtgccgaacatcaacatcttaaaaattttcaattataatatgggtgtagctatgaacttgtttaatgacgaattcatagctgagaatatctttattcattccacaacaagtttttattctcttaattataacgataacgtcattaattataacggattatctcgctacaataactctatttttatcgttgatgaggcacataatatctttgggaataatactggagaacttatgaccgtgataaaaaataaaaacaagattccttttttactattgtctggatctcccattactaacacacctaatactctgggtcatattatagatttaatgtccgaagagacgatagattttggtgaaattattagtcgtggtaagaaagtaattcagacacttcttaacgaacgcggtgtgaatgtacttaaggatttgcttaaaggaagaatatcatattacgaaatgcctgataaagatctaccaacgataagatatcacggacgtaagtttctagatactagagtagtatattgtcacatgtctaaacttcaagagagagattatatgattactagacgacagctatgttatcatgaaatgtttgataaaaatatgtataacgtgtcaatggcagtattgggacaacttaatctgatgaataatttagatactttatttcaggaacaggataaggaattgtacccaaatctgaaaataaataatggcgtgttatacggagaagaattggtaacgttaaacattagttccaaatttaaatactttattaatcggatacagacactcaacggaaaacattttatatacttttctaattctacatatggcggattggtaattaaatatatcatgctcagtaatggatattctgaatataatggttctcagggaactaatccacatatgataaacggcaaaccaaaaacatttgctatcgttactagtaaaatgaaatcgtctttagaggatctattagatgtgtataattctcctgaaaacgatgatggtagtcaattgatgtttttgttttcatcaaacattatgtccgaatcctatactctaaaagaggtaaggcatatttggtttatgactatcccagatactttttctcaatacaaccaaattcttggacgatctattagaaaattctcttacgccgatatttctgaaccagttaatgtatatcttttagccgccgtatattccgatttcaatgacgaagtgacgtcattaaacgattacacacaggatgaattaattaatgttttaccatttgacatcaaaaagctgttgtatctaaaatttaagacgaaagaaacgaatagaatatactctattcttcaagagatgtctgaaacgtattctcttccaccacatccatcaattgtaaaagttttattgggagaattggtcagacaatttttttataataattctcgtattaagtataacgataccaagttacttaaaatggttacatcagttataaaaaataaagaagacgctaggaattacatagatgatattgtaaacggtcacttctttgtatcgaataaagtatttgataaatctcttttatacaaatacgaaaacgatattattacagtaccgtttagactttcctacgaaccatttgtttggggagttaactttcgtaaagaatataacgtggtatcttctccataaaactgatgagatatataaagaaataaatgtcgagctttgttaccaatggatacctttccgttacattggaaccacacgagctgacgttagacataaaaactaatattaggaatgccgtatataagacgtatctccatagagaaattagtggtaaaatggccaagaaaatagaaattcgtgaagacgtggaattacctctcggcgaaatagttaataattctgtagttataaacgttccgtgtgtaataacctacgcgtattatcacgttggggatatagtcagaggaacattaaacatcgaagatgaatcaaatgtaactattcaatgtggagatttaatctgtaaactaagtagagattcgggtactgtatcatttagcgattcaaagtactgcttttttcgaaatggtaatgcgtatgacaatggcagcgaagtcactgccgttctaatggaggctcaacaaggtatcgaatctagttttgtttttctcgcgaatatcgtcgactcataaaaaagagaatagcggtaagtataaacacgaatactatggcaataattgcgaatgttttattctcttcgatatatttttgataatatgaaaaacatgtctctctcaaatcggacaaccatctcataaaatagttctcgcgcgctggagaggtagttgccgctcgtataatctctccagaataatatacttgcgtgtcgtcgttcaatttatacggatttctatagttctctgttatataatgcggtttgccctcatgattagacgacgacaatagtgttctaaatttagatagttgatcagaatgaatgtttattggcgttggaaaaattatccatacagcgtctgcagagtggttgatagttgttcctagatatgtaaaataatccaacttactaggcagcaaattgtctagataaaatactgaatcaaacggtgcagacgtattggcggatctaatggaatccaattgattaactatcttttgaaaatatacatttttatgatccaatacttgtaagaatatagaaataatgataagtccatcatcgtgtttttttgcctcttcataagaactatattttttcttattccaatgaacaagattaatctctccagagtatttgtacacatctatcaagtgattggatccataatcgtcttcctttccccaatatatatgtagtgatgataacacatattcattggggagaaaccctccacttatatatcctcctttaaaattaatccttactagttttccagtgttctggatagtggttggtttcgactcattataatgtatgtctaacggcttcaatcgcgcgttagaaattgcttttttagtttctatattaataggagatagttgttgcggcatagtaaaaatgaaatgataactgtttaaaaatagctcttagtatgggaattacaatggatgaggaagtgatatttgaaactcctagagaattaatatctattaaacgaataaaagatattccaagatcaaaagacacgcatgtgtttgctgcgtgtataacaagtgacggatatccgttaataggagctagaagaacttcattcgcgttccaggcgatattatctcaacaaaattcagattctatctttagagtatccactaaactattacggtttatgtactacaatgaactaagagaaatctttagacggttgagaaaaggttctatcaacaatatcgatcctcactttgaagagttaatattattgggtggtaaactagataaaaaggaatctattaaagattgtttaagaagagaattaaaagaggaaagtgatgaacgtataacagtaaaagaatttggaaatgtaattctaaaacttacaacacgggataaattatttaataaagtatatataagttattgcatggcgtgttttattaatcaatcgttggaggatttatcgcatactagtatttacaatgtagaaattagaaagattaaatcattaaatgattgtattaacgacgataaatacgaatatctgtcttatatttataatatgctagttaatagtaaatgaacttttacagatctagtataattagtcagattattaagtataatagacgactagctaagtctattatttgcgaggatgactctcaaattattacactcacggcattcgttaaccaatgcctatggtgtcataaacgagtatccgtgtccgctattttattaactactgataacaaaatattagtatgtaacagacgagatagttttctctattctgaaataattagaactagaaacatgtttagaaagaaacgattatttctgaattattccaattatttgaacaaacaggaaagaagtatactatcgtcatttttttctctagatccagctactactgataatgatagaatagacgctatttatccgggtggcatacccaaaaggggtgagaatgttccagagtgtttatccagggaaattaaagaagaagttaatatagacaattcttttgtattcatagacactcggttttttattcatggcatcatagaagataccattattaataaattttttgaggtaatcttctttgtcggaagaatatctctaacgagtgatcaaatcattgatacatttaaaagtaatcatgaaatcaaggatctaatatttttagatccgaattcaggtaatggactccaatacgaaattgcaaaatatgctctagatactgcaaaacttaaatgttacggccatagaggatgttattatgaatcattaaaaaaattaactgaggatgattgattaaaaaatataaattaatttaccatcgtgtatttttataacgggattgtccggcatatcatgtagatagttaccgtctacatcgtatactcgaccatctacgcctttaaatcctctatttattgacattaatctattagaattggaataccaaatattagtaccctcaattagtttattggtaatattttttttagacgatagatcgatggctcttgaaaccaaggttttccaaccggactcattgtcgatcggtgagaagtctttttcattagcatgaatccattctaatgatgtatgtttaaacactctaaacaattggacaaattcttttgatttgctttgaatgatttcaaataggtcttcgtctacagtaggcataccattagataatctagccattataaagtgcacgtttacatatctacgttctggaggagtaagaacgtgactattgagacgaatggctcttcctactatctgacgaagagacgcctcgttccatgtcatatctaaaatgaagatatcattaattgagaaaaaactaataccctcgcctccactagaagagaatacgcatgttttaatgcattctccgttagtgtttgattcttggttaaactcagccaccgccttgattctagtatcttttgttctagatgagaactctatattagagataccaaagactttgaaatatagtaataagatttctattcctgactgattaacaaatggttcaaagactagacatttaccatgggatgctaatattcccaaacatacatctataaatttgacgcttttctcttttaattcagtaaatagagagatatcagccgcactagcatcccctttcaatagttctccctttttaaaggtatctaatgcggatttagaaaactctctatctcttaatgaatttttaaaatcattatatagtgttgctatctcttgcgcgtattcgcccggatcacgattttgtctttcaggaaagctatcgaacgtaaacgtagtagccatacgtctcagaattctaaatgatgatatacctgtttttatttcagcgagtttagccttttgataaatttcttcttgctttttcgacatattaacgtatcgcattaatactgttttcttagcgaatgatgcagacccttctacgtcatcaaaaatagaaaactcgttattaactatatacgaacatagtcctcctagtttggagactaattctttttcatcgactagacgtttattctcaaatagtgattggtgttgtaaggatcctggtcgtagtaagttaaccaacatggtgaattcttgcacactattgacgataggtgtagccgataaacaaatcatcttatggttttttaacgcaatggtcttagataaaaaattatatactgaacgagtaggacggatcttaccatcttctttgattaatgatttagaaatgaagttatgacattcatcaatgatgacgcatattctactcttggaattaatagttttgatattagtaaaaaatttatttctaaaattttgatcatcgtaattaataaaaatacaatccttcgttatctctggagcgtatctgagtatagtgttcatccaaggatcttctatcaaagcctttttcaccaataagataatagcccaattcgtataaatatccttaagatgtttgagaatatatacagtagtcattgttttaccgacacccgtttcatggaacaataaaagagaatgcatactgtctaatcctaagaaaactcttgctacaaaatgttgataatccttgaggcgtactacgtccgaccccatcatttcaacgggcatattagtagttctgcgtaaggcataatcgatataggccgcgtgtgatttactcatttatgagtgataagtaataactatgttttaaaaatcacagcagtagtttaactagtcttctctgatgtttgttttcgatactttttgaatcagaagtcatactagaataaagcaacgagtgaacgtaatagagagcttcgtatactctattcgaaaactctaagaacttattaatgaattccgtatccactggattgtttaaaatactaaattgaacactgttcacatccttccaagaagaagacttagtgacggacttaacatgagacataaataaatccaaattttttttacaaacatcactagccaccataatggcgctatctttcaaccagctatcgcttacgcattttagcagtctaacatttttaaagagactacaatatattctcatagtatcgattacacctctaccgaataaagttggaagtttaataatacaatatttttcgtttacaaaatcaaataatggtcgaaacacgtcgaaggttaacatcttataatcgctaatgtatagattgttttcagtgagatgattattagatttaatagcatctcgttcacgtttgaacagtttattgcgtgcgctgaggtcggcaactacggcgtccgctttagtactcctcccataatactttacgctattaatctttaaaatttcatagactttatctagatcgctttctggtaacatgatatcatgtgtaaaaagttttaacatgtcggtcggcattctatttagatcattaactctagaaatctgaagaaagtaattagctccgtattccagactaggtaatgggcttttacctagagacagattaagttctggcaatgtttcataaaatggaagaaggacatgcgttccctcccggatattttttacaatttcatccatttacaactctatagtttgttttcattattattagttattatctcccataatcttggtaatacttaccccttgatcgtaagataccttatacaggtcattacatacaactaccaattgtttttgtacataatagattggatggttgacatccatggtggaataaactactcgaacagatagtttatctttccccctagatacattagccgtaatagttgtcggcctaaagaatatctttggtgtaaagttaaaagttagggttcttgttccattattgctttttgtcagtagttcattataaattctcgagatgggtccgttctctgaatatagaacatcatttccaaatctaacttctagtctagaaataatatcggtcttattcttaaaatctattcccttgatgaagggatcgttaatgaacaaatccttggcctttgattcggctgatctattatctccgttatagacgttacgttgactagtccaaagacttacaggaatagatgtatcgatgatgttgatactatgtgatatgtgagcaaagattgttctcttagtggcatcactatatgttccagtaatggcggaaaactttttagaaatgttatatataaaagaattttttcgtgttccaaacattagcagattagtatgaagataaacactcatattatcaggaacattatcaatttttacatacacatcagcatcttgaatagaaacgataccatcttctggaacctctacgatctcggcagactccggataaccagtcggtggaccatcgctaacaataactagatcatccaacaatctactcacatatgcatctatataatctttttcatcttgtgagtaccctggatacgaaataaatttattatccgtatttccataataaggtttagtataaacagagagcgatgttgccgcatgaacttcagttacagtcgccgttggttggtttatttgacctattactctcctaggtttctctataaacgatggtttaatttgtacattcttaaccatatatccaataaagctcaattcaggaacataaacaaattctttgttgaacgtttcaaagtcgaacgaagagtcacgaataacgatatcggatactggattgaaggtcaccgttacggtaatttttgaatcggatagtttaagactgctgaatgtatcttccacatcaaacggagttttaatataaacgtatactgtagatggttctttaatagtgtcattaggagttaggccaatagaaatatcattaagttcactagaatatccagagtgtttcaaagcaattgtattattgatacaattattatataattcttcgccctcaatttcccaaataacaccgttacacgaagagatagatacgtgattaatacatttatatccaacatatggtacgtaactgaatcttcccatacctttaacttctggaagttccaaactcagaaccaaatgattaagcgcagtaatatactgatccctaatttcgaagctagcgatagcctgattgtctggaccatcgtttgtcataactccggatagagaaatatattgcggcatatataaagttggaatttgactatcgactgcgaagacattagaccgtttaatagagtcatccccaccgatcaaagaattaatgatagtattattcattttctatttaaaatggaaaaagcttacaataaactccgtagagaaatatctataatttgtgagttttccttaaagtaacagcttccgtaaacgccgtctttatctcttagtaggtttattgtatttatgaccttttccttatcttcatagaatactaaaggcaacaaagaaatttttggttcttctctaagagctacgtgagacttaaccatagaagccaacgaatccctacatattttagaacagaaatacccaacttcaccacccttgtatgtctcaatactaataggtctaaaaaccaaatcttgattacaaaaccaacacttatcaattacactatttgtcttaatagacacatctgccatagatttataatactttggtagtatacaagcgagtgcttcttctttagcgggcttaaagactgctttaggtgctgaaataaccacatctggaaggcttactcgcttagccatttaattacggaactatttttttatacttctaatgagcaagtagaaaacctctcatctacaaaaacgtactcgtgtccataatcctctaccatagttacacgttttttagatctcatatgtgctaaaaagttttcccatactaattggttactattatttttcgtataatttttaacagtttgaggttttagatttttagttacagaagtgatatcgaatattttatccaaaaagaatgaataattaattgtcttagaaggagtgttttcttggcaaaagaataccaagtgcttaaatatttctactacttcattaatcttttctgtactcagattcagtttctcatcttttacttgattgattatttcaaagactaacttataatcctttttatttattctctcgttagccttaagaaaactagatacaaaatttgcatctacatcatccgtggatatttgatttttttccatgatatccaagagttccgagataatttctccagaacattgatgagacaataatctccgcaatacatttctcaaatgaataagtttattagacacgtggaagtttgactttttttgtacctttgtacatttttgaaataccgactcgcaaaaaatacaatattcatatccttgttcagatactataccgttatgtctacaaccgctacataatcgtagattcatgttaacactctacgtatctcgtcgtccaatattttatataaaaacattttatttctagacgttgccagaaaatcctgtaatatttttagttttttgggctgtgaataaagtatcgccctaatattgttaccgtcttccgccaatatagtagttaaattatccgcacatgcagaagaacaccgcttaggcggattcagtacaatgttatatttttcgtaccaactcatttaaatatcataatctaaaatagttctgtaatatgtctagcgctaatatattgatcataatcctgtgcataaattaagatacaacaatgtctcgaaatcatcgacatggcttcttccatagttagaagatcgtcgtcaaagttagcaacgtgattcatcaacatttgctgttttgaggcagcaaatactgaaccgtcgccattcaaccattcataaaaaccatcgtctgaatccattgataatttcttgtactggtttttgagagctcgcatcaatctagcatttctagctcccggattgaaaacagaaagaggatcgtacatccagggtccattttctgtaaatagaatcgtataatgtcccttcaagaagatatcagacgatccacaatcaaagaattggtctccgagtttgtaacaaactgcggactttaacctatacatgataccgtttagcataatttctggtgatacgtcaatcggagtatcatctattagagatctaaagccggtgtaacattctccaccaaacatattcttattctgacgtcgttctacataaaacatcattgctccattaacgataacaggggaatgaacagcactacccatcacattagttcccaatggatcaatgtgtgtaactccagaacatcttccatagcctatgttaggaggagcgaacaccactcttccactattgccatcgaatgccatagaataaatatccttggaattgatagaaatcggactgtcggatgttgtgatcatcttcataggattaacaactatgtatggtgccgcctgaagtttcatatcgtaactgatgccgtttataggtctagccacagaaaccaacgtaggtctaaatccaactatagacaaaatagaagccaatatctgttcctcatctgtcataacttgagagcatccagtatgaataatcttcattagatggggatctaccgcatcatcatcgttacaataaaaaattcccattctaatgttcataattgcttttctaatcatggtatgcatgtttgctctctgaatctctgtggaaattagatctgatacacctgtaatcactatcggattatcctccgtaagacgattaaccaacaacatataattataagactttacttttctaaattcataaagttgctggattaggctataggtgtctccatgtacatacgcgttctcgagcgcaggaagtttaataccgaatagtgccatcagaataggatgaatatagtaattagtttctggttttctataaataaaagacaaatcttgtgaactagacatatcggtaaaatgcatggattggaatcgtgtagtcgacagaagaatatgatgattagatggagagtatattttatctaactctttgagttggtcaccgattctaggactagctcgagaatgaataagtactaaaggatgagtacatttcacagaaacactagcattgttcaatgtgctctttacatgggtaaggagttgaaatagctcgtttctatttgttctgacaatatttagtttattcataatgttaagcatatcctgaatagtaaagttagatgtgtcatacttgttagtagttagatatttagcaattgcattcccatcatttctcaatctcgtactccaatcatgtgtagatgctacttcgtcgatggaaaccatacaatcctttttgataggctgttgagattgatcatttcctgcacgtttaggtttggtacgttgatttctagcccctgcggatataaagtcatcgtctacaatttgggacaatgaattgcatacactacaagacaaagatttatcagaagtgtgaatatgatcttcatctaccaaagaaagagtttgattagtataactagattttagtcctgcgttagatgttaaaaaaacatcgctattgaccacggcttccattatttatattcgtagtttttactcgaaagcgtgattttaatatccaatcttattacttttggaatcgttcaaaacctttgactagttgtagaatttgatctattgccctacgcgtatactcccttgcatcatatacgttcgtcaccagatcgtttgtttcggcctgaagttggtgcatatctctttcaacattcgacatgagatccttaagggccatatcgtctagattttgttgagatgctgctcctggatttggattttgttgtgctgttgtacatactgtaccaccagtaggtgtaggagtacatacagtggccacaataggaggttgagaaagtgtaaccgttggagtagtacaagaaatacttccatccgattgttgtgtacatgtagttgttggtaacgtctgagaaggttgggtagatggcggcgtcgtcgttttttgatctttattaaatttagagataatatcctgaacagcattgctcggcgtcaacgctggaaggagtgaactcgccggcgcatcagtatcttcagacagccaatcaaaaagattagacatatcagatgatgtattagtttgttgtcgtggttttggtgtaggagcagtactactaggtagaagaataggagccgatgtagctgttggaaccggctgtggagttatatgaatagttggttgtagcggttggataggctgtctgctggcggccatcatattatctctagctagttgttctcgcaactgtctttgataatacgactcttgagactttagtcctatttcaatcgcttcatcctttttcgtatccggatccttttcttcagaataatagattgacgactttggtgtagaggattctgccagcctctgtgagaacttgttaaagaagtccatttaaggctttaaaattgaattgcgattataagattaaatggcagacacagacgatattatcgactatgaatccgatgatctcaccgaatacgaggatgatgaagaagaggaagaagatggagagtcactagaaactagtgatatagatcccaaatcttcttataagattgtagaatcagcatccactcatatagaagatgcgcattccaatcttaaacatatagggaatcatatatctgctcttaaacgacgctatactagacgtataagtctatttgaaatagcgggtataatagcagaaagctataacttgcttcaacgaggaagattacctctagtttcagaattttctgacgaaacgatgaagcaaaatatgctacatgtaattatacaagagatagaggagggttcttgtcctatagtcatcgaaaagaacggagaattgttgtcggtaaacgattttgacaaagatggtctaaaattccatctagactatattatcaaaatttggaaacttcaaaaacgatattagaatttatacgaatatcgttctctaaatgtcacaatcaagtctcgcatgttcagcaatttattgtcgtactttatatcgtgttcattaacgatatcttgcaaaatagtaatgattctatcttccttcgatagatattcttcagagattattgtcttatattctttcttgttatcagatatgaatttgataagactttgaacattattgatacccgtctgtttaattttttctacagatattttagttttggcagattctatcgtatctgtcaatagacatccaacatcgacattcgacgtcaattgtctataaatcaacgtataaattttagaaataacattagcgaattgttgtgcgttgatgtcgttattctgaaacagtatgattttaggtagcattttcttaacaaagagaacgtatttattgttactcagttgaacagatgatatatccagattactaacgcatctgattccgtataccaaactttcagaagaaatggtatacaattgtttgtattcattcaatgtctctttttcagaaattagtttagagtcgaatactgcaataattttcaagagatagttttcatcagataagattttatttagtgtagatatgataaaactattgttttgttggagaacttgatacgccgcgttctctgtagtcgacgctctcaaatgggaaacaatctccattatttttttggaatcggatactatatcttcggtatcttgacgcagtctagtatacatagagttaagagagattagagtttgtacattaagcaacatgtctctaaatgtggctacaaacttttcctttttcacatcatctagtttattatataccgatttcacaacggcaccagatttaaggaaccagaatgaaaaactctgataactacaatatttcatcatagttacgattttatcatcttctatagttggtgtaatagcgcatacctttttctccaagactggaaccaacgtcataaaaatgtttaaatcaaaatccatatcaacatctgatgcgctaagaccagtctcgcgttcaagattatctttactaatggtgacgaactcatcgtataaaactctaagtttgtccattatttatttacagatttagttgtttaatttatttgtgctcttccagagttgggatagtatttttctaacgtcggtattatattattaggatctacgttcatatgtatcataatattaatcatccacgttttgataaatctatctttagcttctgaaataacgtatttaaacaaaggagaaaaatatttagctacggcatcagacgcaataacattttttgtaaatgtaacgtatttagacgacagatcttcgttaaaaagttttccatctatgtagaatccatcggttgttaacaccattcccgcgtcagattgaataggagtttgaatagtttgttttggaaatagatccttcaataacttatagttgggtgggaaaaaatcgattttatcactagactctttcttttttactatcattacctcatgaactatttcttgaatgagtatatgtattttctttcctatatcggacgcgttcattggaaaatataccatgtcgttaactataagaatatttttatcctcgtttacaaactgaataatatcagatgtagttcgtaaacgaactatatcatcaccagcacaacatctaactatatgatatccactagtttcctttagccgtttattatcttgttccatattagcagtcattccatcatttaagaaggcgtcaaagataatagggagaaatgacattttggattctgttacgactttaccaaaattaaggatatacggacttactatctttttctcaacgtcaatttgatgaacacacgatgaaaatgtgcttctatgagattgatcatgtagaaaacaacaagggatacaatatttccgcatatcatgaaatatattaagaaatcccaccttattatatttccccaaaggatccatgcacgtaaacattatgccgttatcattaataaagacttctttctcatcggatctgtaaaagttgttactgatttttttcattccaggatctagataattaataatgatgggttttctattcttattctttgtattttggcatatcctagaccagtaaacagtttccactttggtaaaatcagcagacttttgaacgctattaaacatggcattaatggcaataactaaaaatgtaaaatatttttctatgttaggaatatggtttttcactttaatagatatatggtttttggccaaaatgatagatatttttttatccgaggatagtaaaatattattagtcgccgtctctataaaaatgaagctagtctcgatatccaattttattctagaattgataggagtcgccaaatgtaccttatacgttatatctcccttgatgcgttccatttgtgtatctatatcggacacaagatctgtaaatagttttacgttattaatcatcacggtatcgccgtcgctagataacgctaatgtaccatccaagtcccaaatggagagatttaactgttcatcgtttagaataaaatgattaccggtcatattaataaagtgttcatcgtatctagataacaacgacttataattaatgtccaagtcttgaactcgctgaatgatcttttttaacccagttagttttagattggtacgaaatatattgttaaactttgattctacagtaatgtccaaatctagttgtggaaatacttccatcaacattgtttcaaacttgataatattattatctacatcttcgtacgatccaaattccggaatagatgtatcgcacgctctggccacccagataaccaaaaagtcacacgctccaggatatacattgtataaaaagctatcgttttttagtagggtttttttctgcgtgtatacgaagggattaaaaatagtattatcaacgtaactatattccaaattattcttatgagaatagataataatatcgtccttaatatctaacaaatttcctaaatatccctttaattgagtcattcgaagcgtcaatagaatatgtctcttaactatttccggctgttgtatatttaaatgacttcgtaaaaaataatatatgggcgacttctcatctatgtaatcatatggagtgagatatagggctcgttctacctcctgccccttacccacctgtaataccaattgcggacttactatatatcgcatatttatatcgtggggtaaagtgaaaatctactaccgatgatgtaagtcttacaatgttcgaaccagtaccagatcttaatttggaggcctccgtagaactaggggaggtaaatatagatcaaacaacacctatgataaaggagaatagcggttttatatcccgcagtagacgtctattcgcccatagatctaaggatgatgagagaaaactagcactacgattctttttacaaagactttattttttagatcatagagagattcattatttgttcagatgcgttgacgctgtaaaagacgtcactattaccaaaaaaaataacattatcgtggcgccttatatagcacttttaactatcgcatcaaaaggatgcaaacttacagaaacaatgattgaagcattctttccagaactatataatgaacatagtaagaaatttaaattcaactctcaagtatccatcatccaagaaaaactcggataccagtttggaaactatcacgtttatgattttgaaccgtattactctacagtagctctggctattcgagatgaacattcatctggcatttttaatatccgtcaagagagttatctggtaagttcattatctgaaataacatatagattttatctaattaatctaaaatctgatcttgttcaatggagtgctagtacgggcgctgtaattaatcaaatggtaaatactgtattgattacagtgtatgaaaagttacaactggtcatagaaaatgattcacaatttacatgttcattggctgtggaatcaaaacttccaataaaattacttaaagatagaaatgaattatttacaaaattcattaacgagttaaaaaagaccagttcattcaagataagcaaacgcgataaggatacgctactaaaatattttacttaggactggagttagaatttatagacgactcatttcgtttatcattgttactattattactattactatcattattagtgttggcattattagtattcttcttgtcatcttgttcagaaatatacagcaatgctatacctaatactaaatacattatcatgctcgcaatggctctaacaacaacgaaccaaaatgaatttggtcgtagcttttgttcacaaaaatacataaagaaatgtctacataaatctatggcgccattggctacttgaaatagcgccagtcctcctacagattttaatatagctgtataacatgacatttattcatcatcaaaagagacagagtcaccatctgtcatatttagattttttttcatgtgttcaaagtatcctctactcatttcattataatagtttatcatacttagaattttaggacggatcaatgagtaagacttgactagatcgtcagtagtaatttgtgcatcgtctattctgcatccgcttcgtcgaataatgtatagcatcgctttgagattctccatagctatcaagtctttatacaatgacatggaaatatctgtgaatactttatacttctccaacatcgatgccttaacatcatcgcctactttagcattgaaaatacgttctattgtgtagatggatgtagcaagatttttaaacaacaatgccatcttacacgatgattgcctcaagtctccaatcgtttgtttagaacgattagctacagagtccaatgcttggctgactagcatattattatctttagaaattgtattcttcaatgaggcgtttatcatatctgtgatttcgttagtcatattacagtctgactgggttgtaatgttatccaacatatcacctatggatacggtacacgtaccagcatttgtaataatcctatctaagatgttgtatggcattgcgcagaaaatatcttctcctgtaatatctccactctcgataaatctactcagattattcttaaatgccttattctctggagaaaagatatcagtgtccatcatttcattaatagtatacgcagaaaagataccacgagtatcaattctatccaagatacttatcggttccgagtcacagataatggtttcctctccttcgggagatcctgcatagaaatatctaggacaatagtttctatactgtctgtaactctgataatctctaaagtcactaactgataccatgaaattgagaagatcaaacgctgaagtaattaatttttctgcctcgtttttactacaactagttttcatcaatgtagtgacgatgtattgtttagttacttttggtctaatactgatgatagagatattattgcttcccataatggatcttctagtagtcaccttaaagcccattgatgcgaatagcagatagataaagtcttggtatgactcctttctaatatagtacggactacctttgtcacccaactttatacccacataagccataacaacctctttaatagccgtttcatgaggtttatcagccatgagcctgagtagttggaagaatctcatgaatcccgtctcagaaagtcctatatgcatgatagatttatctttcctgggaaactctcgtatagtcatagatgaaatactctttaaagtttctgaaataagattagtaacagtcttacctccgactactctaggtaacaaacaaactctaataggtgttttctctgcggagataatatcagaaaggatagagcaataagtagtattattgtgattataaagaccgaatacataacaggtagaatttataaacatcatgtcctgaaggtttttagacttgtattcctcgtaatccataccgtcccaaaacatggatttggtaactttgatagccgtagatctttgttccttcgccaacaggttaaagaaattaataaagaatttgttgtttctatttatgtccacaaattgcacgtttggaagcgccacggttacattcactgcagcattttgaggatcgcgagtatgaagtacgatgttattgtttactggtatatctggaaagaaatctaccagtctaggaataagagattgatatcgcatagaaatagtaaagtttataatctcatcatcgaagagcattttgttaccattgtaataaatatccactctgtcatatgtataaatgaagtactgttcaaacatgatgagatgtttatatgttggcatagtagtgagatcgacgtttggtaatggcaatgtattaagattaactccataatgtctagcagcatctgcgatgttataagcgtcgtcaaagcggggtcgatcttgtattgttatatattgtctaacacctataagattatcaaaatcttgtctgcttaatacaccgttaacaatttttgccttgaattcttttattggtgcattaataacatccttatagaggatgttaaacaaataagtgttatcaaagttaagatctggatatttcttttctgctagaacatccattgagtcggagccatctggtttaatataaccaccgataaatctagctctgtattctgtatccgtcaatctaatattaagaaggtgttgagtgaaaggtggaagatcgtaaaagctgtgagtattaatgataggattagtttccgaactaatgttaattggggtattaataatatctatatttccagcgttaagtgtaacattaaacagttttaattcacgtgacgtggtatcaattaaataattaatgcccaatttggatatagcagcctgaagctcatcttgtttagttacggatcctaatgagttattaagcaatatatcgaacggatgaacgaaggttgttttaagttggtcacatactttgtaatctagacatagatgcggaagaacggtagaaactatacgaaataaatattcagagtcctctaattgatcaagagtaactattgacttaataggcatcatttatttagtattaaatgacgaccgtaccagtgacggatatacaaaacgatttaattacagagttttcagaagataattatccatctaacaaaaattatgaaataactcttcgtcaaatgtctattctaactcacgttaacaacgtggtagatagagaacataatgccgccgtagtgtcatctccagaggaaatatcctcacaacttaatgaagatctatttccagatgatgattcaccggccactattatcgaacgagtacaacctcatactactattattgacgatactccacctcctacgtttcgtagagagttattaatatcggaacaacgtcaacaacgagaaaaaagatttaatattacagtatcgaaaaatgctgaagcaataatggaatctagatctatgataacttctatgccaacacaaacaccatccttgggagtagtttatgataaagataaaagaattcagatgttagaggatgaagtggttaatcttagaaatcaacgatctaatacaaaatcatctgataatttagataattttaccaaaatactatttggtaagactccgtataaatcaacagaagttaataagcgtatagccatcgttaattatgcaaatttgaacgggtctcccttatcagtcgaggacttggatgtttgttcggaggatgaaatagatagaatctataaaacgattaaacaatatcacgaaagtagaaaacgaaaaattatcgtcactaacgtgattattattgtcataaacattatcgagcaggcattgctaaaactcggatttgaagaaatcaaaggactgagtaccgatatcacttcagaaattatcgatgtggagatcggagatgactgcgatgctgtagcatcaaaactaggaatcggtaacagtccggttcttaatattgtattgtttatactcaagatattcgttaaacgaattaaaattatttaatttaatacattcccatatccagacaacaatcgtctggattaatctgttcctgtcgtctcataccggacgacatattaatctttttattagtgggcatctttttagatggtttctttttcccagcattaactgagtcgatacctagaagatcgtgattgatctctccgaccattccacgaacttctaattggccgtctctgacggtaccataaactattttaccagcattagtaacagcttggacaatctgaccatccatcgcattgtacgatgtagtagtaactgttgttctacgtctaggagcaccagaagtatttttggagcccttggatgttgatgtagaagaagacgaggattttgattttggtttacatgtaatacattttgaactctttgattttgtatcacatgcgccggcagtcacatctgtttgagaattaagattattgttgcctcctttgacggctgcatctccaccgatttgcgctagtagatttttaagctgtggtgtaatcttattaactgtttcgatataatcatcgtaactgcttctaacggctaaattttttttatccgccatttagaagctaaaaatatttttatttatgcagaagatttaactagattatacaatgaactaatatgatccttttccagattatttacaaacttggtattttttggttctggaggaggcgaatttaaattcggacttggattcggattttgtaagttcttgatcttattatacatcgagtataggatggcgacagtaactgctacacaaataccgatcaaaagaagaataccaatcatttattgacaataacttcactattgatcaagtatgcaatatatcatcttttcactaaataagtagtaataatgattcaacaatgtcgagatatatggacgataataatttagttcatggaaatatcgctatgattggtgtgaatgactccgctaactctgtggggtgcgcagtgctttccccacatagaataaattagcattccgactgtgataataataccaagtataaacgccataatactcaatactttccatgtacgagtgggactggtagacttactaaagtcaataaaggcgaagatacacgaaagaatcaaaagaatgattccagcgattagcacgccggaaaaataatttccaatcataagcatcatgtccatttaactaataaaaattttaaatcgccgaatgaacaaagtggaatataaaccatataaaaacaatagtttgtactgcaaaaataatatctatttttgttttcgaagatatggtaaaattaaatagtagtacacagcatgttataactaacagcagcaacggctcgtaattacttatcatttactagacgaaaaggtggtgggatattttcttgctcaaataatacgaatatatcacccatccattttatgcgatgtttatatactctaatctttaatagatctatagacgacgggtttaccaacaatatagattttatcgattcatctaatttaaacccttccttaaacgtgaatgatctattatctggcataacgatgaccctacctgatgaatcggacaatgtactgggccatgtagaataaattatcaacgaattatcgtctacgaacatttatatcatttgttttaattttaggacgcgaataaatggatataaaatagaaaataacagatattacaaccaatgttatggccgcgcccaaccaggtaggcagttttattttatcttttactacaggttctcctggatgtacgtcaccaacggcggacgtagttctagtacaattagacgtaagttccgcttgggaattttttaacgctaaagagttaacgttaatcgtgcacccaacgtatttacatctagttcgttgaacatcttgattataatataaccattttctatctctagattcgtcagtgcactcatgtaaccaacataccctaggtcctaaatatttatctccggaattagattttggataattcgcgcaccaacaatttctatttcctttatgatcgttacaaaagacgtataatgccgtatccccaaaagtaaaataatcaggacgaataattctaataaactcagaacaatatctcgcatccatatgtttggagcaaatatcggaataagtagacatagccggtttccgttttgcacgtaaccattctaaacaattggggtttccaggatcgtttctacaaaatccagtcatgaaatcgtcacaatgttctgtcttgtaattattattaaatatttttggacagtgtttggtatttgtcttagaacaacattttgccacgctatcactatcgcccaggagataatccttttttataaaatgacatcgttgcccggatgctatataatcagtagcgtgttttaaatccttaatatattcaggagttacctcgttctgataatagattaatgatccaggacgaaatttgaaagaactacatggttctccatgaattaatacatattgtttagcaaattcaggaactataaaactactacaatgatctatcgacataccatctatcaaacaaaacttgggtttaatttctcccggagatgtttcataatagtacgtataactttcttctgcaaacttaacagctctattatattcaggataattaaaacctaattccatatatttgtctcgtatatctgctattcctggtgctattttgattctattaagagtaacagctgcccccattcttaataatcgtcagtatttaaactgttaaatgttggtatatcaacatctaccttatttcccgcagtataaggtttgttgcaggtatactgttcaggaatggttacatttatacttcttctatagtcctgtctttcgatgttcatcacatatgcaaagaacagaataaacaaaataatgtaagaaataatattaaatatctgtgaattcgtaaatacattgattgccataataattacagcagctacaatacacacaatagacattcccacagtgttgccattacctccacgatacatttgagttactaagcaataggtaataactaagctagtaagaggcaatagaaaagatgagataaatatcatcaatatagagattagaggagggctatatagagccaagacgaacaaaatcaaaccgagtaacgttctaacatcattatttttgaagattcccaaataatcattcattcctccataatcgttttgcatcatacctccatctttaggcataaacgattgctgctgttcctctgtaaataaatctttatcaagcactccagcacccgcagagaagtcgtcaagcatattgtaatatcttaaataactcatttatatattaaaaaatgtcactattaaagatggagtataatctttatgccgaactaaaaaaaatgacttgtggtcaacccctaagtctttttaacgaagacggggatttcgtagaagttgaaccgggatcatcctttaagtttctgatacctaagggattttacgcctctccttccgtaaagacgagtctagtattcgagacattaacaacgaccgataataaaatcactagtatcaatccaacaaatgcgccaaagttatatcctcttcaacgcaaagtcgtatctgaagtagtttctaatatgaggaaaatgatcgaatcaaaacgtcctctatacattactcttcacttggcgtgtggatttggtaagactattaccacgtgttatcttatggctacacacggtagaaaaaccgtcatttgcgtacccaataaaatgttaatacatcaatggaagacacaggtagaggcagtcggattggaacataagatatccatagatggagtaagtagtctattaaaggaactaaagactcaaagtccggatgtattaatagtagtcagtagacatctgacaaacgatgccttttgtaaatatatcaataagcattatgatttgttcatcttggatgaatcacatacgtataatctgatgaacaatacagcagttacaagatttttagcgtattatcctccgatgatgtgttattttttaactgctacacctagaccatctaaccgaatttattgtaacagtattattaatattgccaagttatccaatctaaaaaaaactatctatgcagtagatagtttttttgagccatattccacagataatattagacatatggtaaaacgactagatggaccatctaataaatatcatatatataccgagaagttattatctgtagacgagcctagaaatcaacttattcttgataccctggtagaagaattcaagtcaggaactattaatcgcattttagttattactaaactacgtgaacatatggtattattctacaaacgattattagattttttcggaccagaggttgtatttataggagacgcccaaaatagacgtactccagatatggtcaaatcaatcaaggaactaaatagatttatattcgtatccaccttattttattccggtactggtttagatattcctagtttggattcgttgttcatttgctcggcagtaatcaacaatatgcaaatagagcaattactagggagggtatgtcgagaaacagaactattagataggacggtatatgtatttcctaacacatccatcaaagaaataaagtacatgataggaaatttcatgcaacgaattattagtctgtctgtagataaactaggatttaaacaaaaaagttatcggaaacatcaagaatccgatcccacttctgcatgtacaacatcatccagagaagaacgtgtattaaatagaatatttaactcgcaaaatcgttaagaagtttaagcgacgatccgcatgctgcgcaggccagtgtattacccctcatagtattaatataatccaatgatacttttgtgatgtcggaaatcttaaccaatttagactgacaggcagaacacgtcatgcaatcatcatcgtcatcgataactgtagtcttgggcttctttttgcgactcttcattccggaacgcacattggtgctatccatttaggtagtaaaaaataagtcagaatatgccctataacacgatcgtgcaaaacctggtatatcgtctctatctttatcacaatatagtgtatcgacatttttattattattgacctcgtttatcttggaacatggaatgggaacatttttgttatcaacggccatctttgccttaattccagatgttgtaaaattataactaaacagtctatcatcgacacaaatgaaattcttgtttagacgtttgtagtttacgtatgcggctcgttcgcgtctcattttttcagatattgcaggtactataatattaaaaataagaatgaaataacataggattaaaaataaagttatcatgacttctagcgctgatttaactaacttaaaagaattacttagtctgtacaaaagtttgagattttcagattctgcggctatagaaaagtataattctttggtagaatggggaacatctacttactggaaaataggcgtgcaaaaggtagctaatgtcgagacgtcaatatctgattattatgatgaggtaaaaaataaaccgtttaatattgatccgggctattacattttcttaccggtatattttgggagcgtctttatttattcgaagggtaaaaatatggtagaacttggatctggaaactcttttcaaataccagatgatatgcgaagtgcgtgtaacaaagtattagacagcgataacggaatagactttctgagatttgttttgttaaacaatagatggataatggaagatgctatatcaaaatatcagtctccagttaatatatttaaactagctagtgagtacggattaaacatacccaaatatttagaaattgaaatagaggaagacacattatttgacgacgagttatactctattatagaacgctctttcgatgataaatttccaaaaatatccatatcgtatattaagttgggagaacttagacggcaagttgtagactttttcaaattctcattcatgtatattgagtccatcaaggtagatcgtataggagataatatttttattcctagcgttataacaaaatcaggaaaaaagatattagtaaaagatgtagaccatttaatacgatccaaggttagagaacatacatttgtaaaagtaaaaaagaaaaacacattttccattttatacgactatgatggaaacggaacagaaactagaggagaagtaataaaacgaattatagacactataggacgagactattatgttaacggaaagtatttctctaaggttggtagtgcaggcttaaagcaattgactaataaattagatattaatgagtgcgcaactgtcgatgagttagttgatgagattaataaatccggaactgtaaaacgaaaaataaaaaaccaatcagcatttgatttaagcagagaatgtttgggatatccagaagcggattttataacgttagttaataacatgcggttcaaaatagaaaattgtaaggttgtaaatttcaatattgaaaatactaattgtttaaataacccgagtattgaaactatatatggaaactttaaccagttcgtctcaatctttaatgtcgtcaccgatgtcaaaaaaagattattcgagtgaaataatatgcgcctttgatataggtgcaaaaaatcctgccagaactgttttagaagtcaaggataactccgttagggtattggatatatcaaaattagactggagttctgattgggaaaggcgcatagctaaagatttgtcacaatatgaatacactacagttcttctagaacgtcagcctagaaggtcgccgtatgttaaatttatctattttattaaaggctttttatatcatacatcggctgccaaagttatttgcgtctcgcctgtcatgtctggtaattcatatagagatcgaaaaaagagatcggtcgaagcatttcttgattggatggacacattcggattgcgagactccgttccggatagacgcaaattagacgatgtagcggatagtttcaatttggctatgagatacgtattagataaatggaatactaattatacaccttataataggtgtaaatctagaaattacataaaaaaaatgtaataacgttagtaacgccattatggataatctatttacctttctacatgaaatagaagatagatatgccagaactatttttaactttcatctaataagttgcgatgaaataggagatatatatggtcttatgaaagaacgcatttcctcagaggatatgtttgataatatagtgtataataaagatatacatcctgccattaagaaactagtgtattgcgacatccaacttactaaacacattattaatcagaatacgtatccggtatttaacgattcttcacaagtgaaatgttgtcattatttcgacataaactcagataatagcaatattagctctcgtacagtagagatatttgagagggaaaagtcatctcttgtatcatatattaaaactaccaataagaagagaaaggtcaattacggcgaaataaagaaaactgttcatggaggcactaatgcaaattacttttccggtaaaaagtctgacgagtatctgagtactacagttagatccaacattaatcaaccttggatcaaaaccatctctaagaggatgagagttgatatcattaatcactctatagtaacgcgtggaaaaagctctatattacaaactatagaaattatttttactaatagaacatgtgtgaaaatattcaaggattctactatgcacattattctatccaaggacaaggatgaaaaggggtgtatacacatgattgacaaattattctatgtctattataatttatttctgttgttcgaagatatcatccaaaacgagtactttaaagaagtagctaatgttgtaaaccacgtactcacggctacggcattagatgagaaattattcctaattaagaaaatggctgaacacgatgtttatggagttagcaatttcaaaatagggatgtttaacctgacatttattaagtcgttggatcataccgttttcccctctctgttagatgaggatagcaaaataaagttttttaaggggaaaaagctcaatattgtagcattacgatctctggaggattgtataaattacgtgactaaatccgagaatatgatagaaatgatgaaggaaagatcgactattttaaatagcatagatatagaaacggaatcggtagatcgtctaaaagaattgcttctaaaatgaaaaaaaacactaattcagaaatggatcaacgactagggtataagtttttggtgcctgatcctaaagccggagttttttatagaccgttacatttccaatatgtatcgtattctaattttatattgcatcgattgcatgaaatcttgaccgtcaagcggccactcttatcgtttaagaataatacagaacgaattatgatagaaattagcaatgttaaagtgactcctccagattactcacctataatcgcgagtattaaaggtaagagttatgacgcattagccacgttcactgtaaatatctttaaagaggtaatgaccaaagagggtatatccatcactaaaataagtagttatgagggaaaagattctcatttgataaaaattccgctactaataggatacgggaataaaaatccacttgatacagccaagtatcttgttcctaatgtcataggtggagtctttatcaataaacaatctgtcgaaaaagtaggaattaatctagtagaaaagattacaacatggccaaaatttagggttgttaagccaaactcattcactttctcgttttcctccgtatcccctcctaatgtattaccgacaagatatcgccattacaagatatctctggatatatcacaattggaagcgttgaatatatcatcgacaaagacatttataacggtcaatattgttttgctgtctcaatatttatctagagtgagtctagaattcattagacgtagtttatcatacgatatgcctccagaagttgtctatctagtaaacgcgataatagatagtgctaaacgaattactgaatctattactgactttaatattgatacatacattaatgacctggtggaagctgaacacattaaacaaaaatctcagttaacgattaacgagttcaaatatgaaatgctgcataactttttacctcatatgaactatacacccgatcaactaaagggattttatatgatatctttactaagaaagtttctctactgtatcttccacacttctagatatccagatagagattcgatggtttgtcatcgcatcctaacgtacggcaaatattttgagacgttggcacatgatgaattagagaattacataggcaacatccgaaacgatatcatgaacaatcacaagaacagaggcacttacgcggtaaacattcatgtactaacaactcccggacttaatcatgcattttctagtctattgagtggaaagttcaaaaagtcagacggtagttatcgaacacatcctcactattcatggatgcagaatatttctattcctaggagtgttggattttatccggatcaagtaaagatttcaaagatgttttctgtcagaaaataccatccaagtcaatatctttacttttgttcatcagacgttccggaaagaggtcctcaggtaggtttagtatctcaattgtctgtcttgagttccattacaaatatactaacgtctgagtatttggatttggaaaagaaaatttgtgagtatatcagatcatattataaagatgatataagttactttgaaacaggatttccaatcactatagaaaatgctctagtcgcatctcttaatccaaatatgatatgtgattttgtaactgactttagacgtagaaaacggatgggattcttcggtaacttggaggtaggtattactttagttagggatcacatgaatgaaattcgcattaatattggagcaggaagattagtcagaccattcttggttgtggataacggagagctcatgatggatgtgtgtccggagttagaaagcagattagacgacatgacattctctgacattcagaaagagtttccgcatgtcattgaaatggtagatatagaacaatttacttttagtaacgtatgtgaatcggttcaaaaatttagaatgatgtcaaaggatgaaagaaagcaatacgatttatgtgactttcctgccgaatttagagatggatatgtagcatcttcactagtgggaatcaatcacaattctggacccagagctattcttggatgtgctcaagctaaacaagctatctcttgtctgagctcggatatacgaaataaaatagacaatggaattcatttgatgtatccagagaggccaatcgtgattagtaaggctttagaaacttcaaagattgcggctaattgcttcggccaacatgttactatagcattaatgtcgtacaaaggtatcaatcaagaggatggaattatcatcaaaaaacaatttattcagagaggcggtctcgatattgttacagccaagaaacatcaagtagaaattccattggaaaactttaataacaaagaaagagataggtctaacgcctattcaaaattagaaagtaatggattagttagactgaatgctttcttggaatccggagacgctatggcacgaaatatctcatcaagaactcttgaagatgattttgctagagataatcagattagcttcgatgtttccgagaaatataccgatatgtacaaatctcgcgttgaacgagtacaagtagaacttactgacaaagttaaggtacgagtattaaccatgaaagaaagaagacccattctaggagacaaatttaccactagaacgagtcaaaagggaacagtcgcgtatgtcgcggatgaaacggaacttccatacgacgaaaatggtatcacaccagatgtcattattaattctacatccatcttctctagaaaaactatatctatgttgatagaagttattttaacagccgcatattctgctaagccgtacaacaataagggagaaaaccgacctgtctgttttcctagtagtaacgaaacatccatcgatacatatatgcaattcgctaaacaatgttatgagcattcaaatccgaaattgtctgatgaagaattatcggataaaatcttttgtgaaaagattctctatgatcctgaaacggataagccttatgcatccaaagtattttttggaccaatttattacttgcgtctgagacatttaactcaggacaaggcaaccgttagatgtagaggtaaaaagacgaagctcattagacaggcgaatgagggacgaaaacgtggaggaggtatcaagttcggagaaatggagagagactgtttaatagcgcatggtgcagccaatactattacagaagttttgaaagattcggaagaagattatcaagatgtgtatgtttgtgaaaattgtggagacatagcagcacaaatcaagggtattaatacatgtcttagatgttcaaaacttaatctctctcctctcttaacaaaaattgataccacgcacgtatctaaagtatttcttactcaaatgaacgccagaggcgtaaaagtcaaattagatttcgaacgaaggcctccttcgttttataaaccattagataaagttgatctcaagccgtcttttctggtgtaatattctagtttggtagtagatacatatcaatatcatcaaattcgagatccgaattataaaatgggcgtggattgttaactatagaatcggacgtctgatattcgaaaatctgtggagtttcaggttttggtggaggtgtaactgctacttgggatactgaagtctgatattcagaaagctgtggatgttctggttcggcatccaccgatggtgtcacatcactaatcggttcggtaacgtctgtggatggaggtgctacttctacagaacctgtagcctcagttgtcaacggagatacatttttaatgcgagaaaatgtataatttggtaatggtttcttatgtggatctgaagaagaggtaagatatctactagaaagataccgatcacgttctagttctcttttgtagaacttaactttttctttctccgcatctagttgatattccaacctcttcacgttactacgttcagattccaattcacgttcgcatgggttacctccgcagtttttacgagcgatttcacgttcagccttcatgcgtctctccctctctctatcgagtttatcagagcagtctttctgaaggcgatcgaactccataaatttctccaacgctttgattgtttccatagatttccgaagttcagcttttaggactgtgattctttttctttcgaattcacagctggatgtacaaccgtttccattaccgccatctctaagtttcttttctagatcggcaacatttcatccccatgccttttacattcctcgagtctactgtcgtcgaaatatcgttccagctccttttcgacatcaataactttagcacgttgtctctcaagctctcttttgtagttatctgattccctggcacgtttaagatcttcatgcaattgagtcagctcttaacttcctctcttgcttcttcgtcatagtacgcgcaatcactgtgagatccattgttaccacgtctacactcggcgagctcgcgtttaagagattcaatttcccgtttgtattggtccatgtttccattgctaccaccattagatttacaggctgctagttgtcgttcgagatcagaaatacgggttttcttggaattgatttcgtcgatgtacttggcatcgaaacacttattaagttctttttccaattctacgattttatttctttcgcgagtcaattccctcctgtagtaactatctgttttgtcagattcacgctctctacgtagactttcttgcaagttactaatttgttccctagcacgtccgagtttagttttatatgctgaatagagttctgattcatcctttgagcagatctctagcgatcgtttaagattcctaattctagtctttagcctatttacctcctcagaagatgttccgttaccgttgcgtttacactcgttaagctgtctatcaagatccatgattctatctctaagacgttgcatctctctttccatatcagcattgctttcattattacgtctgcagtcactcaactgtctttcaatatctgagattctatctctaagacgtcgcatctctctctgtttcggcattggtttcattattacgtttacagtcgttcaactgtctttcaagatctgatattctagattggagtctgctaatctctgtagcattttcacggcattcactcagttgtctttcaagatctgaaattttagattggagtctgctaatctctgtaagatttcctcctccgctctcgatgcagtcggtcaacttattctctagttctctaatacgcgaacgcagtgcatcaacttcttgcgtgtcttcctggttgcgtgtacattcatcgagtctagattcgagatctctaacgcgtcgtcgttcttcctcaagttctctgcgtactacagaaagcgtgtccttatcttgttgatatttagcaatttctgattctagagtactgattttgcttacgtagttactaatatttgtcttggccttatcaagatcctccttgtatttgtcgcattccttgatatccctacgaagtctggacagttcccattcgacattacgacgtttatcgatttcagctcggagatcgtcatcgcgttgttttagccacatacgactgagttcaagttctcgttgacaagatccatctacttttccattcctaatagtatccagttccttttctagttctgaacgcatttctcgttccctatcaagcgattctctcaattctcggatagtcttcttatcaatttctaataaatctgaaccatcatctgtcccattttgaatatccctgtgttctttgatctcttttgtaagtcggtcgattctttcggttttataaacagaatccctttccaaagtcctaatcttactgagtttatcactaagttctgcattcaattcggtgagttttctcttggcttcttccaactctgttttaaactctccactatttccgcattcttcctcgcatttatctaaccattcaattagtttattaataactagttggtaatcagcgattcctatagccgttcttgtaattgtgggaacataattaggatcttctaatggattgtatggcttgatagcatcatctttatcattattagggggatggacaaccttaattggttggtcctcatctcctccagtagcgtgtggttcttcaataccagtgttagtaataggcttaggcaaatgcttgtcgtacgcgggcacttcctcatccatcaagtatttataatcgggttctacttcagaatattcttttctaagagacgcgacttcgggagttagtagaagaactctgtttctgtatctatcaacgctggaatcaatactcaagttaaggatagcgaatacctcatcgtcatcatccgtatcttctgaaacaccatcatatgacatttcatgaagtctaacgtattgataaatagaatcagatttagtattaaacagatccttaacctttttagtaaacgcatatgtatattttagatctccagatttcataatatgatcacatgccttaaatgtcagtgcttccatgatataatctggaacactaatgggtgacgaaaaagatacagcaccatatgctacgttgataaataaatctgaaccactaagtagataatgattaatgttaagaaagaggaaatattcagtgtataggtatgtcttggcgtcatatcttgtactaaacacgctaaacagtttgttaatgtgatcaatttccaatagattaattagagcagcgggaataccaacaaacatattaccacatccgtattttctatgaatatcacatatcatgttaaaaaatcttgatagaagagcgaatatctcgtctgacttaatgagtcgtagttcagcagcaacataagtcataactgtaaatagaacatactttcctgtagtgttgattctagactccacatcaacaccattattaaaaatagttttatatacatctttaatctgctctccgttaatcgtcgaacgttctagtatacggaaacactttgatttcttatctgtagttaatgacttagtgatatcacgaagaatattacgaattacatttcttgtttttcttgagagacctgattcagaactcaactcatcgttccatagtttttctacctcagtggcgaaatctttggagtgcttggtacatttttcaataaggttcgtgacctccatttattataaaaaatttattcaaaacttaactacaatcgggtaattataaaatcgtagatctcccatgtggcggaatactaccatctatcgcatgtggatggacagtaggtaatggccatgggaacagtaatgtttgcatatttatctttcttgccagtattactgcatattgtcccaatgtttcgatgtgatgttctaacctatcaactgccgctgtatcacaacaatagtgtccgatgaaattaagattatgatccaatgtgtttaatatatgattatcaagtcttatacgatccgcgtcttttttgacaggatcaggttcttctacaggaagaagtttcggcctcttatgatattcatgtctgggaaacggtggtctagggtgaggctccggtatcggagtgggttttggattataatcatcatcgtctatgacatcatcttcgacttcgatatttattttgctatcttgatgatgtcctgtatcagttgcattttcagcactcgactgaatattagcgcattcattgtctattattaccatatttctaaacccaaaatgtatgtgttgaacatcagtactatcgttgatgagtcttatagcatgaattcgcttatcgttatcgggtttatcttctgtcaccttagcaattccttttttattaaactctacataatcatatccatttctattgtttgttctaatataaacgagtatagcatcattgctaaatttttcaatagtatcaaaaacagaatatcctaaaccatataatatatattcaggaacactcaaactaaatgtccaggattctcctaaatacgtaaactttaatagtgcgaaatcattcaaaaatctaccacttatagatagatagtacataaatgcgtatagtagtctacctatctctttattatgaaaaccggcattacgatcatatatgtcgtgatatacctgtgatccgtttacgttaaaccataaatacatgggtgatcctataaacatgaatttatttctaattctcagagctatagttaattgaccgtgtaatatttgcttacatgcatacttgatacgcttattaataagatttttatcattgctcgttatttcagaatcgtatatataaggagtaccatcgtgattcttaccagatattatacaaaatactatatataaaatatattgacccacgttagtaatcatataaatgtttaacgttttaaattttgtattcaatgatccattatcatacgctatcatggtcttgtaatattcattctttaaaatataatattgtgttagccattgcattggagctcctaatggagattttctattctcatccattttaggataggctttcataaagtccctaataacttcgtgaataatgtttctatgttttctactgatgcatgtatttgcttcgatttttttatcccatgtttcatctatcatagatttaaacgcagtaatgctcgcaacattaacatcttgaaccgttggtacaattccgttccataaatttataatgttcgccatttatataactcattttttgaatatacttttaattaacaaaagagttaagttactcatatggacgccgtccagtctgaacatcaatctttttagccagagatatcatagccgctcttagagtttcagcgtgattttccaacctaaatagaacttcatcgttgcgtttacaacacttttctatttgttcaaactttgttgttacattagtaatctttttttccaaattagttagccgttgtttgagagtttcctcattgtcgtcttcatcggctttaacaattgcttcgcgtttagcctctggctttttagcagcctttgtagaaaaaaattcagttgctggaattgcaagatcgtcatctccggggaaaagagttccgtccatttaaagtacagattttagaaactgacactctgcgttatttatatttggtacaacacatggattataaatattgatgttaataacatcagaaaatgtaaagtctatacattgttgcatcgtgttaaattttctaatggatctagtattattgggtccaacttctgcctgaaatccaaatatggaagcggatacaaaaccgtttcctggataaaccacacatctccacttttgctttacatcagaaattgtgtcgttgacatcttgaactctcctatctaatgccggtgttccacctatagattttgaatattcgaatgctgcatgagtagcattaaattccttaatattgccataattttcatatattgagtaaccctggataaaaagtaaacacaccgcagccgtcgctaccacaataaaaaaaattgatagagagttcatttataatctattagaagctgacaaaatttttttacacgcatcagacaatgctttaataaatagttcaacatctacttttgtcatatcgaaccgatggtatgattctaacctagaattacatccgaaaaagttgactatgttcatagtcattaagtcattaacaaacaacattccagactctggattataagacgatactgtttcgtcacaattacctaccttaatcatgtgattatgaatattggctattagagcaccttctaagaaatctataatatctttgaaacacgatttaaaatcaaaccacgaatatacttctacgaagaaagttagtttacccataggagaaataactataaatggagatctaaatacaaaatccggatctatgatagttttaacattattatattctctattaaatacctccacatctaaaaatgttaattttgaaactatgtcttcgtttattaccgtacctgaactaaacgctataagctctattgtttgagaactctttaaacgatattcttgaaatacatgtaacaaagtttcctttaactcggtcggtttatctaccatagttacagaatttgtatccttatctataatataataatcaaaatcgtataaagttatataattatcgcgttcagattgggatcttttcaaatagactaaaaaccccatttctctagtaagtatcttatgtatatgtttgtaaaatatcttcatggtgggaatatgctctaccgcagttagccattcctcattgacagcggtagatgtattagacaaaactattccaatgtttaacaagggccattttacgagattattaaatccttgtttgataaatgtagccaatgagggttcgagttcaacgacgattgaattctcttcccgcggatgctgcatgatgaacgacgggatgttgttcgattgatttggaattctttttcgactttttgtttatattaaatattttaaaatttatagcggatagcaattcatgtaccacggataatgtagacgcgtattgcgcatcgatatctttattattagataaatttatcaataaatgtgagaagtttgcctcgttaaggtcttccatttaaatattatataaacatttgtgtttgtaacttattcgtcttttatggaatagttttttactagtaaagctgcaattacacactttgtccgtaaaacataaatataaacaccagcttttatcaatcgttccaaaaagtcgacggcggacatttttaacatggcatctattttaaatacacttaggtttttggaaaaaacatcattttataattgtaacgattcaataactaaagaaaagattaagattaaacataagggaatgtcatttgtattttataagccaaagcattctaccgttgttaaatacttgtctggaggaggtatatatcatgatgatttggttgtattggggaaggtaacaattaataatctaaagatgatgctattttacatggatttatcatatcatggagtgacaagtagtggagcaatttacaaattgggatcgtctatcgatagactttctctaaataggactattgttacaaaagttaataattatgatgatacattttttgacgacgatgattgatcgctattgcacaattttgtttttgtactttctaatatagtgtttaggttctttttcatatgagaatattgatttactaaaatatctatgtttaacttttgttctatgacgtccttatcggcggtatcggtacatatacgtaattcaccttcacaaaatacggagtcttcgataataatagccaatcgattattggatctagctgtctgtatcatattcaacatgtttaatatatcctttcgtttcccctttacaggcatcgatcgtagcatattttccgcgtctgatatggaaatgttaaaactacaaaaatgcgtaatgttagcccgtcctaatattggtacgtgtctataagtttggcatagtagaataatagacgtgtttaaatgccttccaaagtttaagaattctattagagtattgcattttgatagtttatcgcctacatcatcaaaaataagtaaaaagtgtgctgattttttatgattttgtgcgacagcaatacatttttctatgttacttttagttcgtatcagattatattctagagattcctgactactaacgaaattaatatgatttggccaaatgtatccatcataatctgggttataaacgggtgtaaacaagaatatatgtttatattttttaactagtgtagaaaacagagatagtaaatagatagtttttccagatccagatcctcctgttaaaaccattctaaacggcatttttaataaattttctcttgaaaattgtttttcttggaaacaattcataattatatttacagttactaaattaatttgataataaatcaaaatatggaaaactaaggttgttagtagggaggagaacaaagaaggcacatcgtgatataaataacatttattatcatgatgacaccagaaaacgacgaagagcagacatctgtgttctccgctactgtttacggagacaaaattcagggaaagaataaacgcaaacgcgtgattggtctatgtattagaatatctatggttatttcactactatctatgattaccatgtccgcgtttctcatagtgcgcctaaatcaatgcatgtctgctaacgaggctgctattactgacgccgctgttgccgttgctgctgcatcatctactcatagaaaggttgcgtctagcactacacaatatgatcacaaagaaagctgtaatggtttatattaccagggttcttgttatatattacattcagactaccagttattctcggatgctaaagcaaattgcactgcggaatcatcaacactacccaataaatccgatgtcttgactacctggctcattgattatgttgaggatacatggggatctgatggtaatccaattacaaaaactacatccgattatcaagattctgatgtatcacaagaagttagaaagtatttttgtgttaaaacaatgaactaatatttatttttgtacattaataaatgaaatcgcttaatagacaaactgtaagtaggtttaagaagttgtcggtgccggccgctataatgatgatactctcaaccattattagtggcataggaacatttctgcattacaaagaagaactgatgcctagtgcttgcgccaatggatggatacaatacgataaacattgttatttagatactaacattaaaatgtctacagataatgcggtttatcagtgtcgtaaattacgagccagattgcctagacctgatactagacatctgagagtattgtttagtattttttataaagattattgggtaagtttaaaaaagaccaataataaatggttagatattaataatgataaagatatagatattagtaaattaacaaattttaaacaactaaacagtacgacggatgctgaagcgtgttatatatacaagtctggaaaactggttaaaacagtatgtaaaagtactcaatctgtactatgtgttaaaaaattctacaagtgacaacaaaaaatgaattaataataagtcgttaacgtacgccgccatggacgccgcgtttgttattactccaatgggtgtgttgactataacagatacattgtatgatgatctcgatatctcaatcatggactttataggaccatacattataggtaacataaaaactgtccaaatagatgtacgggatataaaatattccgacatgcaaaaatgctactttagctataagggtaaaatagttcctcaggattctaatgatttggctagattcaacatttatagcatttgtgccgcatacagatcaaaaaataccatcatcatagcatgcgactatgatatcatgttagatatagaagataaacatcagccattttatctattcccatctattgatgtttttaacgctacaatcatagaagcgtataacctgtatacagctggagattatcatctaatcatcaatccttcagataatctgaaaatgaaattgtcgtttaattcttcattctgcatatcagacggcaatggatggatcataattgatgggaaatgcaatagtaattttttatcataaaagttgtaaagtaaataataaaacaataaatattgaactagtagtacgtatattgagcaatcagaaatgatgctggtacctcttatcacggtgaccgtagttgcgggaacaatattagtatgttatatattatatatttgtaggaaaaagatacgtactgtctataatgacaataaaattatcatgacaaaattaaaaaagataaagagttctaattccagcaaatctagtaaatcaactgatagcgaatcagactgggaggatcactgtagtgctatggaacaaaacaatgacgtagataatatttctaggaatgagatattggacgatgatagcttcgctggtagtttaatatgggataacgaatccaatgttatggcgcctagcacagaacacatttacgatagtgttgctggaagcacgctgctaataaataatgatcgtaatgaacagactatttatcagaacactacagtagtaattaatgaaacggagactgttaaagtacttaatgaagataccaaacagaatcctaactattcatccaatcctttcgtaaattataataaaaccagtatttgtagcaagtcaaatccgtttattacagaacttaacaataaatttagtgagaataatccgtttagacgagcacatagcgatgattatcttaataagcaagaacaagatcatgaacacgatgatatagaatcatcggtcgtatcattggtgtgattagtttcctttttataaaattgaagtaatatttagtattattgctgccgtcacgttgtacaaatggagatattccctgtattcggcatttctaaaattagcaattttattgctaataatgactgtagatattatatagatacagaacatcaaaaaattatatctgatgagatcaatagacagatggatgaaacggtacttcttaccaacatcttaagcgtagaagttgtaaatgacaatgagatgtaccatcttattcctcatagattatcgacgattatactctgtattagttctgtcggaggatgtgttatctctatagataatgacatcaatggcaaaaatattctaacctttcccattgatcatgctgtaatcatatccccactgagtaaatgtgtcgtagttagcaagggtcctacaaccatattggttgttaaagcggatatacctagcaaacgattggtaacatcgtttacaaacgacatactatatgtaaacaatctgtcactgattaattatttgccgttgtctgtattcattattagacgagtcaccgactatttggatagacacatatgcgatcagatatttgctaataataagtggtattcccttataaccatcgacgataagcaatatcctattccatcaaactgtataggtatgtcctctgccaagtacataaattctagcatcgagcaagatactttaatccatgtttgtaacctcgagcatccgttcgactcagtatacaaaaaaatgcagtcgtacaattctctacctatcaaggaacaaatattgtacggtagaattgataatataaatatgagcattagtatttctgtggattaatagatttctagtatggggatcattaatcatctctaatctctaaatacctcataaaacgaaaaaaaagctattatcaaatactgtacggaatggattcattctcttctctttttatgaaactctgttgtatatctactgataaaactggaagcaaaaaatctgatagaaagaataagaataagatcaaggattatatggaacacgattattataaaataacaatagttcctggttcctcttccacgtctactagctcgtggtattatacacatgcctagtaatagtctctttgcgttgacggaaagcagactagaaataacaggctaaaatgttcagacaccataatagttcccaacccagataataacagagttccatcaacacattcctttaaactcaatcccaaacccaaaaccgttaaaatgtatccggccaattgatagtagataatgaggtgtacagcgcatgataatttacacagtaaccaaaatgaaaacactttagtaattataagaaatatagacggtaatgtcatcatcaacaatccaataatatgcctgagagtaaacattgatggataaaacaaaaatgctccgcataactctatcatggcaataacacaaccaaatacttgtaagattcctaaattagtagaaaatacaacggatatcgatgtataagtgatctcgagaaataataagaataaagtaatgcccgtaaagataaacatcaacattgtttggtaatcattaaaccaattagtatgaagttgaactaatttcacagtagattttattccagtattatccccgcatgtatacgtacctggtaagatatctttatattccataatcaatgagacatcactatccgataacgaatgaagtctagcactagtatgccatttacttaatatggtcgtcttggaagttttattataagttaaaatatcatggttatccaatttccatctaatatactttgtcggattatctatagtacacggaataatgatggtatcattacatgctgtatactctatggtctttgtagttgttataacaaccaacgtatagaggtatatcaacgatattctaactcttgacattttttatttatttaaaatgatacctttgttatttattttattctattttgctaacggtattgaatggcataagtttgaaacgagtgaagaaataatttctacttacttattagacgacgtattatacacgggtgttaatggggcggtatacacattttcaaataataaactaaacaaaactggtttaactaataataattatatcacaacatctataaaagtagaggatgcggataaggatacattagtatgcggaaccaataacggaaatcccaaatgttggaaaatagacggttcagacgacccaaaacatagaggtagaggatacgctccttatcaaaatagcaaagtaacgataatcagtcacaacggatgtgtactatctgacataaacatatcaaaagaaggaattaaacgatggagaagatttgacggaccatgtggttatgatttatacacggcggataacgtaattccaaaagatggtttacgaggagcattcgtcgataaagatggtacttatgacaaagtttacattcttttcactgatactatcggctcaaagagaattgtcaaaattccgtatatagcacaaatgtgcctaaacgacgaaggtggtccatcatcattgtctagtcatagatggtcgacgtttctcaaagtcgaattagaatgtgatatcgacggaagaagttatagacaaattattcattctagaactataaaaacagataatgatacgatactatatgtattcttcgatagtccttattccaagtccgcattatgtacctattctatgaataccattaaacaatctttttctacgtcaaaattggaaggatatacaaagcaattgccgtctccagctcctggtatatgtttaccagctggaaaagttgttccacataccacgtttgaagtcatagaaaaatataatgtactagatgatattataaagcctttatctaaccaacctatcttcgaaggaccgtctggtgttaaatggttcgatataaaggagaaggaaaatgaacatcgggaatatagaatatacttcataaaagaaaattctatatattcgttcgatacaaaatctaaacaaactcgtagctcgcaagtcgatgcgcgactattttcagtaatggtaacttcgaaaccgttatttatagcagatatagggataggagtaggaatgccacaaatgaaaaaaatacttaaaatgtaatcttaatcgagtacaccacacgacaatgaacaaacataagacagattatgctggttatgcttgctgcgtaatatgcggtctaattgttggaattatttttacagcgacactattaaaagttgtagaacgtaaattagttcatacaccatcaatagataaaacgataaaagatgcatatattagagaagattgtcctactgactggataagctataataataaatgtatccatttatctactgatcgaaaaacctgggaggaaggacgtaatgcatgcaaagctctaaatccaaattcggatctaattaagatagagactccaaacgagttaagttttttaagaagcattagacgcggatattgggtaggagaatccgaaatattaaaccagacaaccccatataattttatagctaagaatgccacgaagaatggaactaaaaaacggaaatatatttgtagcacaacgaatactcccaaactgcattcgtgttacactatataacaattacactacatttttatcataacactacttcggttagatgttttagaaaaaaataaatatcgccgtaccgttcttgtttttataaaaataacaattaacaattatcaaattttttctttaatattttacgtggttgaccattcttggtggtaaaataatctcttagtgttggaatggaatgctgtttaatgtttccacactcatcgtatattttgacgtatgcagtcacatcgtttacgcaatagtcagactgtagttctatcatgcttcctacattagaaggaggaacagttttaaagtctcttggttttaatctattaccgttagttttcatgaaatcctttgttttatccacttcacattttaaataaatgtccactatacattcttttgttaattttactagatcgtcatgggtcatagaatttataggttccgtagtccatggatccaaactagcaaacttcgcgtatacggtatcgcgattagtgtatacaccaactgtatgaaaattaagaaaacagtttaatagatcaacagaaatatttaatcctccgtttgatacagatgcgccatatttatggatttcggattcacacgttgtttgtctgaggtgttcgtctagtgttgcttctacgtaaactttgattcccatatattctttattgtcagaatcgcataccgatttatcatcatacactgtttgaaaactaaatggtatacacatcaaaataacaaatactaacgagtacattctgcaatattgttatcgtaattggaaaaatagtgttcgagtgagttggattatgtgagtattggattgtatattttattttatattttgtaataagaataaaatgctaatgtcaagtttattccaatagatgtcttattaaaaacatatataataaataacaatggctgaatggcataaaattatcgaggatatctcaaaaaataataagttcgaggatgccgccatcgttgattacaagactacaaagaatgttctagctgctattcctaacagaacatttgccaagattaatccgggtgaaattattcctctcatcactaatcgtaatattctaaaacctcttattggtcagaaatattgtattgtatatactaactctctaatggatgagaacacgtatgctatggagttgcttactgggtacgcccctgtatctccgatcgttatagcgagaactcataccgcacttatatttttgatgggtaagccaacaacatccagacgtgacgtgtatagaacgtgtagagatcacgctacccgtgtacgtgcaactggtaattaaaataaaaagtaatattcatatgtagtgtcaattttaaatgatgatgatgaaatggataatatccatattgacgatgtcaataatgccggtattggcatacagttcatcgatttttagatttcattcagaggatgtggaattatgttatgggcatttgtattttgataggatctataatgtagtaaatataaaatataatccgcatattccatatagatataattttattaatcgcacgttaaccgtagatgaactagacgataatgtcttttttacacatggttattttttaaaacacaaatatggttcacttaatcctagtttgattgtctcattatcaggaaacttaaaatataatgatatacaatgctcagtaaatgtatcgtgtctcattaaaaatttggcaacgagtacatctactatattaacatctaaacataagacttattctctacatcggtccacgtgtattactataataggatacgattctattatatggtataaagatataaatgacaagtataatgacatctatgattttactgcaatatgtatgctaatagcgtctacattgatagtgaccatatacgtgtttaaaaaaataaaaatgaactcttaattatgctatgctattagaaatggataaaatcaaaattacggttgattcaaaaattggtaatgttgttaccatatcgtataacttggaaaagataactattgatgtcacacctaaaaagaaaaaagaaaaggatgtattattagcgcaatcagttgctgtcgaagaggcaaaagatgtcaaggtagaagaaaaaaatattatcgatattgaagatgacgatgatatggatgtagaaagcgcgtaatacgatctataaaaataagtatataaatactttttatttactgtactcttactgtgtagtggtgataccctactcgattatttttttaaaaaaaaaatacttattctgattcttctagccatttccgtgttcgtttgaatgccacatcgacgtcaaagataggggagtagttgaaatctagttctgcattgttggtacgcacctcaaatgtagtgttggatatcttcaacgtatagttgttgagtagtgatggttttctaaatagaattctcttcatatcattcttgcacgcgtacatttttagcatccatcttggaatcctagatccttgttctattcccaatggtttcatcaatagaagattaaacatatcgtacgaacacgatggagagtaatcgtagcaaaagtaagcatttcctttaatcttagatcccggatactggatatattttgcagccaacacgtgcatccatgcagcatttcctacatatacccggctatgcaccgcgtcatcatcgactgtacgatacataatgttaccgtgttgcttacattgctcgtaaaagactttcatcaatttgtctccttctccgtaaattccagtgggtcttaggcaacaagtatacaattttgctccattcatgattacggaattattggctttcataaccagttgctcggccatacgtttactttttgcgtatacatgtcctggtgatatatcataaagggtatgctcatggccgatgaatggatcaccgtgtttattgggtcctattgcttccatgctactagtatagatcaaatacttgattcctaggtccacacaagctgccaaaatagtctgtgttccataatagtttactttcatgatttcattatcggtgtattttccaaatacatccactagagcagccgtatgaataatcagatttaccccatctagcgcttctctcaccttatcaaagtcgtttatatcacattgtatatagtttataaccttaactttcgaggttattggttgtggatcttctacaatatctatgactctgatttcttgaacatcatctgcactaattaacagttttactatatacctgcctagaaatccggcaccaccagtaaccgcgtacacggccattgctgccactcataatatcagactacttattctattttactaaataatggctgtttgtataatagaccacgataatatcagaggagttatttactttgaaccagtccatggaaaagataaagttttaggatcagttattggattaaaatccggaacgtatagtttgataattcatcgttacggagatattagtcaaggatgtgattccataggcagtccagaaatatttatcggtaacatctttgtaaacagatatggtgtagcatatgtttatttagatacagatgtaaatatatctacaattattggaaaggcgttatctatttcaaaaaatgatcagagattagcgtgtggagttattggtatttcttacataaatgaaaagataatacattttcttacaattaacgagaatggcgtttgatatatcagttaatgcgtctaaaacaataaatgcattagtttacttttctactcagcaaaataaattagtcatacgtaatgaagttaatgatacacactacactgtcgaatttgatagggacaaagtagttgacacgtttatttcatataataaacataatgacaccatagagataagaggggtgcttccagaggaaactaatattggttgcgcggttagtatgacttacttgtataataagtatagttttaaactgattttagcagaatatataagacacagaaatactatatccggcaatatttattcggcattgatgacactagatgatttggctattaaacagtatggagacattgatctattatttaatgagaaacttaaagtagactccgattcgggactatttgactttgtcaactttgtaaaggatatgatatgttgtgattctagaatagtagtagctctatctagtctagtatctaaacattgggaattgacaaataaaaagtataggtgtatggcattagccgaacatatatctgatagtattccaatatctgagctatctagactacgatacaatctatgtaagtatctacgcgggcacactgagagcatagaggatgaatttgattattttgaagacgatgattcgtctacatgttctgccgtaaccgacagggaaacggatgtataattttttttatagcgtgaaggatatgataaaaaatataattgttgtatttatcccattccaatcaccttatatgattctgtaacacaataaaggagtctcatagatgtatagaggtcagatactggtttgataaactgtttattccacataagtatgtttgactttatggttagacccgcatactttaacaaatcactgaaaattggagttaggtattgacctctcagaatcagttgccgttctggaacattaaatgtattttttatgatatactccaacgcatttatgtgggcatacaacaagtcattactaatggagtattccaagagttttagttgtctagtatttaacaagagaagagatttcaacagactgtttatgaactcgaatgccgcctcattgtcgcttatattgatgatgtcgaattctcccaatatcatcactgatgagtagctcatcttgttatcgggatccaagttttctaaagatgtcattaaaccctcgatcatgaatggatttatcatcatcgtttttatgttggacatgagcttagtccgtttgtccacatctatagacgacgatttctgaattatttcatatatccctctctttaactccaggaacttgtcaggatggtctactttaatatgttctcgtctaagagatgaaaatctttggatggttgcacgcgacttttctctaaaggatgacgttgcccaagatcctctcttaaatgaatccatcttatccttggacaagatggacagtctattttccttagatggtttaatatttttgttacccatgatctataaaggtagacctaatcgtctcggatgacctatatatttattttcagttttattatacgcataaattgtaaaaaatatgttaggtttacgaaaatgtctcgtggggcattaatcgtttttgaaggattggacaaatctggaaaaacaacacaatgtatgaacatcatggaatctataccggcaaacacgataaaatatcttaactttcctcagagatccactgtcactggaaagatgatagatgactatctaactcgtaaaaaaacctataatgatcatatagttaatctattattttgtgcaaatagatgggagtttgcatcttttatacaagaacaactagaacagggaattactttaatagttgatagatacgcattttctggagtagcgtatgccgccgctaaaggcgcgtcaatgactctcagtaagagttatgaatctggattgcctaaacccgacttagttatattcttggaatctggtagcaaagaaattaatagaaacgtcggcgaggaaatttatgaagatgttacattccaacaaaaggtattacaagaatataaaaaaatgattgaagaaggagatattcattggcaaattatttcttctgaattcgaggaagatgtaaagaaggagttgattaagaatatagttatagaggctatacacacggttactggaccagtggggcaactgtggatgtaatagtgaaattacattttttataaatagatgttagtacagtgttataaatggatgaagcatattactctggcaacttggaatcagtactcggatacgtgtccgatatgcataccgaactcgcatcaatatctcaattagttattgccaagatagaaactatagataatgatatattaaacaaggacattgtaaattttatcatgtgtagatcaaacttggataatccatttatctctttcctagatactgtatatactattatagatcaagagaactatcagaccgaattgattaattcattagacgacaatgaaattatcgattgtatagttaataagtttatgagcttttataaggataacctagaaaatatagtagatgctatcattactctaaaatatataatgaataatccagattttaaaactacgtatgccgaagtactcggttccagaatagccgatatagatattaaacaagtgatacgtaagaatatactacaattgtctaatgatatccgcgaacgatatttgtgaaaaatattaaaaaaaaatactttttttattaaatgacgtcgcttcgcgaatttagaaaattatgctgtgatatatatcacgcatcaggatataaagaaaaatctaaattaattagagactttataacagatagggatgataaatatttgatcattaagctattgcttcccggattagacgatagaatttataacatgaacgataaacaaattataaaattatatagtataatatttaaacaatctcaggaagatatgctacaagatttaggatacggatatataggagacactattaggactttcttcaaagagaacacagaaatccgtccacgagataaaagcattttaactttagaagaagtggatagttttttaactacgttatcatccgtaactaaagaatcgcatcaaataaaattattgactgatatcgcatccgtttgtacatgtaatgatttaaaatgtgtagtcatgcttattgataaagatctaaaaattaaagcgggtcctcggtacgtacttaacgctattagtcctcatgcctatgatgtgtttagaaaatctaataacttgaaagagataatagaaaatgcatctaaacaaaatctagactctatatctatttctgttatgactccaattaatcccatgttagcggaatcgtgtgattctgtcaataaggcgtttaaaaaatttccatcaggaatgtttgcggaagtcaaatacgatggtgaaagagtacaagttcataaaaataataacgagtttgccttctttagtagaaacatgaaaccagtactctctcataaagtggattatctcaaagaatacataccgaaagcatttaaaaaagctacgtctatcgtattggattctgaaattgttcttgtagacgaacataatgtaccgctaccgtttggaagtttaggaatacacaaaaagaaagaatataaaaactctaacatgtgtttgttcgtgtttgactgtttgtactttgatggattcgatatgacggacattccattgtacgaacgaagatcttttctcaaagatgttatggttgaaatacccaatagaatagtattctcagagttgacgaatattagtaacgagtctcagttaactgacgtattggatgatgcactaacgagaaaattagaaggattggtcttaaaagatattaatggagtatacgaaccgggaaagagaagatggttaaaaataaagcgagactatttgaacgagggttccatggcagattctgccgatttagtagtactaggtgcctactatggtaaaggagcaaagggtggtatcatggcagtctttctaatgggttgttacgacgatgaatccggtaaatggaagacggttaccaagtgttcaggacacgatgataatacgttaagggagttgcaagaccaattaaagatgattaaaattaacaaggatcccaaaaaaattccagagtggttagtagttaataaaatctatattcccgattttgtagtagaggatccgaaacaatctcagatatgggaaatttcaggagcagagtttacatcttccaagtcccataccgcaaatggaatatccattagatttcctagatttactaggataagagaggataaaacgtggaaagaatctactcatctaaacgatttagtaaacttgactaaatcttaatagttacatacaaactgaaaattaaaataacactatttagttggtggtcgccatggatggtgttattgtatactgtctaaacgcgctagtaaaacatggcgaggaaataaatcatataaaaaatgatttcatgattaaaccatgttgtgaaagagtttgtgaaaaagtcaagaacgttcacatcgacggacaatctaaaaacaatacagtgattgcagatttgccatatctggataatgcggtatccgatgtatgcaattcactgtataaaaagaatgtatcaagaatatccagatttgctaatttgataaagatagatgacgatgacaagactcctactggtgtatataattattttaaacctaaagatgccattcctgttatcatatctataggaaaggataaagatgtctgtgaactattaatctcatctgataaagcgtgtgcgtgtatagagttaaattcatataaagtagccattcttcccatggatgtttccttttttaccaaaggaaatgcatcattgattattctcctgtttgatttctctatcgatgcggcacctctcttaagaagtgtaaccgataataatgttattatatctagacaccagcgtctacatgacgagcttccgagttccaattggttcaagttttacataagtataaagtccgactattgttctatattatatatggttgttgatggatctgtgatgcatgcgatagctgataatagaactcacgcaattattagcaaaaatatattagacaatactacgattaacgatgagtgtagatgctgttattttgaaccacagattaggattcttgatagagatgagatgctcaatggatcatcgtgtgatatgaacagacattgtattatgatgaatttacctgatgtaggcgaatttggatctagtatgttggggaaatatgaacctgacatgattaagattgctctttcggtggctggtaatttaataagaaatcgagactacattcccgggagacgaggatatagctactacgtttacggtatagcctctagataatttttttaagcacgaaataaaaaacataattttaaaccaatctatttcatactattttgtgtgatcaccatggacataaagatagatattagtatttctggtgataaatttacggtgactactaggagggaaaatgaagaaagaaaaaaatatctacctctccaaaaagaaaaaactactgatgttatcaaacctgattatcttgagtacgatgacttgttagatagagatgagatgtttactattctagaggaatattttatgtacagaggtctattaggcctcagaataaaatatggacgactctttaacgaaattaaaaaattcgacaatgatgcggaagaacaattcggtactatagaagaactcaagcagaaacttagattaaattctgaagagggagcagataactttatagattatataaaggtacaaaaacaggatatcgtcaaacttactgtatacgattgcatatctatgataggattgtgtgcatgcgtggtagatgtttggagaaatgagaaactgttttctagatggaaatattgtttacgagcgattaaactgtttattgatgatcacatgcttgataagataaaatctatactgcagaatagactagtatatgtggaaatgtcatagaaagttaaaagttaatgagagcaaaaatatataaggttgtattccatatttgttattttttctgtaatagttaaaaaaatacattcgatggtctatctatcagattattatgtgttataaggtactttttctcataataaactagagtatgagtaagatagtgtttttcaaaacatataaatctaaaattgatggatgagatatacagctattaatttcgaaaatatattttaatctgataactttaaacatggatttttgatggtggtttaacgttttaaaaaaagattttgttattgtagtatatgataatattaaaagatggatataaagaatttgctgactgcatgtactattttttacattactacattggctacggcagatatacctacttcgtcactgccacacgctccggtaaacggggcatgtgacgagggagaatatcttgataagaggcataatcaatgttgtaatcagtgtccacctggagaatttgccaaggtcagatgtaatggtaacgataacacaaaatgtgaacgctgcccacctcatacatataccgcaatccccaattactctaatggatgtcatcaatgtagaaaatgcccaacaggatcatttgataaggtaaagtgtaccggaacacagaacagtaaatgttcgtgtcttcctggttggtattgcgctactgattcttcacagactgaagattgtcgagattgtataccaaaaaggagatgtccatgcggatactttggtggaatagatgaacaaggaaatcctatttgtaaatcgtgttgtgttggtgaatattgcgactacctacgtaattatagacttgatccatttcctccatgcaaactatctaaatgtaattaattatgattttgatgataatgttaccatacattatatcgctacttggttagtgtattattcagtatgaagacctattaataattacttatcttttgacgatcttgttataattataatataaaaacttatggcatagtaacttataattgctgacgcgataaattcgtaataatctgttttgttcaaaggaatctacaggcataaaaataaaaatataatttataatatactcttacagcgcgccatcatgaataacagcagtaaattaattgctgttattaatggatttagaaatagtggacgattttgtgatattaatatagttattaatgatgaaaggataaacgctcacagactcatcctatctggagcctccgaatatttttccattctgttttccaataattttatcgattctaatgaatacgaagttaatctaagtcatttagattatcaaagcgtaaacgatttgatcgattacatttatgggatacctttgagcctaactaacgataacgtgaaatatattctttcaaccgctgattttttacaaattggatctgctattacggagtgtgaaaattacatacttaaaaatctttgttctagaaactgtatcgatttctacatatacgctgataaatataataacaagaaaatagaatcagcgtcgtttaacacaatattacaaaatattttgagactcatcaacgatgaaaactttaaatacttaacagaggaatcaatgataaaaattttaagcgatgatatgttaaatataaaaaatgaggatttcgccccactaattctcattaaatggttagagagtactcaacaatcatgcaccgtcgagttacttagatgcctcagaatatcattgctttccccacaagttataaaatcactttatagtcatcaactggttagttcaatctacgaatgtataacattcttaaacaatatagcattcttggatgaatcatttcctagataccatagcatcgagttgatatctatcggtataagtaattcgcatgataagatttccataaactgctacaatcataaaaaaaatacatgggaaatgatatcttcacgtagatataggtgtagtttcgcagtggccgtcctggataatattatctatatgatgggtggatatgatcagtccccgtatagaagttcaaaggttatagcgtacaatacatgtacaaattcttggatatatgatataccagagctaaaatatcctcgttctaattgtgggggactggctgatgacgaatacatttattgtataggcggcatacgcgatcaggattcatcgttgacatctagtattgatagatggaagccatcaaaaccatattggcagaagtatgctaaaatgcgcgaaccaaaatgtgatatgggggttgcgatgttaaacggattaatatatgttataggtggaatcgttaaaggtgacacgtgtaccgacgcactagagagtttatcagaagatggatggatgaagcatcaacgtcttccaataaaaatgtccaatatgtcgacgattgttcatgatggcaagatttatatatctggaggttacaacaatagtagtgtagttaatgtaatatcgaatctagtccttagctataattcgatatatgatgaatggaccaaattatcatcattaaacattcctagaattaatcccgctctatggtcagcgcataataaattatatgtaggaggaggaatatctgatgatgttcgaactaatacatctgagacatacgacaaagaaaaagattgttggacattggataatggtcacgtgttaccacgcaattatataatgtataaatgcgaaccgattaaacataaatatccattggaaaaaacacagtacacgaatgattttctaaagtatttggaaagttttataggtagttgatagaacaaaatacataattttgtaaaaataaatcactttttatactaatatgacacgattaccaatacttttgttactaatatcattagtatactctacaccttctcctcagacatctaaaaaaataggtgatgatgcaactctatcatgtaatcgaaataatacaaatgactacgttgttatgagtgcttggtataaggagcccaattccattattcttttagctgctaaaagcgacgtcttgtattttgataattataccaaggataaaatatcttacgactctccatacgatgatctagttacaactatcacaattaaatcattgactgctagagatgccggtacttatgtatgtgcattctttatgacatcgcctacaaatgacactgataaagtagattatgaagaatactccacagagttgattgtaaatacagatagtgaatcgactatagacataatactatctggatctacacattcaccggaaactagttctgagaaacctgattatatagataattctaattgctcgtcggtattcgaaatcgcgactccggaaccaattactgataatgtagaagatcatacagacaccgtcacatacactagtgatagcattaatacagtaagtgcatcatctggagaatccacaacagacgagactccggaaccaattactgataaagaagatcatacagtcacagacactgtctcatacactacagtaagtacatcatctggaattgtcactactaaatcaaccaccgatgatacgtacaatgataatgatacagtaccaccaactactgtaggcggtagtacaacctctattagcaattataaaaccaaggactttgtagaaatatttggtattaccgcattaattatattgtcggccgtggcaatattctgtattacgtattatatatgtaataaacgttcacgtaaatacaaaacagagaacaaagtctagatttttgacttacataaatgtctgggatagtaaaatctatcatattgagcgggccatctggtttaggaaagacagccatagccaaaagactatgggaatatatttggatttgtggtgtcccataccactagatttcctcgtcctatggaacgagaaggtgtcgattaccattacgttaacagagaggccatctggaagggaatagccgccggaaactttctagaacatactgagtttttaggaaatatttacggaacttctaaaactgctgtgaatacagcggctattaataatcgtatttgtgtgatggatctaaacatcgatggcgttagaagtcttaaaaatacgtacctaatgccttactcggtgtatataagacctacctctcttaaaatggttgagaccaagcttcgttgtagaaacactgaagcggatgatgagattcatcgtcgtgtgatgttggcaaaaactgacatggatgaggcaggtgaagccggtctattcgacactattatcattgaagatgatgtgaatttagcatatagtaagttaattcagatactacaggaccgtattagaatgtattttaacactaattagagacttaagacttaaaacttgataattaataatataactcgtttttatatgtggctatttcaacgtctaatgtattagttaaatattaaaacttaccacgtaaaacttaaaatttaaaatgatatttcattgacagatagatcacacattatgaactttcaaggacttgtgttaactgacaattgcaaaaatcaatgggtcgttggaccattaataggaaaaggtggatttggtagtatttatactactaatgacaataattatgtagtaaaaatagagcccaaagctaacggatcattatttaccgaacaggcattttatactagagtacttaaaccatccgttatcgaagaatggaaaaaatctcacaatataaagcacgtaggtcttatcacgtgcaaggcatttggtctatacaaatccattaatgtggaatatcgattcttggtaattaatagattaggtgcagatctagatgcggtgatcagagccaataataatagactaccaaaaaggtcggtgatgttgatcggaatcgaaatcttaaataccatacaatttatgcacgagcaaggatattctcacggagatattaaagcgagtaatatagtcttggatcaaatagataagaataaattatatctagtggattacggattggtttctaaattcatgtctaacggcgaacatgttccatttataagaaatccaaataaaatggataacggtactctagaatttacacctatagattcgcataaaggatacgttgtatctagacgtggagatctagaaacacttggatattgtatgattagatggttgggaggtatcttgccatggactaagatatctgaaacaaagaattgtgcattagtaagtgccacaaaacagaaatatgttaacaatactgcgactttgttaatgaccagtttgcaatatgaacctagagaattgctgcaatatattaccatggtaaactctttgacatattttgaggaacccaattacgacgagtttcggcacatattaatgcagggtgtatattattaagtgtggtgtttggtcgataaaaattaaaaaataacttaatttattattgatctcgtgtgtacaaccgaaatcatggcgatgttttacgcacacgctctcggtgggtacgacgagaatcttcatgcctttcctggaatatcatcgactgttgccaatgatgtcaggaaatattctgttgtgtcagtttataataacaagtatgacattgtaaaagacaaatatatgtggtgttacagtcaggtgaacaagagatatattggagcactgctgcctatgtttgagtgcaatgaatatctacaaattggaaatccgatccatgatcaagaaggaaatcaaatctctatcatcacatatcgccacaaaaactactatgctctaagcggaatcgggtacgagagtctagacttgtgtttggaaggagtagggattcatcatcacgtacttgaaacaggaaacgctgtatatggaaaagttcaacatgattattctactatcaaagagaaggccaaagaaatgagtgcacttagtccaggacctatcatcgattaccacgtctggataggagattgtatctgtcaagttactgctgtggacgtacatggaaaggaaattatgaaaatgagattcaaaaagggtgcggtgcttccgatcccaaatctggtaaaagttaaacttggggagaatgatacagaaaatctttcttctactatatcggcggcaccatcgaggtaaccacctctctggaagacagcgtgaataatgtactcatgaaacgtttggaaactatacgccatatgtggtctgttgtatatgatcattttgatattgtgaatggtaaagaatgctgttatgtgcatacgcatttgtctaatcaaaatcttataccgagtactgtaaaaacaaatttgtacatgaagactatgggatcatgcattcaaatggattccatggaagctctagagtatcttagcgaactgaaggaatcaggtggatggagtcccagaccagaaatgcaggaatttgaatatccagatggagtggaagacactgaatcaattgagagattggtagaggagttcttcaatagatcagaacttcaggctggtgaatcagtcaaatttggtaattctattaatgttaaacatacatctgtttcagctaagcaactaagaacacgtatacggcagcagcttccttctatactctcatcttttaccaacacaaagggtggatatttgttcattggagttgataataatacacacaaagtatttggattcacggtgggttacgactacctcagactgatagagaatgatatagaaaagcatatcaaaagactttgtgttgtgtatttctgtgagaagaaagaggacatcaagtacgcgtgtcgattcatcaaggtatataaacctggggatgaggctacctcgacatacgtgtgcgctatcaaagtggaaagatgctgttgtgctgtgtttgcagattggccagaatcatggtatatggatactaatggtatcaagaagtattctccagatgaatgggtgtcacatataaaattttaattaatgtaactatagagaacaaataataaggttgtaatatcatatagacaataactaacaattaattagtaactgttatctcttttttaattaaccaactaactatatacctattaatacatcgtaattatagttcttaacatctattaatcattaattcgcttctttaattttttataaactaacattgttaattgaaaagggataacatgttacagaatataaattatatatggatttttttaaaaaggaaatacttgactggagtatatatttatctcttcattatatagcacgcgtgttttccaatttttccacatcccatataatacaggattataatctcgttcgaacatacgagaaagtggataaaacaatagttgattttttatctaggttgccaaatttattccatattttagaatatggggaaaatattctacatatttattctatggatgatgctaatacgaatattataattttttttctagatagagtattaaatattaataagaacgggtcatttatacacaatctcgggttatcatcatccattaatataaaagaatatgtatatcaattagttaataatgatcatccagataataggataagactaatgcttgaaaatggacgtagaacaagacattttttgtcctatatatcagatacagttaatatctatatatgtattttaataaatcatggattttatatagatgccgaagacagttacggttgtacattattacatagatgtatatatcactataagaaatcagaatcagaatcatacaatgaattaattaagatattgttaaataatggatcagatgtagataaaaaagatacgtacggaaacacaccttttatcctattatgtaaacacgatatcaacaacgtggaattgtttgagatatgtttagagaatgctaatatagactctgtagactttaatagatatacacctcttcattatgtctcatgtcgtaataaatatgattttgtaaagttattaatttctaaaggagcaaatgttaatgcgcgtaataaattcggaactactccattttattgtggaattatacacggtatctcgcttataaaactatatttggaatcagacacagagttagaaatagataatgaacatatagttcgtcatttaataatttttgatgctgttgaatctttagattatctattatccagaggagttattgatattaactatcgtactatatacaacgaaacatctatttacgacgctgtcagttataatgcgtataatacgttggtctatctattaaacaaaaatggtgattttgagacgattactactagtggatgtacatgtatttcggaagcagtcgcaaacaacaacaaaataataatggaagtactattgtctaaacgaccatctttgaaaattatgatacagtctatgatagcaattactaaacataaacagcataatgcagatttattgaaaatgtgtataaaatatactgcgtgtatgaccgattatgatactcttatagatgtacagtcgctacagcaatataaatggtatattttaagatgtttcgatgaaatagatatcatgaagagatgttatataaaaaataaaactgtattccaattagttttttgtatcaaagacattaatactttaatgagatacggtaaacatccttctttcgtgaaatgcactagtctcgacgtatacggaagtcgtgtacgtaatatcatagcatctattagatatcgtcagagattaattagtctattatccaagaagctggatcctggagataaatggtcgtgttttcctaacgaaataaaatataaaatattggaaaactttaacgataacgaactatccacatatctaaaaatcttataaacattattaaaatataaaatctaagtaggataaaatcacactacatcattgtttccttttagtgctcgacagtgtatactatttttaacgctcataaataaaaatgaaaacgatttccgttgttacgttgttatgcgtactacctgctgttgtttattcaacatgtactgtacccactatgaataacgctaaattaacgtctaccgaaacatcgtttaatgataaccagaaagttacgtttacatgtgatcagggatatcattctttggatccaaatgctgtctgtgaaacagataaatggaaatacgaaaatccatgcaaaaaaatgtgcacagtttctgattatgtctctgaactatataataaaccgctatacgaagtgaattccaccatgacactaagttgcaacggcgaaacaaaatattttcgttgcgaagaaaaaaatggaaatacttcttggaatgatactgttacgtgtcctaatgcggaatgtcaacctcttcaattagaacacggatcgtgtcaaccagttaaagaaaaatactcatttggggaatatatgactatcaactgtgatgttggatatgaggttattggtgcttcgtacataagttgtacagctaattcttggaatgttattccatcatgtcaacaaaaatgtgatatgccgtctctatctaacggattaatttccggatctacattttctatcggtggcgttatacatcttagttgtaaaagtggttttacactaacggggtctccatcatccacatgtatcgacggtaaatggaatcccatactcccaatatgtgtacgaactaacgaaaaatttgatccagtggatgatggtcccgacgatgagacagatttgagcaaactctcgaaagacgttgtacaatatgaacaagaaatagaatcgttagaagcaacttatcatataatcatagtggcgttgacaattatgggcgtcatatttttaatctccgttatagtattagtttgttcctgtgacaaaaataatgaccaatataagttccataaattgctaccgtaaatataaatccgttaaaataattaataatttaataacaaacaagtatcaaaagattaaagacttatagctagaatcaattgagatgtcttcttcagtggatgttgatatctacgatgccgttagagcatttttactcaggcactattataacaagagatttattgtgtatggaagaagtaacgccatattacataatatatacaggctatttacaagatgcgccgttataccgttcgatgatatagtacgtactatgccaaatgaatcacgtgttaaacaatgggtgatggatacacttaatggtataatgatgaatgaacgcgatgtttctgtaagcgttggcaccggaatactattcatggaaatgtttttcgattacaataaaaatagtatcaacaatcaactaatgtatgatataattaatagcgtatctataattctagctaatgagagatatagaagcgcttttaacgacgatggtatatacatccgtagaaatatgattaacaagttgtacggatacgcatctctaactactattggcacgatcgctggaggtgtttgttattatctgttgatgcatctagttagtttgtataaataattatttcaatatactagttaaaattttaagattttaaatgtataaaaaactaataacgtttttatttgtaataggtgcattagcatcctattcgaataatgagtacactccgtttaataaactgagtgtaaaactctatatagatggagtagataatatagaaaattcatatactgatgataataatgaattggtgttaaattttaaagagtacacaatttctattattacagagtcatgcgacgtcggatttgattccatagatatagatgttataaacgactataaaattattgatatgtataccattgactcgtctactattcaacgcagaggtcacacgtgtagaatatctaccaaattatcatgccattatgataagtacccttatattcacaaatatgatggtgatgagcgacaatattctattactgcagagggaaaatgctataaaggaataaaatatgaaataagtatgatcaacgatgatactctattgagaaaacatactcttaaaattggatctacttatatatttgatcgtcatggacatagtaatacatattattcaaaatatgatttttaaaaatttaaaatatattatcacttcagtgacagtagtcaaataacaaacaacaccatgagatatattataattctcgcagttttgttcattaatagtatacatgctaaaataactagttataagtttgaatccgtcaattttgattccaaaattgaatggactggggatggtctatacaatatatcccttaaaaattatggcatcaagacgtggcaaacaatgtatacaaatgtaccagaaggaacatacgacatatccgcatttccaaagaatgatttcgtatctttctgggttaaatttgaacaaggcgattataaagtggaagagtattgtacgggactatgcgtcgaagtaaaaattggaccaccgactgtaacattgactgaatacgacgaccatatcaatttgtacatcgagcatccgtatgctactagaggtagcaaaaagattcctatttacaaacgcagtgacatgtgtgatatctacttgttgtatacggctaacttcacattcggagattctaaagaaccagtaccatatgatatcgatgactacgattgcacgtctacaggttgcagcatagactttgtcacaacagaaaaagtgtgcgtgacagcacagggagccacagaagggtttctcgaaaaaattactccatggagttcgaaagtatgtctgacacctaaaaagagtgtatatacatgcgcaattagatccaaagaagatgttcccaatttcaaggacaaaatggccagagttatcaagagaaaatttaatacacagtctcaatcttatttaactaaatttctcggtagcacatcaaatgatgttaccacttttcttagcatgcttaacttgactaaatattcataactaatttttattaatgaaataaaactgcatattatacactggttaacgcccttataggctctaaccattttcaagatgaggtccctgattatagtccttctgttcccctccatgtctattagacgatgtgagaagactgaagaggaaacatggggattgaaaatagggttgtgtataattgccaaagatttttatcccgaaagaactgattgcagtgttcatctcccaactgcaagtgaaggattcagggatatacgaaacaccgataaattataaaaaaagcaatgtgtccgctgtttccgttaataatactattttcgtaactggcggattattcataaataactctaatagcacgatcgtggttaacaatatggaaaacttgacatttataaagacaaacaatggtcgattatagaaatgcctatggctagggtatatcacggcatcgactcgacatttggaatgttatattttgccggaggtctatccgttaccgaacaatatggtaatttagagaaaaacaacgagatatcttgttacaatcctagaacgaataagtggtttgatatttcatatactatttataagatatccatatcatcattgtgtaaactaaataacgtcttctatgtatttagtaaggacattggatatgtggaaaagtatgatggtgcatggaagttagtacatgatcgtctccccgctataaaggcattatcaacttctccttattgattgaaaatataaatagtttttatgtatagcagtattaccctatagttttattgcttactactaacatggatacagatacagatacagatacagatacagatacagatacagatgttacaaatgtagaagatatcataaatgaaatagatagagagaaagaagaaatactaaaaaatgtagaaattgaaaataataaaaacattaacaagaatcatcccaatgaatatattagagaagcactcgttattaatacaagtagtaatagtgattccattgataaagaagttatagaatgtatctgtcacgatgtaggaatatagatcatatctactaatttttataatcgatacaaaacataaaaaacaactcgttattacatagcaggcatggaatccttcaagtattgttttgataacgatggcaagaaatggattatcggaaatactttatattctggtaattcaatactctataaggtcagaaaaaatttcactagttcgttctacaattacgtaatgaagatagatcacaaatcacacaagccattgttgtttgaaatacgattctatatatctgtattggatcctttgactatcgacaactggacacgggaacgtggtataaagtatttggctattccagatctgtatggaattggagaaaccgatgattatatgttcttcgttataaagaattcgggaagagtattcgccccaaaggatactgaatcagtcttcgaagcatgcgtcactatgataaacacgttagagtttatacactctcgaggatttacccatggaaaaatagaaccgaggaatatactgattagaaataaacgtctttcactaattgactattctagaactaacaaactatacaagagtggaaactcacatatagattacaacgaggacatgataacttcaggaaatatcaattatatgtgtgtagacaatcatcttggagcaacagtttcaagacgaggagatttagaaatgttgggatattgcatgatagaatggttcggtggcaaacttccatggaaaaacgaaagtagtataaaagtaataaaacaaaaaaaagaatataaaaaatttatagctactttctttgaggactgttttcctgaaggaaatgaacctctggaattagttagatatatagaattagtatacacgttagattattctcaaactcctaattatgacagactacgtaaactgtttatacaagattgaaattatattcttttttttatagagtgtggtagtgttacggatatctaatattaatattagactatctctatcgcgctacacgaccaatatcgattactatggatatcttctatgaaaggagagaatgtattcatttctccagcgtcaatctcgtcagtattgacaatactgtattatggagctaatggatccactgctgaacagctatcgaaatatgtagaaacggaggagaacacggataaggttagcgctcaaaatatctcattcaaatccataaataaagtatatgggcgatattctgccgtgtttaaagattcctttttgagaaaaattggcgataagtttcaaactgttgacttcactgattgtcgcactatagatgcaatcaacaagtgtgtagatatctttactgaggggaaaatcaatccactattggatgaaccattgtctcctagcaattagtgccgtatactttaaagcaaaatggttgacgccattcgaaaaggaatttaccagtgattatcccttttacgtatctccgacggaaatggtagacgtaagtatgatgtctatgtacggcaaggcatttaatcacgcatctgtaaaagaatcattcggcaacttttcaatcatagaactgccatatgttggagatactagtatgatggtcattcttccagacaagattgatggattagaatccatagaacaaaatctaacagatacaaattttaagaaatggtgtgactttatggatgctatgtttatagatgttcacattcccaagtttaaggtaacaggctcgtataatctggtggatactctagtaaagtcaggactgacagaggtgttcggttcaactggagattatagcaatatgtgtaatttagatgtgagtgtcgacgctatgatccacaaaacgtatatagatgtcaatgaagagtatacagaagcagctgcagcaacttctgtactagtggcagactgtgcatcaacaattacaaatgagttctgtgcagatcatccgttcatctatgtgattaggcatgttgatggaaaaattcttttcgttggtagatattgctctccgacaactaattgttaaccattttttttaaaaaaaatagaaaaaacatgtggtattagtgcaggtcgttgttcttccaattgcaattggtaagatgacggccaactttagtacccacgtcttttcaccacagcactgtggatgtgacagactgaccagtattgatgacgtcaaacaatgtttgactgaatatatttattggtcgtcctatgcataccgcaacaggcaatgcgctggacaattgtattccacactcctctcttttagagatgatgcggaattagtgttcatcgacattcgcgagctggtaaaaaatatgccgtgggatgatgtcaaagattgtacagaaatcatccgttgttatataccggatgagcaaaaaaccatcagagagatttcggccatcatcggactttgtgcatatgctgctacttactggggaggtgaagaccatcccactagtaacagtctgaacgcattgtttgtgatgcttgagatgctcaattacgtggattataacatcatattccggcgtatgaattgatgagttgtacatcttgacattttctttcttctcttctccctttcttctcttctccctttcttctcttctcccttcctccctcttctccctttcccagaaacaaacttttttacccactataaaataaaatgagtatactacctattatatttcttcctatatttttttattcttcattcgttcagacttttaacgcgcctgaatgtatcgacaaagggcaatattttgcatcattcatggagttagaaaacgagccagtaatcttaccatgtcctcaaataaatacgctatcatccggatataatatattagatattttatgggaaaaacgaggagcggataataatagaattataccgatagataatggtagcaatatgctaattctgaacccgacacaatcagactctggtatttatatatgcattaccacgaacgaaacctactgtgacatgatgtcgttaaatttgacaatcgtgtctgtctcagaatcaaatatagatcttatctcgtatccacaaatagtaaatgagagatctactggcgaaatggtatgtcccaatattaatgcatttattgctagtaacgtaaacgcagatattatatggagcggacatcgacgccttagaaataagagacttaaacaacggacacctggaattattaccatagaagatgttagaaaaaatgatgctggttattatacatgtgttttagaatatatatacggtggcaaaacatataacgtaaccagaattgtaaaattagaggtacgggataaaataataccttctactatgcaattaccagatggcattgtaacttcaataggtagtaatttgactattgcatgcagagtatcgttgagacctcccacaacggatgcagacgtcttttggataagtaatggtatgtattacgaagaagatgatggggacggagacggtagaataagtgtagcaaataaaatctatatgaccgataagagacgtgttattacatcccggttaaacattaatcctgtcaaggaagaagatgctacaacgtttacgtgtatggcgtttactattcctagcatcagcaaaacagttactgttagtataacgtgaatgtatgttgttacatttccatgtcaattgagtttataagaatttttatacattatcttccaacaaacaattgacgaacgtattgctatgattaactcccacgatactatgcatattattaatcattaacttgcagactatacctagtgctattttgacatactcatgttcttgtgtaattgcagtatctatattattaaagtacgtaaatctagctatagttttattatttaattttagataatataccgtctccttatttttaaaaattgccacatcctttattaaatcatgaatgggaatttctatgtcatcgttagtatattgtgaacaacaagagcagatatctataggaaagggtggaatgcgatacattgatctatgtagttttaaaacacacgcgaactttgaagaatttatataaatcattccatcgatacatccttctatgttgagatgtatatatccaggaattcttttattaatgtcgggaaatgtataaactaaaacattgcccgaaagcggtgcctctatctgcgttatatccgttcttaacttacaaaatgtaaccaatacctttgcatgacttgttttgttcggcaacgttagtttaaacttgacgaatggattaattacaatagcatgatccgcgcatctattaagtttttttactttaacgcccttgtatgtttttacagagactttatctaaatttctagtgcttgtatgtgttataaatataacgggatatagaaccgaatcacctaccttagatacccaattacattttatcagatccagataataaacaaattttgtcgccctaactaattctatattgttatatattttacaattggttatgatatcatgtaataacttggagtctaacgcgcatcgtcgtacgtttatacaattgtgatttagtgtagtatatctacacatgtatttttccgcactatagtattctggactagtgataaaactatcgttatatctgtcttcaatgaactcatcgagatattgctctctgtcatattcatacacctgcataaactttctagacatcttacaatccgtgttattttaggatcatatttacatatttacgggtatatcaaagatgttagattagttaatgggaatcgtctataataatgaatattaaacaattatatgaggacttttaccacaaagcatcataaaaatgagtcgtcgtctgatttatgttttaaatatcaaccgcgaatcaactcataaaatacaagagaatgaaatatatacatattttagtcattgcaatatagaccatacttctacagaacttgattttgtagttaaaaactatgatctaaacagacgacaacctgtaactgggtatactgcactacactgctatttgtataataattactttacaaacgatgtactgaagatattattaaatcatgacgtaaatgtaacgatgaaaaccagtagcggacgtatgcctgtttatatattgcttactagatgttgtaatatttcacatgatgtagtgatagatatgatagacaaagataaaaaccacttattacatagagactattccaacctattactagagtatataaaatctcgttacatgttattaaaggaagaggatatcgatgagaacatagtatccactttattagataagggaatcgatcctaactttaaacaagacggatatacagcgttacattattattatttgtgtctcgcacacgtttataaaccaggtgagtgtagaaaaccgataacgataaaaaaggccaagcgaattatttctttgtttatacaacatggagctaatctaaacgcgttagataattgtggtaatacaccattccatttgtatcttagtattgaaatgtgtaataatattcatatgactaaaatgctgttgacttttaatccgaatttcgaaatatgtaataatcatggattaacgcctatactatgttatataacttccgactacatacaacacgatattcttgttatgttaatacatcactatgaaacaaatgttggagaaatgccgatagatgagcgtcgtatgatcgtattcgagtttatcaaaacatattctacacgtccggcagattcgataacttatttgatgaataggtttaaaaatataaatatttatacccgctatgaaggaaagacattattacacgtagcatgtgaatataataatacacacgtaatagattatcttatacgtatcaacggagatataaatgcgttaaccgacaataacaaacacgctacacaactcattatagataacaaagaaaattccccatataccattaattgtttactgtatatacttagatatattgtagataagaatgtgataagatcgttggtggatcaacttccatctctacctatctttcgtcgcttatcatactagtcatatcctaaatgttgatcatattccaccaaatgattgtgaaagagattgagattaaatcgtctaacaaacaattagtttttatgacattaacatataataaataaattaatcattattgacttaacgatgacgaaagttatcatcatcttaggattcttgattattaatacaaattcattgtctatgaaatgtgaacaaggtgtctcatattataattcacaagaattaaagtgttgtaaactatgtaagccaggaacatattcagatcatcgatgtgataaatacagcgataccatttgtggacattgtccgagtgacacattcacgtcaatatataatcgttctccttggtgtcatagttgtagaggtccatgtggtactaatcgagtagaggtcacaccttgtacacctaccacaaatagaatctgtcattgtgactcgaatagttattgtctccttaaagcttctgatggtaactgtgttacatgtgctcctaaaacaaaatgtggtcgtgggtatggaaagaaaggagaagatgaaatgggtaataccatttgtaagaaatgtcggaagggtacttattcagatattgtatctgactctgatcaatgtaaaccaatgacaagataagacttactcgcatctactggatagacataaaatatcctcctcgtaataatgaaatataaatatacactaattattaatatcaataacaatcgagtattaatatataggtcatttttaaatcccttttgggttccgtcccaaacggcgtttcggtctgcgtcgccgccatggccatgccgagcctctccgcgtgctcctccatcgaggacgacttcaactatggcagctcggtggcgtctgccagcgtgcacatacgaatggcatttctaagaaaagtctacggtatcctttgtctacaatttcttttaacaacggcaacaactgcagtatttttatactttgactgcatgcggacatttatacaagggagtcctgttctaatattggcatcaatgttcggatctataggcttgattttcgcattgactttacacagacataaacatcccctgaatctgtacctgctttgtggatttacactgtcggaatctctaacgctggcctctgttgttactttctatgatgtgcatgtcgttatgcaagctttcatgctgactactgcagcgtttcttgctctgactacatatactctacaatcaaagagagatttcagtaaacttggagcaggattgtttgctgctttgtggattttaattttgtcaggactcttggggatatttgtgcaaaatgagacagtggagctggtcctgtctgcttttggggcccttgtattctgtggattcattatctatgacacgcactcactaatacataagctctcgcctgaagagtatgtgttagcctctatcaatctctacttggatatcatcaatctgttcttgcatctgttgcagcttttggaagtatctaataagaaataaagtttaaaatagaattaataaaaacatataggtcattttttaaacatggattggaaaccaaggtagttagttaatacacacaagatatatttttttcacatcatccacccatgggtaacaccaaggttgttagttaataatatacaagatattttttctcactctgatccatgtaaaccaaggacgagataagacactctcattcctcatccacaacccattaaaaaaatggaaattaaagccctctattagcataaacggctacaggtctacctttacaatggcctctccttgtgcccagttcagaccctgtcattgccacgctactaaggactccctgaataccgtggccgacgtcagacattgtctgactgaatacatcctgtgggtttctcatagatggacccatagagaaagcgcagggtctctctacaggcttctcatctctttcagaactgatgcaacggagctctttggtggtgagttgaaggattcacttccgtgggacaattgcgtggagatcattaaatgtttcatcagaaatgactccatgaaaaccgccgaagaacttcgtgcaatcattggactttgtactcaatcagctatcgtctctggaagagtcttcaacgataagtatatcgacatactacttatgctgcgaaagattctgaacgagaacgactatctcaccctcttggatcatatccgcactgctaaatactaaatctccttcatgctctctcactacactttttatcatcttatgaggaatgattgccttcgtgaaataggaataattagcaccagaatagctatggattattgtggtagagagtgcactattctatgtcgtctactggatgaagatgtgacgtacaaaaaaataaaactagaaattgaaacgtgtcacaacttatcaaaacatatagatagacgaggaaacaatgcgctacattgttacgtctccaataaatgcgatacagacattaagattgttctctcgcggagtcgagagactttgtagaaacaacgaaggattaactccgctaggagtatacagtaagcatagatacgtcaaatctcaaattgtgcatctactgatatccagctattcgaattcctctaacgaactcaagtcgaatataaatgatttcgatctgtattcggataatatcgacttacgtctgctaaaatacctaattgtggataaacggatacgtccgtccaagaatacgaattatgcaatcaatggtctcggattggtggatatatacgtaacgacgcctaatccgagaccagaagtattgctatggcttcttaaatcagaatgttacagcaccggttacgtatttcgtacctgtatgtacgacagtgatatgtgtaagaactctcttcattactatatatcgtctcatagagaatctcaatctctatccaaggatgtaattaaatgtttgatcgataacaatgtttccatccatggcagagacgaaggaggatctttacccatccaatactactggtctttctcaaccatagatatagagattgttaaattattattaataaaggatgtggacacgtgtagagtatacgacgtcagccctatattagaggcgtattatctaaacaagcgatttagagtaaccccatataatgtagacatggaaatcgttaatcttcttattgagagacgtcatactcttgtcgacgtaatgcgtagtattacttcgtacgattccagagaatataaccactacatcatcgataacattctaaagagatttagacaacaggatgtacaagccatactgataaactacttacattacggcgatatggtcgttcgatgcatgttggataacggagcaaccatggataagacgacggacaacaactatcctctacacgactactttgttaataataatctcgtcgatgtaaacgtcgtaaggtttatcgtggaaaatatggacacgcggctgtaaatcacgtatcgaacaatggccgtctatgtatgtacggtctgatattatcgagatttaataattgcgggtatcactgttatgaaaccatactgatagatgtatttgatatactaagcaagtacatggatgatatagatatgatcgataactctactatattacgcggtcgatgtcaataatatacaatttgcaaagcggttattggaatatggagcgagtgtcacgctcgataatcaatacggccatccagaaaagcagttaccaaagagaaaacaaaacgaagctagttgatttattactgagttaccatcccactctagagactatgattgacgcatttaatagagatatacgctatctatatcctgaaccattattcgcctgtatcagatacgccttaatcctagatgatgattttccttctaaagtaaagtatgatatcgccggtcgtcataaggaactaaagcgctatagagtagacattaatagaatgaagaatgtctacatatcaggcgtttccatgtttgatatattatttaaacgaagcaaacgccacagattgagatacgcaaagaatccgacatcaaatggtacaaaaaagaactaacgtccatcattacagaaactgtaaagaacaatgagaggatcgactccatagtggacaacattaatacagacgataacttgatttcgaaattacccatggagatactttattactccattaaataatttatcatggagcgataatgtcctgtttcatttgtttccatgacatattacaaaatcgattccgtccaagatgataaaaacatttaccggcatcataaacacggagtttattttatatgtctcgcataaacattactaaaaaaatatattgttcggtttttctttcacatctttaattatgaaaaagtaaatcattatgagatggacgagattgtacgcatcgttcgcgacagtatgtggtacatacctaacgtatttatggacgacggtaagaatgaaggtcacgtttctgtcaacaatgtctgtcatatgtattttacgttctttgatgtagatacatcgtctcatctgtttaagctagttattaaacactgcgatctgaataaacgaggtaactctccattacattgctatacgatgaatacacgatttaatccatctgtattaaagatattgttacaccacggcatgcgtaactttgatagcaaggatgaccactatcaatcgataacaagatctttgatatactaacggacaccattgatgactttagtaaatcatccgatctattgctgtgttatcttagatataaattcaatgggagcttaaactattacgttctgtacaaaggatccgaccctaattgcgccgacgaggatgaactcacttctcttcattactactgtaaacacatatccacgttctacgaaagcaattattacaagtcaagtcacactaagatgcgagccgagaagcgattcatctacgcgataatagattatggagcaaacattaacgcggttacacacttaccttcaacagtataccaaacatagtcctcgtgtggtgtatgctcttttatctcgaggagccgatacgaggatacgtaataatcttgattgtacacccatcatggaacgattgtgcaacaggtcatattctcataatgttactcaattggcacgaacaaaaggaagaaggacaacatctactttatctattcataaaacataatcaaggatacactctcaatatactacggtatctattagataggttcgacattcagaaagacgaatactataataccgcctttcaaaattgtaacaacaatgttgcctcatacatcggatacgacatcaaccttccgactaaagacggtattcgacttggtgtttgaaaacagaaacatcatatacaaggcggatgttgtgaatgacatcatccaccacagactgaaagtatctctacctatgattaaatcgttgttctacaagatgtctctccctacgacgattactacgtaaaaaagatactagcctactgcctattaagggacgagtcattcgcggaactacatagtaaattctgtttaaacgaggactataaaagtgtatttatgaaaaatatatcattcgataagatagattccatcatcgtgacataagtcgcctcaaagagattcgaatctccgacaccgacctgtatacggtatcacagctatcttaaagccatacattcagacagtcacatttcatttcccatgtacgacgatctcatagaacagtgccatctatcgatggagcgtaaaagtaaactcgtcgacaaagcactcaataaattagagtctaccatcggtcaatctagactatcgtatttgcctccggaaattatgcgcaatatcatctaaacagtatgttgtacggaaagaaccattacaaatattatccatgatagaaagaaaatatctatatgattggagaagtaggaaacaggaacaagacaacgattactacattattaaatcatgaagtccgtattatactcgtatatattgtttctctcatgtataataataaacggaagagatatagcaccgcatgcaccatccgatggaaagtgtaaagacaacgaatacaaacgccataatttgtgtccgggaacatacgcttccagattatgcgatagcaagactaacacacaatgtacgccgtgtggttcgggtaccttcacatctcgcaataatcatttacccgcttgtctaagttgtaacggaagacgcgatcgtgtaacacgactcacaatagaatctgtgaatgctctcccggatattattgtcttctcaaaggatcatccggatgcaaggcatgtgtttcccaaacaaaatgtggaataggatacggagtatccggagacgtcatctgttctccgtgtggtctcggaacatattctcacaccgtctcttccgcagataaatgcgaacccgtacccagaaatacgtttaactatatcgatgtggaaattaacctgtatccagttaacgacacgtcgtgtactcggacgaccactaccggtctcagcgaatccatctcaacgtcggaactaactattactatgaatcataaagactgtaatcccgtctttcgtgatggatacttctccgttcttaataaggtagcgacttcaggtttctttacaggagaaaggtgtgcactctgaatttcgagattaaatgcaataacaaagattcttcctccaaacagttaacgaaagcaaagaatgatactatcatgccgcattcggagacagtaactctagtgggcgacatctatatactatatagtaataccaatactcaagactacgaaactgatacaatctcttatcatgtgggtaatgttctcgatgtcgatagccatatgcccggtagttgcgatatacataaactgatcactaattccaaacccacccactttttatagtaagtttttcacccataaataataaatacaataattaatttctcgtaaaagtagaaaatatattctaatttattgcacggtaaggaagtagaatcataaagaacagtactcaatcaatagcaattatgaaacaatatatcgtcctggcatgcatgtgcctggcggcagctgctatgcctgccagtcttcagcaatcatcctcatcctcctcctcgtgtacggaagaagaaaacaaacatcatatgggaatcgatgttattatcaaagtcacaaagcaagaccaaacaccgaccaatgataagatttgccaatccgtaacggaaattacagagtccgagtcagatccagatcccgaggtggaatcagaagatgattccacatcagtcgaggatgtagatcctcctaccacttattactccatcatcggtggaggtctgagaatgaactttggattcaccaaatgtcctcagattaaatccatctcagaatccgctgatggaaacacagtgaatgctagattgtccagcgtgtccccaggacaaggtaaggactctcccgcgatcactcatgaagaagctcttgctatgatcaaagactgtgaagtgtctatcgacatcagatgtagcgaagaagagaaagacagcgacatcaagacccatccagtactcgggtctaacatctctcataagaaagtgagttacgaagatatcatcggttcaacgatcgtcgatacaaaatgcgtcaagaatctagagtttagcgttcgtatcggagacatgtgcaaggaatcatctgaacttgaggtcaaggatggattcaagtatgtcgacggatcggcatctgaaggtgcaaccgatgatacttcactcatcgattcaacaaaactcaaagcgtgtgtctgaatcgataactctattcatctgaaattggatgagtagggttaatcgaacgattcaggcacaccacgaattaaaaaagtgtaccggacactatattccggtttgcaaaacaaaaatgttcttaactacattcacaaaaagttacctctcgcgacttcttctttttctgtctcaatagtgtgatacgattatgacactattcctattcctattcctatttcctttcagagtatcacaaaaatattaaacctctttctgatggtctcataaaaaaagttttacaaaaatatttttattctctttctctctttgatggtctcataaaaaaagttttacaaaaatatttttattctctttctctctttgatggtctcataaaaaaagttttacaaaaatatttttattctctttctctctttgatggtctcataaaaaaagttttacaaaaatatttttattctctttctctctttgatggtctcataaaaaaagttttacaaaaatatttttattctctttctctctttgatggtctcataaaaaaagttttacaaaaatatttttattctctttctctctttgatggtctcataaaaaaagttttacaaaaatatttttattctctttctctctttgatggtctcataaaaaaagttttacaaaaatatttttattctctttctctctttgatggtctcataaaaaaagttttacaaaaatatttttattctctttctctctttgatggtctcataaaaaaagttttacaaaaatatttttattctctttctctctttgatggtctcataaaaaaagttttacaaaaatatttttattctctttctctctttgatggtctcataaaaaaagttttacaaaaatatttttattctctttctctctttga

SEQ ID NO: 60 - DNA, 188082 bp, Vaccinia virus
  LIVP 7.1.1 strain
atttttgtaaaactttttttatgagaccatcaaagagagaaagagaataaaaatatttttgtaaaactttttttatgagaccatcaaagagagaaagagaataaaaatatttttgtaaaactttttttatgagaccatcaaagagagaaagagaataaaaatatttttgtaaaactttttttatgagaccatcaaagagagaaagagaataaaaatatttttgtaaaactttttttatgagaccatcaaagagagaaagagaataaaaatatttttgtaaaactttttttatgagaccatcaaagagagaaagagaataaaaatatttttgtaaaactttttttatgagaccatcaaagagagaaagagaataaaaatatttttgtaaaactttttttatgagaccatcaaagagagaaagagaataaaaatatttttgtaaaactttttttatgagaccatcaaagagagaaagagaataaaaatatttttgtaaaactttttttatgagaccatcaaagagagaaagagaataaaaatatttttgtaaaactttttttatgagaccatcaaagagagaaagagaataaaaatatttttgtaaaactttttttatgagaccatcaaagagagaaagagaataaaaatatttttgtaaaactttttttatgagaccatcaaagagagaaagagaataaaaatatttttgtaaaactttttttatgagaccatcagaaagaggtttaatatttttgtgataccctgaaaggaaataggaataggaataggaataggaatagtgtcataatcgtatcacactattgagacagaaaaagaagaagtcgcgagaggtaactttttgtgaatgtagttaagaacatttttgttttgcaaaccggaatatagtgtccggtacacttttttaattcgtggtgtgcctgaatcgttcgattaaccctactcatccaatttcagatgaatagagttatcgattcagacacacgctttgagttttgttgaatcgatgagtgaagtatcatcggttgcaccttcagatgccgatccgtcgacatacttgaatccatccttgacctcaagttcagatgattccttgcacatgtctccgatacgaacgctaaactctagattcttgacacattttgtatcgacgatcgttgaaccgatgatatcttcgtaactcactttcttatgagagatgttagacccgagtactggatgggtcttgatgtcgctgtctttctcttcttcgctacatctgatgtcgatagacacctcacagtctttgatcatagcaagagcttcttcacgagtgatcgcgggagagtccttaccttgtcctggggacacgctggacaatctagcattcactgtgtttccatcagcggattctgagatggatttaatctgaggacatttggtgaatccaaagttcattctcagacctccaccgatgatggagtaataagtggtaggaggatctacatcctcgactgatgtggaatcatcttctgattccacctcgggatctggatctgactcggactctgtaatttccgttacggattggcaaatcttatcattggtcggtgtttggtcttgctttgtgactttgataataacatcgattcccatatgatgtttgttttcttcttccgtacacgaggaggaggatgaggatgattgctgaagactggcaggcatagcagctgccgccaggcacatgcatgccaggacgatatattgtttcataattgctattgattgagtactgttctttatgattctacttccttaccgcgcaataaattagaatatattttctacttttacgagaaattaattattgtatttattatttatgggtgaaaaacttactataaaaagtgggtgggtttggaattagtgatcagtttatgtatatcgcaactaccgggcatatggctatcgacatcgagaacattacccacatgataagagattgtatcagtttcgtagtcttgagtattggtattactatatagtatatagatgtcgcccactagagttactgtctccgaatgcggcatgatagtatcattctttgctttcgttaactgtttggaggaagaatctttgttattgcatttaatctcgaaattcagagtgcacacctttctcctgtaaagaatcctgaagttgctaccttattaagaacggagaagtatccatcacgaaatacgggattacagtctttatgattcatagtaatagttagttccgacgttgagatggattcgctgagaccggtagtggtcgtccgagtacacgacgtgtcgttgacgggatacagattaatttccacatcgatatagttaaacgtattactgggtacgggttcgcatttatctgcggaagagacggtgtgagaatatgttccgagaccacacggagaacagatgacgtctccggatactccgtatcctattccacattttgtttgggaaacacatgccttgcatccggatgatcctttgagaagacaataatatccgggagagcattcacagattctattgtgagtcgtgttacacgatcgcgtcttccgttacaacttagacaagcgggtaaatgattattgcgagatgtgaaggtacccgaaccacacggcgtacatcgtgtgttagtcttgctatcgcataatctggaagcgtatgttcccggacacaaattatggcgtttgtattcgttgtctttacactttccatcggatggtgcatgcggtgctatatctcttccgtttattattatacatgagagaaacaatatatacgagtataatacggacttcatgatttaataatgtagtaatcgttgtcttgttcctgtttcctacttctccaatcatatagatattttctttctatcatggataatatttgtaatggttctttccgtacaacatactgtttagatgatattgcgcataatttccggaggcaaatacgatagtctagattgaccgatggtagactctaatttattgagtgctttgtcgacgagtttacttttacgctccatcgatagatggcactgttctatgagatcgtcgtacatgggaaatgaaatgtgactgtctgaatgtatggctttaagatagctgtgataccgtatacaggtcggtgtcggagattcgaatctctttgaggcgacttatgtcacgatgatggaatctatcttatcgaatgatatatttttcataaatacacttttatagtcctcgtttaaacagaatttactatgtagttccgcgaatgactcgtcccttaataggcagtaggctagtatcttttttacgtagtaatcgtcgtagggagagacatcttgtagaacaacgatttaatcataggtagagatactttcagtctgtggtggatgatgtcattcacaacatccgccttgtatatgatgtttctgttttcaaacaccaagtcgaataccgtctttagtcggaaggttgatgtcgtatccgatgtatgaggcaacattgttgttacaattttgaaaggcggtattatagtattcgtctttctgaatgtcgaacctatctaatagataccgtagtatattgagagtgtatccttgattatgttttatgaatagataaagtagatgttgtccttcttccttttgttcgtgccaattgagtaacattatgagaatatgacctgttgcacaatcgttccatgatgggtgtacaatcaagattattacgtatcctcgtatcggctcctcgagataaaagagcatacaccacacgaggactatgtttggtatactgttgaaggtaagtgtgtaaccgcgttaatgtttgctccataatctattatcgcgtagatgaatcgcttctcggctcgcatcttagtgtgacttaacttgtaataattgctttcgtagaacgtggatatgtgtttacagtagtaatgaagagaagtgagttcatcctcgtcggcgcaattagggtcggatcctttgtacagaacgtaatagtttaagctcccattgaatttatatctaagataacacagcaatagatcggatgatttactaaagtcatcaatggtgtccgttagtatatcaaagatcttgttatcgattgatagtggtcatccttgctatcaaagttacgcatgccgtggtgtaacaatatctttaatacagatggattaaatcgtgtattcatcgtatagcaatgtaatggagagttacctcgtttattcagatcgcagtgtttaataactagcttaaacagatgagacgatgtatccacatcaaagaacgtaaaatacatatgacagacattgttgacagaaacgtgaccttcattcttaccgtcgtccataaatacgttaggtatgtaccacatactgtcgcgaacgatgcgtacaatctcgtccatctcataatgatttactttttcataattaaagatgtgaaagaaaaccgaacaatatatttttttagtaatgtttatgcgagacatataaaataaactccgtgtttatgatgccggtaaatgtttttatcatcttggacggaatcgattttgtaatatgtcatggaaacaaatgaaacaggacattatcgctccatgataaattatttaatggagtaataaagtatctccatgggtaatttcgaaatcaagttatcgtctgtattaatgttgtccactatggagtcgatcctctcattgttctttacagtttctgtaatgatggacgttagttcttttttgtaccatttgatgtcggattctttgcgtatctcaatttgtggcgtttgcttcgtttaaataatatatcaaacatggagacgcctgatatgtagacattcttcattctattaatgtctactctatagcgctttagttccttatgacgaccggcgatatcatactttactttagaaggaaaatcatcatctaggattaaggcgtatctgatacaggcgaataatggttcaggatatagatagcgtatatctctattaaatgcgtcaatcatagtctctagagtgggatggtaactcagtaataaatcaactagcttcgttttgttttctctttggtaactgcttttctggatggccgtattgattatcgagcgtgacactcgctccatattccaataaccgctttgcaaattgtatattattgacatcgaccgcgtaatatagtagagttatcgatcatatctatatcatccatgtacttgcttagtatatcaaatacatctatcagtatggtttcataacagtgatacccgcaattattaaatctcgataatatcagaccgtacatacatagacggccattgttcgatacgtgatttacagccgcgtgtccatattttccacgataaaccttacgacgtttacatcgacgagattattattaacaaagtagtcgtgcagaggatagttgttgtccgttatctaacatgcatcgaacgaccatatcgccgtaatgtaagtagtttatcaacatggcttgtacatcctgttgtctaaatctctttagaatgttatcgatgatgtagtggttatattctctggaatcgtacgaagtaatactacgcattacgtcgacaagagtatgacgtctctcaataagaagattaacgatttccatgtctacattatatggggttactctaaatcgcttgtttagataatacgcctctaatatagggctgacgtcgtatactctacacgtgtccacatcctttattaataataatttaacaatctctatatctatggttgagaaagaccagtagtattggatgggtaaagatcctccttcgtctctgccatggatggaaacattgttatcgatcaaacatttaattacatccttggatagagattgagattctctatgagacgatatatagtaatgaagagagttcttacacatatcactgtcgtacatacaggtacgaaatacgtaaccggtgctgtaacattctgatttaagaagccatagcaatacttctggtctctcgttacgtatatatccaccaatccgagaccattgattgcataattcgtattcttggacggacgtatccgtttatccacaattaggtattttagcagacgtaagtcgatattatccgaatacagatcgaaatcatttatattcgacttgagttcgttagaggaatttgaatagctggatatcagtagatgcacaatctgagattttacgtatctatgcttactgtatactcctagcggagttaatccttcgttgtttctacaaagtctctcgactccgcgagagaacaatcttaatgtctgtatcgcatttattggagacgtaacaatgtagcgcattgtttcctcgtctatctatatgttttgataagttgtgacacgtttcaatttctagttttatttttttgtacgtcacatcttcatccagtagacgacatagaatagtgcactctctaccacaataatccatagctattctggtgctaattattcctatttcacgaaggcaatcattcctcataagatgataaaaagtgtagtggagatttagtatttagcagtgcggatatgatccaagagggtgagatagtcgttctcgttcagaatctttcgcagcataagtagtatgtcgatatacttatcgttgaagactctttataaaagtctatttgtttatatttattgcggatagcagtatttccctataaaaagtatacgtcctgtggtgtctttaatcatgtacatgaatggatggtttatgtagaccttcgtacgatataccatcgaaaagttaatcgtaaatactcctgtaacggccgatgcttctgtatactcctcattaacatctataaacgtcgtatgtagaaatttttctacagtgatagtttcattacacatcttgctaaaatctgcataatatccgaatatattagtaagtcctaaattttctaaaatcggtaccagattatacggttctgtcatttccactttaaactttggcatatacaagtctatacttttagtagataacataccacaccattttttaaatttttcatctgttatatttttttctatgttatatataccttctatgtcgtccggtagtataatcaccatactagagtttccctcgtatggaatatcgataatagagaatcctccgaataattcattaatatgtacatattgcaagttattctcggtacccaccatcatatcaacgctggtaactatattcttagaaatataaaacttgtctgtatatgtaagatgtttagaaaatggatatttccacattgctttaaaatggacggcgctaacaactgtcatacgagtattaatggatagcggactagtcaataaggaattaattttaccatttgtcattgtcttaacccattcgttgattagttcctttgtttggttagcattattaaagtttacagtttgaaaatcgtcttttattttttgtaggaaggaggcgtggaactcgatactatcgctaccgtatattttatttgcggtagctagtgtcgcacaatacggaatatctacctccatgtcatcattattgtcatcgggtgtattctcattcatattctctatatattttgatagttgttcagctgtagaaccagctgctccatgatttagaatagataaagtagataaaatggaaactggagaaatcaaaacattttcatcagggtgttttaagattagttctttaaagatatccatggtatagacctaacgataacgatatatatcataaataaataatgttaaatttcaatttatgtttgtaccccgtattcatacttaacaaattggtattgcgtacacaatcaatcatattacataccattaataatgcaagcataaaaaattgttagtagatgtttctaaatataggttccgtaagcaaagaatataagaatgaagcggtaatgataaaatcaatcgttatctaaaatgatcatactcatttattttattctattatattaacacatacatttttaacagcaacacattcaatattgtattgttatttttatattatttacacaattaacaatatattattagtttatattactgaattaataatataaaattcccaatcttgtcataaacacacactgagaaacagcataaacacagaatccatcaaaaatgttgataaattatctgatgttgttgttcgctgctatgataatcagatcattcgccgatagtggtaacgctatcgaaacgacattgccagaaattacaaacgctacaacagatattccagctatcagattatgcggtccagagggagatggatattgtttacacggtgactgtatccacgctagagatattgacggtatgtattgtagatgctctcatggttatacaggcattagatgtcagcatgtagtattagtagactatcaacgttcagaaaacccaaacactacaacgtcatatatcccatctcccggtattatgcttgtattagtaggcattattatgtgttgtctattatctgtttataggttcactcgacgaactaaactacctatacaagatatggttgtgccataatttttataaatttttttatgagtatttttacaaaaatgtataaagtgtatgtcttatgtatatttataaaaatgctaagtatgcgatgtatctatgttatttgtatttatctaaacaatacctctacctctagatattatacaaaaattttttatttcggcatattaaagtaaaatctagttaccttgaaaatgaatacagtgggtggttccgtatcaccagtaagaacataatagtcaaatacagtatccgattgagattttgcatacaatactagtctagaaagaaatttgtaatcatcttctgtgacgggagtccatatatctgtatcatcgtctagtttatcagtgtcccatgctatattcctgttatcatcattagttaatgaaaataactctcgtgcttcagaaaagtcaaatattgtatccatacatacatctccaaaactatcgcttatacgtttatctttaacgatacctatacctagatggttatttactaacagacattttccagatctattgactataactcctatagtttccacatcaaccaagtaatgatcatctattgttatataacaataacataactcttttccatttttatcagtatgtatatctatatcaacgtcgtcgttgtagtgaatagtagtcattgatctattatatgaaacggatatgtctagaacggcaattgttttacgtccagttaacactttcgttgatttaaagtctagagtctttgcaaacataatatccttatccgactttatatttcctgtagggtggtataattttattttgcctccacatatcggtgtttccaaatatattactagacaatattccatatagttattagttaagggtacccaattagaacacgtacgcttattatcatcatttggatcgtatttcataaaagttattgtgttatcgatgtcaacacattctacattttttaatcgtctatatagtatttttctgatattttctataatatcagaattgtcttccatcggaagttgtatactatcggaatcagttacatgtttaaataattctctgatgtcattccttatacaatcaaattcattattaaacagtttaatagtctgtagacctttatcgtcgtaaatatccattgtcttattagttacgcttatttttatgtgtttttacgttgctttattatattttataagaatgattgtttgacgaatcacgagaactattaagacacattattaggtatatattataaaaaagtttttgattacgatgttataagaggaaagaggacacattaacatcatacatcaattaactacattcttataacatcgtaatcaaaagaattgcaattttgatgtataacaactgtcaatgggttatggaattgtatattacatattatacggtatgttggtaacgacaaataccggtcggtaattgtctgccggtgtaatagaattatatatatctatctattacaccggccttgtatacataataataagttgtggtagtatgatctccatatttataatttaggactttgtattcagtatttttggaatcataaaaaataaaaaaaagttttactaatttaaaatttaaaaagtatttacatttttttcactgtttagtcgcggatatggaattcgatcctgccaaaatcaatacatcatctatagatcatgtaacaatattacaatacatagatgaaccaaatgatataagactaacagtatgcattatccgaaatattatatcaatatcacaaaaataaatacacatttggctaatcaatttcgggcttggaaaaaacgtatcgccggaagggactatatgactaacttatctagagatacaggaatacaacaatcaaaacttactgaaactatacgtaactgtcaaaaaaatagaaacatatatggtctatatatacactacaatttagttattaattggataaccgatgtgattatcaatcaatattaagagggttggtaaattggtacatagctaataatacctatacacccaataatacaacaaccatttctgagttggatatcatcaaaatactggataaatacgaggacgtgtatagagtaagtaaagaaaaagaatgtggaatttgctatgaagttgtttactcaaaacgatagatactttggtttattggattcgtgtactcatatattttgcataacatgcatcaatatatggcatagaacacgaagagaaaccggtgcgtcggataattgtcctatatgccgtacccgttttagaaacataacaatgagcaagttctataagctagttaactaataaataaaaagtttaatttgttgacgacgtatgtcgttatttttctcgtatgaaagattaaattcaattcaattcgttgtttctaatataatctgccgtattggatggattctcaagacaattgcatttagattatattatcatgaataaaaatagtagcacacaactacttcagcaaatattcttttttgaaacgccatctatcgtagtgaggacacaagtgaacctataatgagcaaatttattagtatcagtcacatgaaggactttctgtagagtgacgattccactatctgtggtacgaacggtttcatcttctttgatgccatcacccagatgttctataaacttggtatcctcgtccgatttcatatcctttgccaaccaatacatatagctaaactcaggcatatgttccacacatcctgaacaatgaaattctccagaagatgttacaatgtctagatttggacatttggtttcaaccgcgttaacatatgagtgaacacacccatacatgaaagcgatgagaaataggattctcatcttgccaaaatatcactagaaaaaatttatttatcagttttaaaggtataaaaaatacttattgttgctcgaatattttgtatttgatggtatacggaagattagaaatgtaggtattatcatcaactgattctatggttttatgtattctatcatgtttcactattgcgttggaaataatatcatatgcttccacatatattttattttgttttaactcataatactcacgtaattctggattattggcatatctatgaataattttagctccatgatcagtaaatattaatgagaacatagtattaccacctaccattatttttttcatctcattcaattcttaattgcaaagatctatataatcattatagcgttgacttatggactctggaatcttagacgatgtacagtcatctataatcatggcatatttaatacattgttttatagcatagtcgttatctacgatgttagatatttctctcaatgaatcaatcacataatctaatgtaggtttatgacataatagcattttcagcagttcaatgtttttagattcgttgatggcaatggctatacatgtatatccgttatttgatctaatgttgacatctgaaccggattctagcagtaaagatactagagattgtttattatatttaacagccttgtgaagaagtgtttctcctcgtttgtcaatcatgttaatgtctttaagataaggtaggcaaatgtttatagtactaagaattgggcaagcataagacatgtcacaaagaccctttttgtatgtataagtgtagaaattataacatccatagttggatttacataggtgtccaatcgggatctctccatcatcgagataattgatggcatctcccttccttttttagtagatatttcatcgtgtaagaatcaatattaatatttctaaagtatccgtgtatagcctctttatttaccacagttccatattccactagagggatatcgccgaatgtcatatactcaattagtatatgttggaggacatccgagttcattgttttcaatatcaaagagatggtttccttatcatttctccatagtggtacaatactacacattatttcgtgcggctttccattttccaaaaacaatttgaccaaatctacatctttattgtatctataatcactatttagataatcagccataattactcgagtgcaacatgttagatcgtctatatatgaataagccgtgttatctattcctttcattaacaatttaacgatgtctatatctatatgagatgacttaatataatattgaagagctgtacaatagtttttatctataaaagacggcttgattccgtgattaattagacatttaacaacttccggacgcacatatgctctcgtatccgactctgaatacagatgagagatgatatacagatgcaatacggtaccgcaatttcgtagttgataatcatcatacgcgtatcagtactcgtcctcataaagaacactgcagccattttctatgaacaaatcaataattttaggaacaggatcattgtcattacataattttctataactgaacgatggttttcacatttaacactcaagtcaaatccatgttctaccaacacctttatcaagtcaacgtctacatttttggatttcatatagctgaatatattaaagtcatttatgttgctaaatccagtggcttctagtagagccatcgctatatcctttaactttaacatgtctactatttgtgtattcttctaatggggtagctgtctccaatttttgcgtaatggattagtgccactgtctagtagtagtttgacgacctcgacattattacaatgctcattaaaaaggtatgcgtgtaaagcattattcttgaattggttcctggtatcattaggatctctgtctttcaacatctgtttaagttcatcaagagccacctcctcattttccaaatagtcaaacattttgactgaatgagctactgtgaactctatacacccacacaactaatgtcattaaatatcatgtcaaaaacttgtacaattattaataaaaataatttagtgtttaaattttaccagttccagattttacacctccgttaatacctccattaaccccactggacgatcctcctccccacattccaccgccaccagatgtataagttttagatcctttattactaccatcatgtccatggataaagacactccacatgccgccactaccccctttagaagacatattaataagacttaaggacaagtttaacaataaaattaatcacgagtaccctactaccaacctacactattatatgattatagtttctatttttacagtaccttgactaaagtttctagtcacaagagcaatactaccaacctacactattatatgattatagtttctatttttataggaacgcgtacgagaaaatcaaatgtctaatttctaacggtagtgttgataaacgattgttatccgcggatacctcctctatcatgtcgtctattttcttactttgttctattaacttattagcattatatattatttgattataaaacttatattgcttattagcccaatctgtaaatatcggattattaacatatcgtttctttgtaggtttatttaacatgtacatcactgtaagcatgtccttaccatttattttaatttgacgcatatccgcaatttctttttcgcagtcggttataaattctatatatgatggatacatgctacatgtgtacttataatcgactaatatgaagtacttgatacatattttcagtaacgatttattattaccacctatgaataagtacctgtgatcgtctaggtaatcaactgttttcttaatacattcgatggttggtaatttactcagaataatttccaatatcttaatatataattctgctatttctgggatatatttatctgccagtataacacaaatagtaatacatgtaaacccatattttgttattatattaatgtctgcgccattatctattaaccattctactaggctgacactatgcgactcaatacaatgataaagtatactacatccatgtttatctattttgtttatatcatcaatatacggcttacaaagttttagtatcgataacacatccaactcacgcatagagaaggtagggaataatggcataatatttattaggttatcatcattgtcattatctacaactaagtttccattttttaaaatatactcgacaactttaggatctctattgccaaatttttgaaaatatttatttatatgcttaaatctatataatgtagctccttcatcaatcatacatttaataacattgatgtatactgtatgataagatacatattctaacaatagatcttgtatagaatctgtatatcttttaagaattgtggatattaggatattattacataaactattacacaattctaaaatataaaacgtatcacggtcgaataatagttgatcaactatataattatcgattttgtgatttttcttcctaaactgtttacgtaaatagttagatagaatattcattagttcatgaccactatagttactatcgaataacgcgtcaaatatttcccgtttaatatcgcatttgtcaagataataatagagtgtggtatgttcacgataagtataataacgcatctctttttcgtgtgaaattaaatagtttattacgtccaaagatgtagcataaccatcttgtgacctagtaataatataataatagagaactgttttacccattctatcatcataatcagtggtgtagtcgtaatcgtaatcgtctaattcatcatcccaattataatattcaccagcacgtctaatctgttctattttgatcttgtatccatactgtatgttgctacatgtaggtattcctttatccaataatagtttaaacacatctacattgggatttgatgttgtagcgtatttttctacaatattaataccatttttgatactatttatttctatacctttcgaaattagtaatttcaataagtctatattgatgttatcagaacatagatattcgaatatatcaaaatcattgatatttttatagtcgactgacgacaataacaaaatcacaacatcgtttttgatattattatttttcttggtaacgtatgcctttaatggagtttcaccatcatactcatataatggatttgcaccactttctatcaatgattgtgcactgctggcatcgatgttaaatgttttacaactatcatagagtatcttatcgttaaccatgattggttgttgatgctatcgcattttttggtttctttcatttcagttatgtatggatttagcacgtttgggaagcatgagctcatatgatttcagtactgtagtgtcagtactattagtttcaataagatcaatctctagatctatagaatcaaaacacgataggtcagaagataatgaatatctgtaggcttcttgttgtactgtaacttctggttttgttagatggttgcatcgtgctttaacgtcaatggtacaaattttatcctcgctttgtgtatcatattcgtccctactataaaattgtatattcagattatcatgcgatgtgtatacgctaacggtatcaataaacggagcacaccatttagtcataaccgtaatccaaaaatttttaaagtatatcttaacgaaagaagttgtgtcattgtctacggtgtatggtactagatcctcataagtgtatatatctagagtaatgtttaatttattaaatggttgataatatggatcctcgtgacaatttccgaagatggaaataagacataaacacgcaataaatctaattgcggacatggttactccttaaaaaaatacgaataatcaccttggctatttagtaagtgtcatttaacactatactcatattaatccatggactcataatctctatacgggattaacggatgttctatatacggggatgagtagttctcttctttaactttatactttttactaatcatatttagactgatgtatgggtaatagtgtttgaagagctcgttctcatcatcagaataaatcaatatctctgtttttttgttatacagatgtattacagcctcatatattacgtaatagaacgtgtcatctaccttattaactttcaccgcatagttgtttgcaaatacggttaatcctttgacctcgtcgatttccgaccaatctgggcgtataatgaatctaaactttaattgcttgtaatcattcgaaataatttttagtttgcatccgtagttatcccctttatgtaactgtaaatttctcaacgcgatatctccattaataatgatgtcgaattcgtgctgtatacccatactgaatggatgaacgaataccgacggcgttaatagtaatttactttttcatctttacatattgggtactagttttactatcataagtttataaattccacaagctactatggaataagccaaccatcttagtataccacacatgtcttaaagtttattaattaattacatgttgttttatatatatcgctacgaatttaaagagaaattagtttaggaagaaaaattatctatctacatcatcacgtctctgtattctacgatagagtgctactttaagatgcgacagatccgtgtcatcaaatatatactccattaaaatgattattccggcagcgaacttgatattggatatatcacaacctttgttaatatctacgacaatagacagcagtcccatggttccataaacagtgagtttatctttctttgaagagatattttgtagagatcttataaaactgtcgaatgacatcgcatttatatctttagctaaatcgtatatgttaccatcgtaatatctaaccgcgtctatcttaaacgtttccatcgctttaaagacgtttccgatagatggtctcatttcatcagtcatactgagccaacaaatataatcgtgtataacatctttgatagaatcagactctaaagaaaacgaatcggctttattatacgcattcatgataaacttaatgaaaaatgtttttcgttgtttaagttggatgaatagtatgtcttaataattgttattatttcattaattaatatttagtaacgagtacactctataaaaacgagaatgacataactaatcataactagttatcaaagtgtctaggacgcgtaattttcatatggtatagatcctgtaagcattgtctgtattctggagctattttctctatcgcattagtgagttcagaatatgttataaatttaaatcgaataacgaacataactttagtaaagtcgtctatattaactcttttattttctagccatcgtaataccatgtttaagatagtatattctctagttactacgatctcatcgttgtctagaatatcacatactgaatctacatccaattttagaaattggtctgtgttacatatctcttctatattattgttgatgtattgtcgtagaaaactattacgtagaccattttctttataaaacgaatatatagtactccaattatctttaccgatatatttgcacacataatccattctctcaatcactacatctttaagattttcgttgttaagatatttggctaaactatataattctattagatcatcaacagaatcagtatatatttttctagatccaaagacgaactctttggcgtcctctataatattcccagaaaagatattttcgtgttttagtttatcgagatctgatctgttcatatacgccatgattgtacggtacgttatgataaccgcataaaataaaaatccattttcatttttaaccaatactattcataattgagattgatgtaatactttgttactttgaacgtaaagacagtacacggatccgtatctccaacaagcacgtagtaatcaaatttggtgttgttaaacttcgcaatattcatcaatttagatagaaacttatactcatcatctgttttaggaatccatgtattattaccactttccaacttatcattatcccaggctatgtttcgtccatcatcgttgcgcagagtgaataattcttttgtattcggtagttcaaatatatgatccatgcatagatcggcaaagctattgtagatgtgatttttcctaaatctaatataaaactcgtttactagcaaacactttcctgatttatcgaccaagacacatatggtttctaaatctatcaagtggtggggatccatagttatgacgcagtaacatatattattacattcttgactgtcgctaatatctaaatatttattgttatcgtattggattctgcatatagatggcttgtatgtcaaagatatagaacacataaccaatttatagtcgcgctttacattctcgaatctaaagttaagagatttagaaaacattatatcctcggatgatgttatcactgtttctggagtaggatatattaaagtctttacagatttcgtccgattcaaataaatcactaaataatatcccacattatcatctgttagagtagtatcattaaatctattatattttatgaaagatatatcactgctcacctctatatttcgtacatttttaaactgtttgtataatatctctctgatacaatcagatatatctattgtgtcggtagacgataccgttacatttgaattaatggtgttccattttacaacttttaacaagttgaccaattcatttctaatagtatcaaactctccatgattaaatattttaatagtatccattttatatcactacggacacaaagtagctgacataaaccattgtataatttttatgttttatgtttattagcgtacacattttggaagttccggcttccatgtatttcctggagagcaagtagatgatgaggaaccagatagtttatatccgtacttgcacttaaagtctacattgtcgttgtatgagtatgatcttttaaacccgctagacaagtatccgtttgatattgtaggatgtggacatttaacaatctgacacgtgggtggatcggaccattctcctcctgaacacaggacactagagttaccaatcaacgaatatccactattgcaactataagttacaacgctcccatcggtataaaaatcctcgtatccgttatgtcttccgttggatatagatggaggggattggcatttaacagattcacaaataggtgcctcgggattccataccatagatccagtagatcctaattcacaatacgatttagattcaccgatcaactgatatccgctattacaagagtacgttatactagagccaaagtctactccaccaatatcaagttggccattatcgatatctcgaggcgatgggcatctccgtttaatacattgattaaagagtgtccatccagtacctgtacatttagcatatataggtcccattttttgctttctgtatccaggtagacatagatattctatagtgtctcctatgttgtaattagcattagcatcagtctccacactattcttaaatttcatattaatgggtcgtgacggaatagtacagcatgatagaacgcatcctattcccaacaatgtcaggaacgtcacgctctccaccttcatatttatttatccgtaaaaatgttatcctggacatcgtacaaataataaaaagcccatatatgttcgctattgtagaaattgtttttcacagttgctcaaaaacgatggcagtgacttatgagttacgttacactttggagtctcatctttagtaaacatatcataatattcgatattacgagttgacatatcgaacaaattccaagtatttgattttggataatattcgtattttgcatctgctataattaagatataatcaccgcaagaacacacgaacatctttcctacatggttaaagtacatgtacaattctatccatttgtcttccttaactatatatttgtatagataattacgagtctcgtgagtaattccagtaattacatagatgtcgccgtcgtactctacagcataaactatactatgatgtctaggcatgggagacttttttatccaacgatttttagtgaaacattccacatcgtttaatactacatatttctcatacgtggtataaactccacccattacatatatatcatcgtttacgaataccgacgcgcctgaatatctaggagtaattaagtttggaagtcttatccatttcgaagtgccgtgtttcaaatattctgccacacccgttgaaatagaaaattctaatcctcctattacatataactttccatcgttaacacaagtactaacttctgattttaacgacgacatattagtaaccgttttccattttttcgttttaagatctacccgcgatacggaataaacatgtctattgttaatcatgccgccaataatgtatagacaattatgtaaaacatttgcattatagaattgtctatctgtattaccgactatcgtccaatattctgttctaggagagtaatgggttattgtggatatataatcagagtttttaatgactactatattatgttttataccatttcgtgtcactggctttgtagatttggatatagttaatcccaacaatgatatagcattgcgcatagtattagtcataaacttgggatgtaaaatgttgatgatatctacatcgtttggatttttatgtatccactttaataatatcatagctgtaacatcctcatgatttacgttaacgtcttcgtgggataagatagttgtcagttcatcctttgataattttccaaattctggatcggatgtcaccgcagtaatattgttgattatttctgacatcgacgcattatatagttttttaattccatatcttttagaaaagttaaacatccttatacaatttgtgaaattaatattatgaatcatagtttttacacatagatctactacaggcggaacatcaattattatggcagcaactagtatcatttctacattgtttatggtgatgtttatcttcttccagcgcatatagtctaatagcgattcaaacgcgtgatagtttataccattcaatataatcgcttcatcctttagatggtgatcctgaatgcgtttaaaaaaattatacggagacgccgtaataatttccttattcacttgtataatttccccattgatagaaaatattacgctttccattcttaaagtactataagtaattatagtataatgtaaacgtttatatattcaatatttttataaaaatcattttgacattaattcctttttaaatttccgtctatcatctatagaaacgtattctatgaatttataaaatgcttttacgtgtcctatcgtaggcgatagaaccgctaaaaagcctatcgaatttctacaaaagaatctgttatatggtatagggagagtataaaacattaaatgtccgtacttattaaagtattcagtagccaatcctaactctttcgaatacttattaatggctcttgttctgtacgaatctatttttttgaacaacggacctagtggtatatcttgttctatgtatctaaaataatgtctgactagatccgttagtttaatatccgcagtcatcttgtctagaatggcaaatctaactgcgggtttaggctttagtttagtttctatatctacatctatgtctttatctaacaccaaaaatataatagctaatattttattacaatcatccggatattcttctacgatctcactaactaatgtttctttggttatactagtatagtcactatcggacaaataaagaaaatcagatgatcgatgaataatacatttaaattcatcatctgtaagatttttgagatgtctcattagaatattattagggttagtactcattatcattcggcagctattacttattttattatttttcaccatatagatcaatcattagatcatcaaaatatgtttcaatcatcctaaagagtatggtaaatgactcttcccatctaatttctgaacgttcaccaatgtctctagccactttggcactaatagcgatcattcgcttagcgtcttctatattattaactggttgattcaatctatctagcaatggaccgtcggacagcgtcattctcatgttcttaatcaatgtacatacatcgccgtcatctaccaattcatccaacaacataagctttttaaaatcatcattataataggtttgatcgttgtcatttctccaaagaatatatctaataagtagagtcctcatgcttagttaacaactattttttatgttaaatcaattagtacaccgctatgtttaatacttattcatattttagtttttaggattgagaatcaatacaaaaattaatgcatcattaattttagaaatacttagtttccacgtagtcaatgaaacatttgaactcatcgtacaggacgttctcgtacaggacgtaactataaaccggtttatatttgttcaagatagatacaaatccgataactttttttacgaattctacgggatccactttaaaagtgtcataccgggttctttttatttttttaaacagatcaatggtgtgatgttgattaggtcttttacgaatttgatatagaatagcgtttacatatcctccataatggtcaatcgccatttgttcgtatgtcataaattctttaattatatgacactgtgtattatttagttcatccttgttcattgttaggaatctatccaaaatggcaattatactagaactataggtgcgttgtatacacatattgatgtgtctgtttatacaatcaatgctactaccttcgggtaaaattgtagcatcatataccatttctagtactttaggttcattattatccattgcagaggacgtcatgatcgaatcataaaaaaatatattatttttatgttattttgttaaaaataatcatcgaatacttcgtaagatactccttcatgaacataatcagttacaaaacgtttatatgaagtaaagtatctacgatttttacaaaagtccggatgcataagtacaaagtacgcgataaacggaataataatagatttatctagtctatctttttctatagctttcatagttagatacatggtctcagaagtaggattatgtaacatcagcttcgataaaatgactgggttatttagtcttacacattcgctcatacatgtatgaccgttaactacagagtctacactaaaatgattgaacaatagatagtctaccattgtttcgtattcagatagtacagcgtagtacatggcatcttcacaaattatatcattgtctaatagatatttgacgcatcttatggatcccacttcaacagccatcttaaaatcggtagaatcatattgctttcctttatcattaataatttctagaacatcatctctatcataaaagatacaaatattaactgtttgatccgtaataacattgctagtcgatagcaatttgttaataagatgcgctgggctcaatgtcttaataagaagtgtaagaggactatctccgaatttgttttgtttattaacatccgttgatggaagtaaaagatctataatgtctacattcttgactgttttagagcatacaatatggagaggtgtatttccatcatgatctggttttgagggactaattcctagtttcatcatccatgagattgtagaagcttttggattgtctgacataagatgtctatgaatatgatttttgccaaatttatccactatcctggcttcgaatccgatggacattatttttttaaacactctttctgaaggatctgtacacgccaacaacggaccacatccttcttcatcaaccgagttgttaatcttggctccatactgtaccaataaatttattctctctatgacttcatcatctgttcccgagagataatatagaggcgttttatgctgtttatcacacgcgtttggatctgcgccgtgcgtcagcagcatcgcgactattctattattattaattttagaagctatatgcaatggataatttccatcatcatccgtctcatttggagagtatcctctatgaagaagttcttcgacaaatcgttcatctagtcctttaattccacaatacgcatgtagaatgtgataattatttccagaaggttcgatagcttgtagcatattcctaaatacatctaaatttttactattatatttggcataaagagatagataatactcggccgacataatgttgtccattgtagtataaaaattaatatttctatttctgtatatttgcaacaatttactctctataacaaatatcataacttagttcttttatgtcaagaaggcactggtttagttcatctataaatgtcacgccataactaccacgcatgccatactcagaattatgataaagatatttatccttggggtgtaggtaatggggattaatctttgttggatcagtctctaagttaacacatgtcacacatgatccatttatagttatatcacacgatgatgatttatgaattgattccggaagatcgctatcgtattttgtggttccacaattcatttccatacatgttattgtcacactaatattatgatgaactttatctagccgctgagtggtaaacaacagaacagatagtttattatctttaccaacaccctcagccgctgccacaaatctctgatccgtatccatgatggtcatgtttatttctagtccgtatccagtcaacactatgttagcatttctgtcgatatagctttcactcatatgacactcaccaataatagtagaattaatgtcgtaatttacaccaatagtgagttcggcggcaaagtaccaataccggtaatcttgtcgaggaggacatatagtattcttgtattctaccgaatacccgagagatgcgatacaaaagagcaagactaatttgtaaaccatcttactcaaaatatgtaacaatagtacgatgcaatgagtaagacaataggaaatctatcttatatacacataattattctatcaattttaccaattagttagtgtaatgttaacaaaaatgtgggagaatctaattagtttttctttacacaattgacgtacatgagtctgagttccttgtttttgctaattatttcatccaatttattattcttgacgatatcgagatcttttgtataggagtcaaacttgtattcaacatgcttttctataatcattttagctatttcggcatcatccaatagtacattttccagattagcagaatagatattaatgtcgtatttgaacagagcctgtaacatctcaatgtctttattatctatagccaatttaatgtccggaatgaagagaagggaattattggtgtttgtcgacgtcatatagtcgagcaagagaatcatcatatccacgtgtccattttttatagtgatgtgaatacaactaaggagaatagccagatcaaaagtagatggtatctctgaaagaaagtaggaaacaatacttacatcattaagcatgacggcatgataaaatgaagttttccatccagttttcccatagaacatcagtctccaatttttcttaacaaacagttttaccgtttgcatgttaccactatcaaccgcataatacaatgcggtgtttcccttgtcatcaaattgtgaatcatccagtccactgaatagcaaaatctttactattttggtatcttccaatgtggctgcctgatgtaatggaaattcattctctagaagatttttcaatgctccagcgttcaacaacgtacatactagacgcacgttattatcagctattgcataatacaaggcactatgtccatggacatccgccttaaatgtatctttactagagagaaagcttttcagctgcttagacttccaagtattaattcgtgacagatccatgtctgaaacaagacgctaattagtgtatattttttcattttttataattttgtcatattgcaccagaattaataatatctctaatagatctgattagtagatacatggctatcgcaaaacaacatatacacatttaataaaaataatatttattaagaaaattcagatttcacgtacccatcaatataaataaaataatgattccttacaccgtacccatattaaggagattccaccttacccataaacaatataaatccagtaatatcatgtctgatgatgaacacaaatggtgtattaaattccagtttttcaggagatgatctcgccgtagctaccataatagtagatgcctctgctacagttccttgttcgtcgacatctatctttgcattctgaaacattttataaatatataatgggtccctagtcatatgtttaaacgacgcattatctggattaaacatactaggagccatcatttcggctatcgacttaatatccctcttattttcgatagaaaatttagggagtttaagattgtacactttatttcctaattgagacgaccaatagtctaattttgcagccgtgatagaatctgtgaaatgggtcatattatcacctattgccaggtacatactaatattagcatccttatacggaaggcgtaccatgtcatattctttgtcatcgattgtgattgtatttccttgcaatttagtaactacgttcatcatgggaaccgttttcgtaccgtacttattagtaaaactagcattgcgtgttttagtgatatcaaacggatattgccatatacctttaaaatatatagtattaatgattgcccatagagtattattgtcgagcatattagaatctactacattagacataccggatctacgttctactatagaattaattttattaaccgcatctcgtctaaagtttaatctatataggccgaatctatgatattgttgataatacgacggtttaatgcacacagtattatctacgaaactttgataagttagatcagtgtacgtatatttagatgttttcagcttagctaatcctgatattaattctgtaaatgctggacccagatctctttttctcaaatccatagtcttcaataattctattctagtattacctgatgcaggcaatagcgacataaacatagaaaacgaataaccaaacggtgagaagacaatattatcatcttgaatatttttatacgctactataccggcattggtaaatccttgtagacgataggcggacgctgaacacgctaacgatagtatcaataacgcaatcatgattttatggtattaataattaaccttatttttatgttcggtataaaaaaattattgatgtctacacatccttttgtaattgacatctatatatccttttgtataatcaactctaatcactttaacttttacagttttccctaccagtttatccctatattcaacatatctatccatatgcatcttaacactctctgccaagatagcttcagagtgaggatagtcaaaaagataaatatatagagcataatcattctcgtatactctgccctttattacatcacccgcattgggcaacgaataacaaaatgcaagcatcttgttaacgggctcgtaaattgggataaaaattatgtttttattgtcttatatctattttattcaagagaatattcaggaatttctttttccggttgtatctcgtcgcagtatatatcatttgtacattgtttcatattttttaatagtttacaccttttagtaggactagtatcgtacaattcatagctgtattttgaattccaatcacgcataaaaatatcttccaattgttgacgaagacctaatccatcatccggtgtaatattaatagatgctccacatgtatccgtaaagtaatttcctgtccaatttgaggtacctatataggccgttttatcggttaccatatatttggcatggtttaccctagaatacggaatgggaggatcagcatctggtacaataaatagctttacttctatatttatgtttttagattttagcatagcgatagatcttaaaaagtttctcatgataaacgaagatcgttgccagcaactaatcaatagcttaacggatacttgtctgtctatagcggatcttcttaattcatcttctatataaggccaaaacaaaattttacccgccttcgaataaataatagggataaagttcataacagatacataaacgaatttactcgcatttctaatacatgacaataaagcggttaaatcattggttctttccatagtacatagttgttgcggtgcagaagcaataaatacagagtgtggaacgccgcttacgttaatactaagaggatgatctgtattataatacgacggataaaagtttttccaattatatggtagattgttaactccaagataccagtatacctcaaaaatttgagtgagatccgctgccaagttcctattattgaagatcgcaatacccaattccttgacctgagttagtgatctccaatccatgttagcgcttcctaaataaatatgtgtattatcagatatccaaaattttgtatgaagaactcctcctaggatatttgtaatatctatgtatcgtacttcaactccggccatttgtagtctttcaacatcctttaatggtttgttagatttattgacggctactctaactcgtactcctcttttgggtaattgtacaatctcgtttaatattatcgtgccgaaattcgtacccacttcatccgataaactccaataaaaagatgatatatctagtgtttttgtggtattggatagaatttccctccacatgttaaatgtagacaaatatactttatcaaattgcatacctataggaatagtttctgtaatcactgcgattgtattatccggattcattttatttgttaaaagaataatcctatatcacttcactctattaaaaatccaagtttctatttctttcatgactgattttttaacttcatccgtttccttatgaagatgatgtttggcaccttcataaatttttatttctctattacaatttgcatgttgcatgaaataatatgcacctaaaacatcgctaatcttattgtttgttccctggagtatgagagtcgggggggtgttaatcttggaaattatttttctaaccttgttggtagccttcaagacctgactagcaaatccagccttaattttttcatgattgactaatgggtcgtattggtatttataaactttatccatatctctagatactgattctggacatagctttccgactggcgcatttggtgtgatggttcccataagtttggcagctagcagattcagtcttgaaacagcatctgcattaactagaggagacattagaatcattgctgtaaacaagtttggattatcgtaagaggctagctcccatggaatgacccaataagtagatttaatagttaccacgtgctgtaccaaagtcatcaatcatcattttttcaccattacttcttccatgtccaatatgatcatgtgagaatactaaaattcctaacgatgatatgttttcagctagttcgtcataacgtccagaatgtttaccagctccatgacttatgaatactaatgccttaggatatgtaataggtttccaatatatgtaatcattgtccagattgaacatacagtttgcactcatgattcacgttatataactatcaatattaacagttcgtttgatgatcatattatttttatgttttattgataattgtaaaaacatacaattaaatcaatatagaggaaggagacggctactgtcttttgtgagatagtcatggcgactaaattagattatgaggatgctgttttttactttgtggatgatgataaaatatgtagtcgcgactccatcatcgatctaatagatgaatatattacgtggagaaatcatgttatagtgtttaacaaagatattaccagttgtggaagactgtacaaggaattgatgaagttcgatgatgtcgctatacggtactatggtattgataaaattaatgagattgtcgaagctatgagcgaaggagaccactacatcaattttacaaaagtccatgatcaggaaagtttattcgctaccataggaatatgtgctaaaatcactgaacattggggatacaaaaagatttcagaatctagattccaatcattgggaaacattacagatctgatgaccgacgataatataaacatcttgatactttttctagaaaaaaaattgaattgatgatataggggtcttcataacgcataattattacgttagcattctatatccgtgttaaaaaaaattatcctatcatgtatttgagagttttatatgtagcaaacatgatagctgtgatgccaataagctttagatattcacgcgtgctagtgttagggatggtattatctggtggtgaaatgtccgttatataatctacaaaacaatcatcgcatatagtatgcgatagtagagtaaacatttttatagtttttactggattcatacatcgtctacccaattcggttataaatgaaattgtcgccaatcttacacccaaccccttgttatccattagcatagtattaacttcgttatttatgtcataaactgtaaatgattttgtagatgccatatcatacatgatattcatgtccctattataatcattactaactttatcacaatatatgttgataatatctatatatgatctagtctttgtgggcaactgtctatacaagtcgtctaaacgttgtttactcatatagtatcgaacagccatcattacatggtcccgttccgttgatagataatcgagtatgttagtggacttgtcaaatctatataccatattttctggaagtggatatacatagtcgtgatcaacattattgctagcctcatcttctatatcctgtactataccattatctatatcatctacataatctatgatattattacacataaacatcgacaacatactattgtttattatctaagtcctgttgatccaaacccttgatctcctctatttgtactatctagagattgtacttcttccagttctggataatatatacgttgatagattagctgagctattctatctccagtatttacattaaacgtacattttccattattaataagaatgactcctatgtttcccctataatcttcgtctattacaccgcctcctatatcaatgccttttagtgacagaccagacctaggagctattctaccatagcaaatcttaggcatggacatactaatatctgtcttaattaactgtctttctcctggagggatagtataatcgtaagcgctatacaaatcatatccggcagcacccggcgattgcctagtaggagatttagctctgttagtttccttaacaaatctaactggtgagttaatattcatgttgaacataaaactaatattttatttcaaaattatttaccatcccatatattccatgaataagtgtgatgattgtacacttctatagtatctatatacgattcacgataaaatcctcctatcaatagcagtttattatccactatgatcaattctggattatccctcggataaataggatcatctatcagagtccatgtattgctggattcacaataaaattccgcatttctaccaaccaagaataaccttctaccgaacactaacgcgcatgatttataatgaggataataagtggatggtccaaactgccactgatcatgattgggtagcaaatattctgtagttgtatcagtttcagaatgtcctcccattacgtatataacattgtttatagatgccactgctggattacatctaggtttcagaagactcggcatattaacccaagcagcatccccgtggaaccaacgctcaacagatgtgggatttggtagacctcctactacgtataatttattgttagcgggtatcccgctagcatacagtctggggctattcatcggaggaattggaatccaattgtttgatatataatttaccgctatagcattgttatgtatttcattgttcatccatccaccgatgagatatactacttctccaacatgagtacttgtacacatatggaatatatctataatttgatccatgttcataggatactctatgaatggatacttgtatgatttgcgtggttgtttatcacaatgaaatattttggtacagtctagtatccattttacattatttatacctctgggagaaagataatttgacctgattacatttttgataaggagtagcagatttcctaatttatttcttcgctttatataccacttaatgacaaaatcaactacataatcctcatctggaacatttagttcatcgctttctagaataagttttatagatagataatcaaaattgtctatgatgtcatcttctagttccaaaaagtgtttggcaataaagtttttagtatgacataagagattggatagtccgtattctatacccatcatgtaacactcgacacaatattcctttctaaaatctcgtaagataaagtttatacaagtgtagatgataaattctacagaggttaatatagaagcacgtaataaattgacgacgttatgactatctatatatacctttccagtatatgagtaaataactatagaagttagactgtgaatgtcaaggtctagacaaacccttgtaactggatctttatttttcgtgtatttttgacgtaaatgtgtgcgaaagtaaggagataactttttcaatatcgtagaattgactattatattgccacctatagcatcaataattgttttgaatttcttagtcatagacaatgctaatatattcttacagtacacagtattgacaaatatcggcatttatgtttctttaaaagtcaacatctagagaaaaatgattatctttttgagacataactcccattttttggtattcacccacacgtttttcgaaaaaattagtttttccttccaatgatatattttccatgaaatcaaacggattggtaacattataaatttttttaaatcccaattcagaaatcaatctatccgcgacgaattctatatatgttttcatcatttcacaattcattcctataagtttaactggaagagccgcagtaagaaattcttgttcaatggataccgcatctgttataatagatctaacggtttcttcactcggtggatacaataaatgtttaaacatcaaacatgcgaaatcgcagtgcagaccctcgtctctactaattagttcgttggaaaacgtgagtccgggcattaggccacgctttttaagccaaaatatggaagcgaatgatccggaaaagaagattccttctactgcagcaaaggcaataagtctctctccataaccggcgctgtcatgtatccacttttgagcccaatcggccttcttttttacacaaggcatcgtttctatggcattaaagagatagtttttttcattactatctttaacataagtatcgatcaaaagactatacatttccgaatgaatgttttcaatggccatctgaaatccgtagaaacatctagcctcggtaatctgtacttctgtacaaaatcgttccgccaaattttcattcactattccgtcactggctgcaaaaaacgccaatacatgttttataaaatatttttcgtctggtgttagtttattccaatcattgatatctttagatatatctacttcttccactgtccaaaatgatgcctctgcctttttatacatgttccagatgtcatgatattggattgggaaaataacaaatctatttggatttggtgcaaggatgggttccataactaaattaacaataacaataaattttttttcagttatctatatgcctgtacttggattttttgtacatcgatatcgccgcaatcactacaataattacaagtattattgatagcattgttattagtactatcataattaaattatctacattcatgggtgctgaataatcgttattatcatcattatcattttgtaattgtgacatcatactagataaatcgtttgcgagattgttgtgggaagcgggcatggaggatgcattatcattattatttaacgccttccatttggattcacaaatgttacgcacattcaacattttatggaaactataattttgtgaaaacaaataacaagaaaactcgtcatcgttcaaatttttaacgatagtaaaccgattaaacgtcgagctaatttctaacgctagcgactctgttggatatgggtttccagatatatatcttttcagttcccctacgtatctataatcatctgtaggaaatggaagatatttccatttatctactgttcctaatatcatatgtggtggtgtagtagaaccattaagcgcgaaagatgttatttcgcatcgtattttaacttcgcaataatttctggttagataacgcactctaccagtcaagtcaatgatattagcctttacagatatattcatagtagtcgtaacgatgactccatcttttagatgcgatactcctttgtatgtaccagaatcttcgtacctcaaactcgatatatttaaacaagttaatgagatattaacgcgttttatgaatgatgatatataaccagaagttttatcctcggtggctagcgctataaccttatcattataataccaactagtgtgattaatatgtgacacgtcagtgtgggtacaaatatgtacattatcgtctacgtcgtattcgatacatccgcatacagccaacaaatataaaatgacaaatactctaacgccgttcgtacccatcttgatgcggtttaataaatgttttgatttcaatttattgtaaaaaaagattcggttttatactgttcgatattctcattgcttatattttcatctatcatctccacacagtcaaatccgtggttagcatgcacctcatcaaccggtaaaagactatcggactcttctatcattataactctagaatatttaatttggtcattattaatcaagtcaattatcttatttttaacaaacgtgagtattttactcattttttataaaaacttttagaaatatacagactctatcgtgtgtctatatcttctttttatatccaatgtatttatgtctgatttttcttcatttatcatatataatggtccaaattctacacgtgcttcggattcatccagatcattaaggttcttataattgtaacatccttctcttccctcttctacatcttccttcttattcttattcttagcgtcacagaatctaccacagcaggatcccatgacgagcgtcatattaaactaatccattttcaattataatatatgattagtaatgaccattaaaataaaaaatattcttcataaccggcaagaaagtgaaaagttcacattgaaactatgtcagtagtatacatcatgaaatgatgatatatatatactctattttggtggaggattatatgatataattcgtggataatcatttttaagacacatttctttattcgtaaatcttttcacgttaaatgagtgtccatattttgcaatttcttcatatgatggcggtgtacgtggacgaggctgctcctgttcttgttgtggtcgccgactgtcgtgtctgcgtttagatccctccattatcgcgattgcgtagatggagtactattttataccttgtaattaaatttttttattaattaaacgtataaaaacgttccgtatctgtatttaagagccagatttcgtctaatagaacaaatagctacagtaaaaataactagaataattgctacacccactagaaaccacggatcgtaatacggcaatcggttttcgataataggtggaacgtatattttatttaaggacttaacaattgtctgtaaaccacaatttgcttccgcggatcctgtattaactatctgtaaaagcatatgttgaccgggcggagccgaacattctccgatatctaatttctgtatatctataatattattaacctccgcatacgcattacagttcttttctagcttggataccgcactaggtacatcgtctagatctattcctatttcctcagcgatagctcttctatccttttccggaagcaatgaaatcacttcaataaatgattcaaccatgagtgtgaaactaagtcgagaattactcatgcatttgttagttattcggagcgcgcaatttttaaactgtcctataacctctcctatatgaatagcacaagtgacattagtagggatagaatgttgagctaatttttgtaaataactatctataaaaagattatacaaagttttaaactctttagtttccgccatttatccagtctgagaaaatgtctctcataataaatttttccaagaaactaattgggtgaagaatggaaacctttaatctatatttatcacagtctgttttggtacacatgatgaattcttccaatgccgtactaaattcgatatctttttcgatttctggatatgtttttaataaagtatgaacaaagaaatggaaatcgtaataccagttatgtttaactttgaaattgttttttattttcttgttaatgattccagccacttgggaaaagtcaaagtcgtttaatgccgatttaatacgttcattaaaaacaaactttttatcctttagatgaattattattggttcattggaatcaaaaagtaagatattatcgggtttaagatctgcgtgtaaaaagttgtcgcaacagggtagttcgtagattttaatgtataacagagccatctgtaaaaagataaactttatgtattgtaccaaagatttaaatcctaatttgatagctaactcggtatctactttatctgccgaatacagtgctaggggaaaaattataatgtttcctctttcatattcgtagttagttctcttttcatgttcgaaaaagtgaaacatgcggttaaaatagtttataacattaatattactgttaataactgccggataaaagtgggatagtaatttcacgaatttgatactgtcctttctctcgttaaacgcctttaaaaaaactttagaagaatatctcaatgagagttcctgaccatccatagtttgtatcaataatagcaacatatgaagaacccgtttatacagagtatgtaaaaatgttaatttatagtttaatcccatggcccacgcacacacgattaattttttttcatctccctttagattgttgtatagaaatttgggtactgtgaactccgccgtagtttccatgggactatataattttgtggcctcgaatacaaattttactacatagttatctatcttaaagactataccatatcctcctgtagatatgtgataaaaatcgtcgtttataggataaaatcgtttatccttttgttggaaaaaggatgaattaatgtaatcattctcttctatctttagtagtgtttccttattaaaattcttaaaataatttaacaatctaactgacggagcccaattttggtgtaaatctaattgggacattatattgttaaaatacaaacagtctcctaatataacagtatctgataatctatggggagacatccattgatattcaggggatgaatcattggcaacacccatttattgtacaaaaagccccaatttacaaacgaaagtccaggtttgatagagacaaactattaactattttgtctctgtttttaacacctccacagtttttaatttctttagtaatgaaattattcacaatatcagtatcttctttatctaccagagattttactaacttgataaccttggctgtctcattcaatagggtagtaatatttgtatgtgtgatattgatatctttttgaattgtttcttttagaagtgattctttgatggtgccagcatacgaattacaataatgcagaaactcggttaacatgcaggaattatagtaagccaattccaattgttgcctgtgttgtattagagtgtcaatatgagcaatggtgtccttgcgtttctctgatagaatgcgagcagcgattttggcgttatcatttgacgatatttctggaatgacgaatcctgtttctactaactttttggtaggacaaagtgaaacaatcaagaagatagcttctcctcctatttgtggaagaaattgaactcctctagatgatctactgacgatagtatctccttgacagatattggaccgaattacagaagtacctggaatgtaaagccctgaaaccccctcattttttaagcagattgttgccgtaaatcctgcactatgcccaagatagagagctcctttggtgaatccatctctatgtttcagtttaaccaagaaacagtcagctggtctaaaatttccatctctatctaatacagcatctaacttgatgtcaggaactatgaccggtttaatgttatatgtaacattgagtaaatccttaagttcataatcatcactgtcatcagttatgtacgatccaaacaatgtttctaccggcatagtggatacgaagatgctatccatcagaatgtttccctgattagtattttctatatagctattcttctttaaacgattttccaaatcagtaactatgttcatttttttaggagtaggacgcctagccagtatggaagaggattttctagatcctctcttcaacatctttgatctcgatggaatgcaaaaccccatagtgaaacaaccaacgataaaaataatattgtttttcactttttataattttaccatctgactcatggattcattaatatctttataagagctactaacgtataattctttataactgaactgagatatatacaccggatctatggtttccataattgagtaaatgaatgctcggcaataactaatggcaaatgtatagaacaacgaaattatactagagttgttaaagttaatattttctatgagctgttccaataaattatttgttgtgactgcgttcaagtcataaatcatcttgatactatccagtaaaccgtttttaagttctggaatattatcatcccattgtaaagcccctaattcgactatcgaatatcctgctctgatagcagtttcaatatcgacggacgtcaatactgtaataaaggtggtagtattgtcatcatcgtgataaactacgggaatatggtcgttagtaggtacggtaactttacacaacgcgatatataactttccttttgtaccatttttaacgtagttgggacgtcctgcagggtattgttttgaagaaatgatatcgagaacagatttgatacgatatttgttggattcctgattattcactataatataatctagacagatagatgattcgataaatagagaaggtatatcgttggtaggataatacatccccattccagtattctcggatactctattgatgacactagttaagaacatgtcttctattctagaaaacgaaaacatcctacatggactcattaaaacttctaacgctcctgattgtgtctcgaatgcctcgtacaaggatttcaaggatgccatagattctttgaccaacgatttagaattgcgtttagcatctgatttttttattaaatcgaatggtcggctctctggtttgctaccccaatgataacaatagtcttgtaaagataaaccgcaagaaaatttatacgcatccatccaaataaccctagcaccatcggatgatattaatgtattattatagattttccatccacaattattgggccagtatactgttagcaacggtatatcgaatagattactcatgtaacctactagaatgatagttcgtgtactagtcataatatctttaatccaatctaaaaaatttaaaattagattttttacactgttaaagttaacaaaagtattacccgggtacgtggatatcatatatggcattggtccattatcagtaatagctccataaactgatacggcgatggtttttatatgtgtttgatctaacgaggaagaaattcgcgcccacaattcatctctagatatgtatttaatatcaaacggtaacacatcaatttcgggacgcgtatatgtttctaaatttttaatccaaatataatgatgacctatatgccctattatcatactgtcaactatagtacacctagggaacttacgatacatctgtttcctataatcgttaaattttacaaatctataacatgctaaaccttttgacgacagccattcattaatttctgatatggaatctgtattctcgataccgtatcgttctaaagccagtgctatatctccctgttcgtgggaacgctttcgtataatatcgatcaacggataatctgaagtttttggagaataatatgactcatgatctatttcgtccataaacaatctagacataggaattggaggcgatgatcttaattttgtgcaatgagtcgtcaatcctataacttctaatcttgtaatattcatcatcgacataatactatctatgttatcatcgtatattagtataccatgaccttcttcatttcgtgccaaaatgatatacagtcttaaatagttacgcaatatctcaatagtttcataattgttagctgttttcatcaaggtttgtatcctgtttaacatgatggcgttctataacgtctctattttctatttttaattttttaaatttttaacgatttactgtggctagatacccaatctctctcaaatatttttttagcctcgcttacaagctgtttatctatactattaaaactgacgaatccgtgattttggtaatgggttccgtcgaaatttgccgaagtgatatgaacatattcgtcgtcgactatcaacaattttgtattattctgaatagtgaaaaccttcacagatagatcattttgaacacacaacgcatctagacttttggcggttgccatagaatatacgtcgttcttatcccaattaccaactagaagtctgatcttaactcctctattaatggctgcttctataatggagttgtaaatgtcgggccaatagtagctattaccgtcgacacgtgtagtgggaactatggccaaatgttcaatatctatactagtcttagctgacctgagtttatcaataactacatcggtatctagatctctagaatatcccaataggtgttccggagaatcagtaaagaacactccacctataggattcttaatatgatacgcagtgctaactggcaaacaacaagccgcagagcataaattcaaccatgaattttttgcgctattaaaggctttaaaagtatcaaatcttctacgaagatctgtggccagcgggggataatcagaatatacacctaacgttttaatcgtatgtatagatcctccagtaaatgacgcgtttcctacataacatctttcatcatctgacacccaaaaacaaccgagtagtagtcccacattattttttttatctatattaacggttataaaatttatatccgggcagtgactttgtagctctcccagatttcttttccctcgttcatctagcaaaactattattttaatccctttttcagatgcctcttttagtttatcaaaaataagcgctcccctagtcgtactcagaggattacaacaaaaagatgctatgtatatatatttcttagctagagtgataatttcgttaaaacattcaaatgttgttaaatgatcggatctaaaatccatattttctggtagtgtttctaccagcctacattttgctcccgcaggtaccgatgcaaatggccacatttagttaacataaaaacttatacatcctgttctatcaacgattctagaatatcatcggctatatcgctaaaattttcatcaaagtcgacatcacaacctaactcagtcaatatattaagaagttccatgatgtcatcttcgtctatttctatatccgtatccattgtagattgttgaccgattatcgagtttaaatcattactaatactcaatccttcagaatacaatctgtgtttcattgtaaatttataggcggtgtatttaagttggtagattttcaattatgtattaatatagcaacagtagttcttgctcctccttgattctagcatcctcttcattattttcttctacgtacataaacatgtccaatacgttagacaacacaccgacgatggcggccgctacagacacgaatatgactaaaccgatgaccatttaaaaacccctctctagctttcacttaaactgtatcgatcattcttttagcacatgtataatataaaaacattattctatttcgaatttaggcttccaaaaatttttcatccgtaaaccgataataatatatatagacttgttaatagtcggaataaatagattaatgcttaaactatcatcatctccacgattagagatacaatatttacattctttttgctgtttcgaaactttatcaatacacgttaatacaaacccaggaaggagatattgaaactgaggctgttgaaaatgaaacggtgaatacaataattcagataatgtaaaatcatgattccgtattctgatgatattagaactgctaatggatgtcgatggtatgtatctaggagtatctattttaacaaagcatcgatttgctaatatacaattatccttttgattaattgttattttattcatattcttaaaaggtttcatatttatcaattcttctacattaaaaatttccatttttaatttatgtagccccgcaatactcctcattacgtttcattttttgtctataatatccattttgttcatctcggtacatagattatccaattgagaagcgcatttagtagttttgtacattttaagtttattgacgaatcgtcgaaaactagttatagttaacattttattatttgataccctgatattaatacccctgccgttactattatttataactgatgtaatccacgtaacattggaattaactatcgatagtaatgcatcgacgcttccaaaattgtctattataaactcaccgataatttttttattgcatgttttcatattcattaggattatcaaatctttaatcttattacgattgtatgcgttgatattacaagacgtcattctaaaagacggaggatctccatcaaatgccagacaatcacgtacaaagtacatggaaataggttttgttctattgcgcatcatagatttatatagaacacccgtagaaatactaatttgttttactctataaaatactaatgcatctatttcatcgttttgtataacgtctttccaagtgtcaaattccaaatttttttcattgatagtaccaaattcttctatctctttaactacttgcatagataggtaattacagtgatgcctacatgccgttttttgaaactgaatagatgcgtctagaagcgatgctacgctagtcacaatcaccactttcatatttagaatatatatatgtaaaaatatagtagaatttcattttgtttttttctatgctataaatgaattctcattttgcatctgctcatactccgttttatatcaataccaaagaaggaagatatctggttctaaaagccgttaaagtatgcgatgttagaactgtagaatgcgaaggaagtaaagcttcctgcgtactcaaagtagataaaccctcatcgcccgcgtgtgagagaagaccttcgtccccgtccagatgcgagagaatgaataaccctggaaaacaagttccgtttatgaggacggacatgctacaaaatatgttcgcggctaatcgcgataatgtagcttctagacttttgtcctaaaatactattatatccttttcgatattaataaatccgtgtcgtccaggttttttatctctttcagtatgtgaatagataggtattttatctctattcatcatcgaatttaagagatccgataaacattgtttgtattctccagatgtcagcatctgatacaacaatatatgtgcacataaacctctggcacttatttcatgtaccttccccttatcactaaggagaatagtatttgagaaatatgtatacatgatattatcatgaattagatatacagaatttgtaacactctcgaaatcacacgatgtgtcggcgttaagatctaatatatcactcgataacacattttcatctagatacactagacattttttaaagctaaaatagtctttagtagtaacagtaactatgcgattattttcatcgatgatacatttcatcggcatattattacgcttaccatcaaagactataccatgtgtatatctaacgtattctagcatggttgccatacgcgcattaaacttttcaggatctttggatagatcttccaatctatctatttgagaaaacatttttatcatgttcaatagttgaaacgtcggatccactatatagatattatctataaagattttaggaactacgttcatggtatcctggcgaatattaaaactatcaatgatatgattatcgttttcatcttttatcaccatatagtttctaagatatgggattttacttaatataatattatttcccgtgataaattttattagaaaggccaaatctataagaaaagtcctagaattagtctgaagaatatctatatcgccgtatagtatatttggattaattagatatagagaatatgatccgtaacatatacaacttttattatggcgtctaagatattcttccatcaacttattaacatttttgactagggaagatacattatgacgtcccattacttttgccttgtctattactgcgacgttcatagaatttagcatatctcttgccaattcttccattgatgttacattataagaaattttagatgaaattacatttggagctttaatagtaagaactcctaatatgtccgtgtatgtggtcactaatacagattgtagttctataatcgtaaataatttacctatattatatgtttgagtctgtttagaaaagtagctaagtatacgatcttttatttctgatgcagatgtattaacatcggaaaaaaatctttttttattcttttttactaaagatacaaatatgtctttgttaaaaacagttattttctgaatatttctagcttgtaattttaacatatgatattcgttcacactaggtactctgcctaaataggtttctataatctttaatgtaatattaggaaaagtattctgatcaggattcctattcattttgaggatttaaaactctgattattgtctaatatggtctctacgcaaactttttcacagagcgatagagtttttgataactcgtttttcttaagaaatataaaactactgtttccagagctcgctctatcttttattttatctaattcgatacaaactcctgatactggttcagaaagtaattcattaattttcagtcctttatagaagatatttaatatagataatacaaaatcttcagtttttgatatcgatctgattgatcctagaactagatatattaataacgtgctcattaggcagtttatggcagcttgataattagatatagtatattccagttcatatttattagataccgcattgcccagattttgatattctatgaattcctctgaaaataaatccaaaataactagacattctattttttgtggattagtgtactctcttccctctatcatgttcactactggtgtccacgatgataaatatctagagggaatataatatagtccataggatgccaatctagcaatgtcgaataactgtaatttgattcttcgttcttcattatgaattgattcttgaggtataaacctaacacaaattatattattagacttttcgtatgtaatgtctttcatgttataagtttttaatcctggaatagaatctattttaatgaggcttttaaacgcagagttctccaacgagtcaaaacataatactctgttgtttttcttatatacgatgttacgattttcttctttgaatggaataggtttttgaattagtttataattacaacataatagataaggaagtgtgcaaatagtacgcggaaaaaacataatagctcccctgttttcatccatggttttaagtaaatgatcactggcttctttagtcaatggatattcgaacattaaccgtttcatcatcattggacagaatccatatttcttaatgtaaagagtgatcaaatcattgtgtttattgtaccatcttgttgtaaatgtgtattcggttatcggatctgctcctttttctattaaagtatcgatgtcaatctcgtctaagaattcaactatatcgacatatttcatttgtatacacataaccattactaacgtagaatgtataggaagagatgtaacgggaacagggtttgttgattcgcaaactattctaatacataattcttctgttaatacgtcttgcacgtaatctattatagatgccaagatatctatataattattttgtaagatgatgttaactatgtgatctatataagtagtgtaataattcatgtattttgatatatgttccaactctgtctttgtgatgtctagtttcgtaatatctatagcatcctcaaaaaatatattcgcatatattcccaagtcttcagttctatcttctaaaaaatcttcaacgtatggaatataataatctattttacctcttctgatatcattaatgatatagtttttgacactatcttctgtcaattgattcttattcactatatctaagaaacggatagcgtccctaggacgaactactgccattaatatctctattatagcttctggacataattcatctattataccagaattaatgggaactattccgtatctatctaacatagttttaagaaagtcagaatctaagacttgatgttcatatattggttcatacatgaaatgatctctattgatgatagtgactatttcattctctgaaaattggtaactcattctatatatgctttccttgttgatgaaggatagaatatactcaatagaatttgtaccaacaaactgttctcttatgaatcgtatatcatcatctgaaataatcatgtaaggcatacatttaacaattagagacttgtctcctgttatcaatatactattcttgtgataatttatgtgtgaggcaaatttgtccacgttctttaattttgttatagtagatatcaaatccaatggagctacagttcttggcttaaacagatatagtttttctggaacaaattctacaacattattataaaggactttgggtaaataagtgggatgaaatcctattttaattaatgcgatagccttgtcctcgtgcagatatccaaacgcttttgtgatagtatggcattcattgtctagaaacgctctacgaatatctgtgacagatatcatctttagagaatatactagtcgcgttaatagtactacaatttgtattttttaatctatctcaataaaaaaattaatatgtatgattcaatgtataactaaactactaactgttattgataactagaatcagaatctaatgatgacgtacccaagaagtttatctactgccaatttagctgcattatttttagcatctcgtttagattttccatctgccttatcgaatactcttccgtcgatatctacacaggcataaaatgtaggagagttactaggcccaactgattcaatacgaaaagaccaatctctcttagttatttggcagtactcattaataacggtgacagggttagcatctttccaatcaataatttttttagccggaataacatcatcaaaagacttatgatcctctctcattgatttttcgcgggatacatcatctattatgacgtcagccataacatcagcatccggcttatccgcctccgttgtcataaaccaacgaggaggaatatcgtcggagctgtacaccatagcactacgttgaagatcgtacagagctttattaacttctcgcttctccatattaagttgtctagttagttgtgcagcagtagctccttcgattccaatggttttaatagcctcacacacaatctctgcgttagaacgttcgtcgatatagattttagacatttttagagagaactaacacaaccagcaataaaactgaacctactttatcatttttttattcatcatcctctggtggttcgtcgttcctatcaaatgtagctctgattaacccgtcatctataggtgatgctggttctggagattctggaggagatggattattatctggaagaatctctgttatttccttgttttcatgtatcgattgcgttgtaacattaagattgcgaaatgctctaaatttgggaggcttaaagtgttgtttgcaatctctacacgcgtgtctaactagtggaggttcgtcagctgctctagtttgaatcatcatcggcgtagtattcctacttttacagttaggacacggtgtattgtatttctcgtcgagaacgttaaaataatcgttgtaactcacatcctttattttatctatattgtattctactcctttcttaatgcattttataccgaataagagatagcgaaggaattctttttcggtgccgctagtacccttaatcatatcacatagtgttttatattccaaatttgtggcaatagacggtttatttctatacgatagtttgtttctggaatcctttgagtattctataccaatattattctttgattcgaatttagtttcttcgatattagattttgtattacctatattcttgatgtagtactttgatgatttttccatggcccattctattaagtcttccaagttggcatcatccacatattgtgatagtaattctcggatatcagtagcggctaccgccattgatgtttgttcattggatgagtaactactaatgtatacattttccatttataacacttatgtattaactttgttcatttatattttttcattattatgttgatattaacaaaagtgaatatatatatgttaataattgtattgtggttatacggctacaattttataatgagtgaaagtcagtgtccgatgatcaatgacgatagctttactctgaaaagaaagtatcaaatcgatagtgcggagtcaacaataaaaatggataagaagaggataaagtttcagaatagagccaaaatggtaaaagaaataaatcagacaataagagcagcacaaactcattacgagacattgaaactaggatacataaaatttaagagaatgattaggactactactctagaagatatagcaccatctattccaaataatcagaaaacttataaactattctcggacatttcagccatcggcaaagcatcacagaatccgagtaagatggtatatgctctgctgctttacatgtttcccaatttgtttggagatgatcatagattcattcgttatagaatgcatccaatgagtaaaatcaaacacaagatcttctctcctttcaaacttaatcttattagaatattagtggaagaaagattctataataatgaatgcagatctaataaatggaaaataattggaacacaagttgataaaatgttgatagctgaatctgataaatatacaatagatgcaaggtataacctaaaacccatgtatagaatcaagggagaatctgaagaagataccctcttcatcaaacagatggtagaacaatgtgtgacatcccaggaattggtggaaaaagtgttgaagatactgtttagagatttgttcaagagtggagaatacaaagcgtacagatacgatgatgatgtagaaaatggattcattggattggatacactaaaattaaacattgttcatgatatagttgaaccatgtatgcctgttcgtaggccagtggctaagatactgtgtaaagaaatggtaaataaatactttgagaatccgctacatattattggtaaaaatcttcaagagtgcattgactttgttagtgaataggcatttcatctttctccaatactaattcaaattgttaaattaataatggatagtataaatagttattagttataagatagtaaaaataattattagaataagagtgtagtatcatagataactctcttctataaaaatggattttattcgtagaaagtatcttatatacacagtagaaaataatatagattttttaaaggatgatacattaagtaaagtaaacaattttaccctcaatcatgtactagctctcaagtatctagttagcaattttcctcaacatgttattactaaggatgtattagctaataccaatttttttgttttcatacatatggtacgatgttgtaaagtgtacgaagcggttttacgacacgcatttgatgcacccacgttgtacgttaaagcattgactaagaattatttatcgtttagtaacgcaatacaatcgtacaaggaaaccgtgcataaactaacacaagatgaaaaatttttagaggttgccgaatacatggacgaattaggagaacttataggcgtaaattatgacttagttcttaatccattatttcacggaggggaacccatcaaagatatggaaatcatttttttaaaactgtttaagaaaacagacttcaaagttgttaaaaaattaagtgttataagattacttatttgggcatacctaagcaagaaagatacaggcatagagtttgcggataatgatagacaagatatatatactctatttcaacaaactggtagaatcgtccatagcaatctaacagaaacgtttagagattatatctttcccggagataagactagctattgggtgtggttaaacgaaagtatagctaatgatgcggatatcgttcttaatagacccgccattaccatgtatgataaaattcttagttatatatactctgagataaaacaaggacgcgttaataaaaacatgcttaagttagtttatatctttgagcctgaaaaagatatcagagaacttctgctagaaatcatatatgatattcctggagatatcctatctattattgatgcaaaaaacgacgattggaaaaaatattttattagtttttataaagctaattttattaacggtaatacatttattagtgatagaacgtttaacgaggacttattcagagttgttgttcaaatagatcccgaatatttcgataatgaacgaattatgtctttattctctacgagtgctgcggacattaaacgatttgatgagttagatattaataacagttatatatctaatataatttatgaggtgaacgatatcacattagatacaatggatgatatgaagaagtgtcaaatctttaacgaggatacgtcgtattatgttaaggaatacaatacatacctgtttttgcacgagtcggatcccatggtcatagagaacggaatactaaagaaactgtcatctataaaatccaagagtagacggctgaacttgtttagcaaaaacattttaaaatattatttagacggacaattggctcgtctaggtcttgtgttagatgattataaaggagacttgttagttaaaatgataaaccatcttaagtctgtggaggatgtatccgcattcgttcgattttctacagataaaaaccctagtattcttccatcgctaatcaaaactattttagctagttataatatttccatcatcgtcttatttcaaaggtttttgagagataatctatatcatgtagaagaattcttggataaaagcatccatctaaccaagacggataagaaatatatacttcaattgataagacacggtagatcatagaacagaccaaatatattattaataatttgtatatacatagatataattatcacacatttttgataaatgggaactgctgcaacaattcagactcccaccaaattaatgaataaagaaaatgcagaaatgattttggaaaaaattgttgatcatatagttatgtatattagtgacgaatcaagtgattcagaaaataatcctgaatatattgattttcgtaacagatacgaagactatagatctctcattataaaaagtgatcacgagtttgtaaagctatgtaaaaatcatgcggagaaaagttctccagaaacgcaacaaatgattatcaaacacatatacgaacaatatcttattccagtatctgaagtactattaaaacctataatgtccatgggtgacataattacatataacggatgtaaagacaatgaatggatgctagaacaactctctaccctaaactttaacaatctccgcacatggaactcatgtagcataggcaatgtaacgcgtctgttttatacattttttagttatctgatgaaagataaactaaatatataagtataatcccattctaatactttaacctgatgtattagcatcttattagaatattaacctaactaaaagacataacataaaaactcattacatagttgataaaaagcggtaggatataaatattatggctgccaccgttccgcgttttgacgacgtgtacaaaaatgcacaaagaagaattctagatcaagaaacattttttagtagaggtctaagtagaccgttaatgaaaaacacatatctatttgataattacgcgtatggatggataccagaaactgcaatttggagtagtagatacgcaaacttagatgcaagtgactattatcccatttcgttgggattacttaaaaagttcgagtttctcatgtctctatataaaggtcctattccagtatacgaagaaaaagtaaatactgaattcattgctaatggatctttctccggtagatacgtatcatatcttagaaagttttctgctcttccaacaaacgagtttattagttttttgttactgacttccattccaatctataatatcttgttctggtttaaaaatactcagtttgatattactaaacacacattattcagatacgtctatacagataatgccaaacacctggcgttggctaggtatatgtatcaaacaggagactataagcctttgtttagtcgtctcaaagagaattatatatttaccggtcccgttccaatatgtatcaaagatatagatcaccctaatcttagtagagcaagaagtccatccgattatgagacattagctaatattagtactatattgtactttaccaagtatgatccggtattaatgtttttattgttttacgtacctgggtattcaattactacaaaaattactccagccgtagaatatctaatggataaactgaatctaacaaagagcgacgtacaactgttgtaaattattttatgcttcgtaaaatgtaggttttgaaccaaacattctttcaaagaatgagatgcataaaactttattatccaatagattgactatttcggacgtcaatcgtttaaagtaaacttcgtaaaatattctttgatcactgccgagtttaaaacttctatcgataattgtttcatatgttttaatatttacaagttttttggtccatggtccattaggacaaatatatgcaaaataatatcgttctccaagttctatagtctctggattatttttattatattcagtaaccaaatacatattagggttatctgcggatttataatttgagtgatgcattcgactcaacataaataattctagaggagacgatctactatcaaattcggatcgtaaatctgtttctaaagaacggagaatatctatacatacctgattagaattcatccgtccttcagacaacatctcagacagtctggttttgtacatcttaatcatattcttatgaaacttggaaacatctcttctagtttcactagtacctttattaattctctcaggtacagattttgaattcgacgatgctgagtatttcatcgttgtatatttcttcttcgattgcataatcagattcttatataccgcctcaaactctattttaaaattattaaacaatactctattattaatcagtcgttctaactctttcgctatttctatagacttatctacatcttgactgtctatctctgtaaacacggagtcggtatctccatacacgctacgaaaacgaaatctgtaatctataggcaacgatgttttcacaatcggattaatatctctatcgtccatataaaatggattacttaatggattggcaaaccgtaacataccgttagataactctgctccatttagtaccgattctagatacaagatcattctacgtcctatggatgtgcaactcttagccgaagcgtatgagtatagagcactatttctaaatcccatcagaccatatactgagttggctactatcttgtacgtatattgcatggaatcatagatggccttttcagttgaactggtagcctgttttagcatctttttatatctggctctctctgccaaaaatgttcttaatagtctaggaatggttccttctatcgatctatcgaaaattgctatttcagagatgaggttcggtagtctaggttcacaatgaaccgtaatatatctaggaggtggatatttctgaagcaatagctgattatttatttcttcttccaatctattggtactaacaacgacaccgactaatgtttccggagatagatttccaaagatacacacattaggatacagactgttataatcaaagattaatacattattactaaacattttttgttttggagcaaataccttaccgccttcataaggaaacttttgttttgtttctgatctaactaagatagttttagtttccaacaatagctttaacagtggacccttgatgactgtactcgctctatattcgaataccatggattgaggaagcacatatgttgacgcacccgcgtctgtttttgtttctactccataatactcccacaaatactgacacaaacaagcatcatgaatacagtatctagccatatctaaagctatgtttagattataatccttatacatctgagctaaatcaacgtcatcctttccgaaagataatttatatgtatcattaggtaaagtaggacataatagtacgactttaaatccattttcccaaatatctttacgaattactttacatataatatcctcatcaacagtcacataattacctgtggttaaaacctttgcaaatgcagcggctttgcctttcgcgtctgtagtatcgtcaccgatgaacgtcatttctctaactcctctatttaatactttacccatgcaactgaacgcgttcttggatatagaatccaatttgtacgaatccaatttttcaaatttttgaatgaatgaatatagatcgaaaaatatagttccattattgttattaacgtgaaacgtagtattggccatgccgcctactcccttatgactagactgatttctctcataaatacagagatgtacagcttcctttttgtccggagatctaaagataattttctctcctgttaataactctagacgattagtaatatatctcagatcaaagttatgtccgttaaaggtaacgacgtagtcgaacgttagttccaacaattgtttagctattcgtaacaaaactatttcagaacatagaactagttctcgttcgtaatccatttccattagtgactgtatcctcaaacatcctctatcgacggcttcttgtatttcctgttccgttaacatctcttcattaatgagcgtaaacaataatcgtttaccacttaaatcgatataacagtaacttgtatgcgagattgggttaataaatacagaaggaaacttcttatcgaagtgacactctatatctagaaataagtacgatcttgggatatcgaatctaggtatttttttagcgaaacagttacgtggatcgtcacaatgataacatccattgttaatctttgtcaaatattgctcgtccaacgagtaacatccgtctggagatatcccgttagaaatataaaaccaactaatattgagaaattcatccatggtggcattttgtatgctgcgtttctttggctcttctatcaaccacatatctgcgacggagcattttctatctttaatatctagattataacttattgtctcgtcaatgtctatagttctcatctttcccaacggcctcgcattaaatggaggaggagacaatgactgatatatttcgtccgtcactacgtaataaaagtaatgaggaaatcgtataaatacggtctcaccatttcgacatctggatttcagatataaaaatctgttttcaccgtgactttcaaaccaattaatgcaccgaacatccatttatagaatttagaaatatattttcatttaaatgaatcccaaacattggggaagagccgtatggaccattatttttatagtactttcgcaagcgggtttagacggcaacatagaagcgtgtaaacgaaaactatatactatagttagcactcttccatgtcctgcatgtagacggcacgcgactatcgctatagaggacaataatgtcatgtctagcgatgatctgaattatatttattattttttcatcagattatttaacaatttggcatctgatcccaaatacgcgatcgatgtgacaaaggttaaccctttataaacttaacccattataaaacttatgattagtcacaactgaaataaccgcgtgattattttttggtataattctacacggcatggtttctgtgactatgaattcaacccccgttacattagtgaaatctttaacaaacagcaagggttcgtcaaagacataaaactcattgtttacaatcgaaatagaccccctatcacacttaaaataaaaaatatccttatcctttaccaccaaataaaattctgattggtcaatgtgaatgtattcacttaacagttccacaaatttatttattaactccgaggcacatacatcgtcggtattttttatggcaaactttactcttccagcatccgtttctaaaaaaatattaacgagttccatttatatcatccaatattattgaaatgacgttgatggacagatgatacaaataagaaggtacggtacctttgtccaccatctcctccaattcatgctctattttgtcattaactttaatgtatgaaaacagtacgccacatgcttccatgacagtgtgtaacactttggatacaaaatgtttgacattagtataattgttcaagactgtcaatctataatagatagtagctataatatattctatgatggtattgaagaagatgacaaccttggcatattgatcatttaacacagacatggtatcaacagatagcttgaatgaaagagaatcagtaattggaataagcgtcttctcgatagagtgtccgtataccaacatgtctgatattttgatgtattccattaaattatttagttttttctttttattctcgttaaacagcatttctgtcaacggaccccaacatcgttgaccgattaagttttgattgatttttccgtgtaaggcgtatctagtcagatcgtatagcctatccaataatccatcatctgtgcgtagatcacatcgtacactttttaattctctatagaagagcgacagacatctggagcaattacagacagcaatttctttattctctacagatgtaagatacttgaagacattcctatgatgatgcagaattttggataacacggtattgatggtatctgttaccataattcctttgatggctgatagtgtcagagcacaagatttccaatctttgacaatttttagcaccattatctttgttttgatatctatatcagacagcatggtgcgtctgacaacacagggattaagacggaaagatgaaatgattctctcaacatcttcaatagataccttgctattttttctggcattatctatatgtgcgagaatatcctctagagaatcagtatcctttttgatgatagtggatctcaatgacatgggacgtctaaaccttcttattctatcaccagattgcatggtgatttgtcttctttcttttatcataatgtaatctctaaattcatcggcaaattgtctatatctaaaatcataatatgagatgtttacctctacaaatatctgttcgtccaatgttagagtatttacatcagttttgtattccaaattaaacatggcaacggatttaattttatattcctctattaagtcctcgtcgataataacagaatgtagataatcatttaatccatcgtacatggttggaagatgcttgttgacaaaatctttaattgtcttgatgaaggtgggactatatctaacatcttgattaataaaatttataacattgtccataggatactttgtaactagttttatacacatctcttcatcggtaagtttagacagaatatcgtgaacaggtggtatattatattcatcagatatacgaagaacaatgtccaaatctatattgtttaatatattatataaatgtagcgtagctcctacaggaatatctttaactaagtcaatgatttcatcaaccgttagatctattttaaagttaatcatataggcattgatttttaaaaggtatgtagccttgactacattctcattaattaaccattccaagtcactgtgtgtaagaagattatattctatcataagcttgactacatttggtcccgataccattaaagaattcttatgatataaggaaacagcttttaggtactcatctactctacaagaattttggagagccttaacgatatcagtgacgtttattatttcaggaggaaaaaacctaacattgagaatatcggaattaatagcttccagatacagtgattttggcaatagtccgtgtaatccataatccagtaacacgagctggtgcttgctagacaccttttcaatgtttaatttttttgaaataagctttgataaagccttcctcgcaaattccggatacatgaacatgtcggcgacatgattaagtattgttttttcattattttctcaataccccaatagatgatagaatatcacccaatgcgtccatgttgtctatttccaacaggtcgctatatccaccaatagaagtttttccaaaaaagattctaggaacagttctaccaccagtaatttgttcaaaatagtcacgcaattcattttcgggtttaaattctttaatatcgacaatttcatacgctcctcttttgaaactaaacttatttagaatatccagtgcatttctacaaaaaggacatgtatacttgacaaaaattgtcactttgttattggccaacctttgttgtacaaattcctcggccattttaatatttaagtgatataaaactatctcgacttatttaactctttagtcgagatatatggacgcagatagctatatgatagccaactacagaaggcaaacgctataaaaaacataattacgacgagcatatttataaatatttttattcagcattacttgatatagtaatattaggcacagtcaaacattcaaccactctcgatacattaactctctcattttctttaacaaattctgcaatatcttcgtaaaaagattcttgaaactttttagaatatctatcgactctagatgaaatagcgttcgtcaacatactatgttttgtatacataaaggcgcctattttaacagtttctagtgacaaaatgctagcgatcctaggatcctttagaatcacatagattgacgattcgtctctcttagtaactctagtaaaataatcatacaatctagtacgcgaaataatattatccttgacttgaggagatctaaacaatctagttttgagaacatcgataagttcatcgggaatgacatacatactatctttaatagaactcttttcatccagttgaatggattcgtccttaaccaactgattaatgagatcttctattttatcattttccagatgatatgtatgtccattaaagttaaattgtgtagcgcttttttttagtctagcagccaatactttaacatcactaatatcgatatacaaaggagatgatttatctatggtattaagaattcgtttttcgacatccgtcaaaaccaattcctttttgcctgtatcatccagttttccatcctttgtaaagaaattattttctactagactattaataagactgataaggattcctccataattgcacaatccaaactttttcacaaaactagactttacaagatctacaggaatgcgtacttcaggtttcttagcttgtgattttttcttttgcggacattttctagtaaccaactcatctaccatttcattgattttagcagtgaaataagctttcaatgcacgggcactgatactattgaaaacgagttgatcttcaaattccgccatttaagttcaccaaacaacttttaaatacaaatatatcaatagtagtagaataagaactataaaaaaaataataattaaccaataccaaccccaacaaccggtattattagttgatgtgactgttttctcatcacttagaacagatttaacaatttctataaagtctgtcaaatcatcttccggagaccccataaatacaccaaatatagcggcgtacaacttatccatttatacattgaatattggcttttctttatcgctatcttcatcatattcatcatcaatatcaacaagtcccagattacgagccagatcttcttctacattttcagtcattgatacacgttcactatctccagagagtccgataacgttagccaccacttctctatcaatgattagtttcttgagcgcgaaagtaatttttgtttccgttccggatctatagaagacgataggtgtgataattgccttggccaattgtctttctcttttactgagtgattctagttcaccttctatagatctgagaatggatgattctccagtcgaaacatattctaccatggatccgtttaatttgttgatgaagatggattcatccttaaatgttttctctgtaatagtttccaccgaaagactatgcaaagaatttggaatgcgttccttgtgcttaatgtttccatagacggcttctagaagttgatacaacataggactagccgcggtaacttttatttttagaaagtatccatcgcttctatcttgtttagatttatttttataaagtttagtctctccttccaacataataaaagtggaagtcatttgactagataaactatcagtaagttttatagagatagacgaacaattagcgtattgagaagcatttagtgtaacgtattcgatacattttgcattagatttactaatcgattttgcatactctataacacccgcacaagtctgtagagaatcgctagatgcagtaggtcttggtgaagtttcaactctcttcttgattaccttactcatgattaaacctaaataattgtactttgtaatataatgatatatattttcactttatctcatttgagaataaaaatgtttttgtttaaccactgcatgatgtacagatttcggaatcgcaaaccaccagtggttttattttatccttgtccaatgtgaattgaatgggagcggatgcgggtttcgtacgtagatagtacattcccgtttttagaccgagactccatccgtaaaaatgcatactcgttagtttggaataactcggatctgctatatggatattcatagattgactttgatcgatgaaggctcccctgtctgcagccatttttatgatcgtcttttgtggaatttcccaaatagttttataaactcgcttaatatcttctggaaggtttgtattctgaatggatccaccatctgccataatcctattcttgatctcatcattccataattttctctcggttaaaactctaaggagatgcggattaactacttgaaattctccagacaatactctccgagtgtaaatattactggtatacggttccaccgactcattatttcccaaaatttgagcagttgatgcagtcggcataggtgccaccaataaactatttctaagaccgtatgttctgattttatcttttagaggttcccaattccaaagatccgacggtacaacattccaaagatcatattgtagaataccgttactggcgtacgatcctacatatgtatcgtatggtccttccttctcagctagttcacaactcgcctctaatgcaccgtaataaatggtttcgaagatcttcttatttagatcttgtgcttccaggctatcaaatggataatttaagagaataaacgcgtccgctaatccttgaacaccaataccgataggtctatgtctcttattagagatttcagcttctggaataggataataattaatatctataattttattgagatttctgacaattactttgaccacatccttcagtttgagaaaatcaaatcgcccatctattacaaacatgttcaaggcaacagatgccagattacaaacggctacctcattagcatccgcatattgtattatctcagtgcaaagattactacacttgatagttcctaaattttgttgattactctttttgttacacgcatccttataaagaatgaatggagtaccagtttcaatctgagattctataatcgctttccagacgactcgagcctttattatagatttgtatctcctttctctttcgtatagtgtatacaatcgttcgaactcgtctccccaaacattgtccaatccaggacattcatccggacacatcaacgaccactctccgtcatccttcactcgtttcataaagagatcaggaatccaaagagctataaatagatctctggttctatgttcctcgtttcctgtattctttttaagatcgaggaacgccataatatcagaatgccacggttccaagtatatggccataactccaggccgtttgtttcctccctgatctatgtatctagcggtgttattataaactctcaacattggaataataccgtttgatataccattggtaccggagatatagcttccactggcacgaatattactaattgatagacctattccccctgccattttagagattaatgcgcatcgttttaacgtgtcatagataccctctatgctatcatcgatcatgttaagtagaaaacagctagacatttggtgacgactagttcccgcattaaataaggtaggagaagcgtgcgtaaaccatttttcagaaagtagattgtacgtctcaatagctgagtctatatcccattgatgaattcctactgcgacacgcattaacatgtgctgaggtctttcaacgatcttgttgtttattttcaacaagtaggatttttccaaagttttaaaaccaaaatagttgtatgaaaagtctcgttcgtaaataataaccgagttgagtttatccttatatttgttaactatatccatggtgatacttgaaataatcggagaatgtttcccatttttaggattaacatagttgaataaatcctccatcacttcactaaatagtttttttgtttccttgtgtagatttgatacggctattctggcggctagaatggcataatccggatgttgtgtagtacaagtggctgctatttcggctgccagagtgtccaattctaccgttgttactccattatatattccttgaataaccttcatagctattttaataggatctatatgatccgtgtttaagccataacataattttctaatacgagacgtgattttatcaaacatgacattttccttgtatccatttcgtttaatgacaaacatttttgttggtgtaataaaaaaattatttaacttttcattaatagggatttgacgtatgtagcgtacaaaattatcgttcctggtatatagataaagagtcctatatatttgaaaatcgttacggctcgattaaactttaatgattgcatagtgaatatatcattaggatttaactccttgactatcatggcggcgccagaaattaccatcaaaagcattaatacagttatgccgatcgcagttagaacggttatagcatccaccatttatatctaaaaattagatcaaagaatatgtgacaaagtcctagttgtatactgagaattgacgaaacaatgtttcttacatatttttttcttattagtaactgacttaatagtaggaactggaaagctagacttgattattctataagtatagatacccttccagataatgttctctttgataaaagttccagaaaatgtagaattttttaaaaagttatcttttgctattaccaagattgtgtttagacgcttattattaatatgagtgatgaaatccacaccgcctctagatatcgcctttatttccacattagatggtaaatccaatagtgaaactatctttttaggaatgtatggactcgcgtttagaggagtgaacgtcttaggcgtcggaaaggatgattcatcaaacgaataaacaatttcacaaatggatgttaatgtattagtaggaaattttttgacgctagtggaattgaagattctaatggatgatgttctacctatttcatccgataacatgttaatttccgacaccaacggttttaatatttcgatgatatacggtagtctctctttcggacttatatagcttattccacaatacgagtcattatatactccaaaaaacaaaataactagtataaaatctgtatcgaatgggaaaaacgaaattatcgacataggtatagaatccggaacattgaacgtattaatacttaattctttttctgtggtaagtactgataggttattgacattgtatggttttaaatattctataacttgagacttgatagatattagtgatgaattgaaaattatttttatcaccacgtgtgtttcaggatcatcgtcgacgcccgtcaaccaaccgaacggagtaaaataaatatcattaatatatgctctaaatattagtatttttatcaatcctttgattatcatcttctcgtaggcgaatgattccatgatcaagagtgatttgagaacatcctccggagtattaatgggcttagtaaacagtccatcgttgcaataataaaagttatccaagttaaaggatattatgcattcgtttaaagatatcacctcatctgacggagacaattttttggtaggttttagagactttgaagctacttgtttaacaaagttattcatcgtcgtctactattctatttaattttgtagttaatttatcacatatcacattaattgactttttggtccacttttccatacgtttatattcttttaatcctgcgttatccgtttccgttatatccagggatagatcttgcaagttaaatagaatgctcttaaataatgtcattttcttatccgctaaaaatttaaagaatgtataaacctttttcagagatttgaaactcttaggtggtgtcctagtacacaatatcataaacaaactaataaacattccacattcagattccaacagctgattaacttccacattaatacagcctattttcgctccaaatgtacattcgaaaaatctgaataaaacatcgatgtcacaatttgtattatccaatacagaatgtttgtgattcgtgttaaaaccatcggagaaggaatagaaataaaaattattatagtggtggaattcagttggaatattgcctccggagtcataaaaggatactaaacattgttttttatcataaattacacatttccaatgagacaaataacaaaatccaaacattacaaatctagaggtagaacttttaattttgtctttaagtatatacgataagatatgtttattcataaacgcgtcaaatttttcatgaatcgctaaggagtttaagaatctcatgtcaaattgtcctatataatccacttcggatccataagcaaactgagagactaagttcttaatacttcgattgctcatccaggctcctctctcaggctctattttcatcttgacgacctttggattttcaccagtatgtattcctttacgtgataaatcatcgattttcaaatccatttgtgagaagtctatcgccttagatactttttcccgtagtcgaggtttaaaaaaatacgctaacggtatactagtaggtaactcaaagacatcatatatagaatggtaacgcgtctttaactcgtcggttaactctttcttttgatcgagttcgtcgctactattgggtctgctcaggtgccccgactctactagttccaacatcataccgataggaatacaagacactttgccggcggttgtagatttatcatatttttccactacatatccgttacaatttgttaaaaatttagatacatctatattgctacataatccagctagtgaatatatatgacataataaattggtaaatcctagttctggtattttactaattactaaatctgtatatctttccatttatcatggaaaagaatttaccagatatcttcttttttccaaactgcgttaatgtattctcttacaaatattcacaagatgaattcagtaatatgagtaaaacggaacgtgatagtttctcattggccgtgtttccagttataaaacatagatggcataacgcacacgttgtaaaacataaaggaatatacaaagttagtacagaagcacgtggaaaaaaagtatctcctccatcactaggaaaacccgcacacataaacctaaccgcgaagcaatatatatacagtgaacacacaataagctttgaatgttatagttttctaaaatgtataacaaatacagaaatcaattcgttcgatgagtatatattaagaggactattagaagctggtaatagtttacagatattttccaattccgtaggtaaacgaacagatactataggtgtactagggaataagtatccatttagcaaaattccattggcctcattaactcctaaagcacaacgagagatattttcagcgtggatttctcatagacctgtagttttaactggaggaactggagtgggtaagacgtcacaggtacccaagttattgctttggtttaattatttatttggtggattctctactctagataaaatcactgactttcacgaaagaccagtcattctatctcttcctaggatagctttagttagattgcatagcaataccattttaaaatcattgggatttaaggtactagatggatctcctatttctttacggtacggatctataccggaagaattaataaacaaacaaccaaaaaaatatggaattgtattttctacccataagttatctctaacaaaactatttagttatggcactcttattatagacgaagttcatgagcatgatcaaataggagatattattatagcagtagcgagaaagcatcatacgaaaatagattctatgtttttaatgactgccacgttagaggatgacagggaacggctaaaagtatttttacctaatcccgcatttatacatattcctggagatacactgtttaaaattagcgaggtatttattcataataagataaatccatcttccagaatggcatacatagaagaagaaaagagaaatttagttactgctatacagatgtatactcctcctgatggatcatccggtatagtctttgtggcatccgttgcacagtgtcacgaatataaatcatatttagaaaaaagattaccgtatgatatgtatattattcatggtaaggtcttagatatagacgaaatattagaaaaagtgtattcatcacctaatgtatcgataattatttctactccttatttggaatccagcgttactatacgcaatgttacacacatttatgatatgggtagagtttttgtccccgctccttttggaggatcgcaacaatttatttctaaatctatgagagatcaacgaaaaggaagagtaggaagagttaatcctggtacatacgtctatttctatgatctgtcttatatgaagtctatacagcgaatagattcagaatttctacataattatatattgtacgctaataagtttaatctaacactccccgaagatttgtttataatccctacaaatttggatattctatggcgtacaaaggaatatatagactcgttcgatattagtacagaaacatggaataaattattatccaattattatatgaagatgatagagtatgctaaactttatgtactaagtcctattctcgctgaggagttggataactttgagaggacgggagaattaactagtattgtacgagaagccattttatctctaaatttacaaattaagattttaaattttaaacataaagatgatgatacgtatatacacttttgtaaaatattattcggtgtctataacggaacaaacgctactatatattatcatagacctctaacgggatatatgaatatgatttcagatactatatttgttcctgtagataataactaaaaatcaaactctaatgaccacatctttttttagagatgaaaaattttccacatctccttttgtagacacgactaaacattttgcagaaaaaagtttattagtgtttagataatcgtatacttcatcagtgtagatagtaaatgtgaacagataaaaggtattcttgctcaatagattggtaaattccatagaatatattaatcctttcttcttgagatcccacatcatttcaaccagagacgttttatccaatgatttacctcgtactataccacatacaaaactagattttgcagtgacgtcgtacctggtattcctaccaaacaaaattttacttttagttcttttagaaaattctaaggtagaatctctatttgccaatatgtcatctatggaattaccactagcaaaaaatgatagaaatatatattgatacatcgcagctggttttgatctactatactttaaaaacgaatcagattccataattgcctgtatatcatcagctgaaaaactatgttttacacgtattccttcggcatttctttttaatgatatatcttgtttagacaatgataaagttatcatgtccatgagagacgcgtctccgtatcgtataaatatttcattagatgttagacgcttcattaggggtatacttctataaggtttcttaatcagtccatcattggttgcgtcaagaactactatcggatgttgttgggtatctctagtgttacacatggccttactaaagtttgggtaaataactatgatatctctattaattatagatgcatatatttcattcgtcaaggatattagtatcgacttgctatcgtcattaatacgtgtaatgtaatcatataaatcatgcgatagccaaggaaaatttaaatagatgttcatcatataatcgtcgctataattcatattaatacgttgacattgactaatttgtaatatagcctcgccacgaagaaagctctcgtattcagtttcatcgataaaggataccgttaaatataactggttgccgatagtctcatagtctattaagtggtaagtttcgtacaaatacagaatccctaaaatattatctaatgttggattaatctttaccataactgtataaaatggagacggagtcataactattttaccgtttgtacttactggaatagatgaaggaataatctccggacatgctggtaaagacccaaatgtctgtttgaagaaatccaatgttccaggtcctaatctcttaacaaaaattacgatattcgatcccgatatcctttgcattctatttaccagcatatcacgaactatattaagattatctatcatgtctattctcccaccgttatataaatcgcctccgctaagaaacgttagtatatccatacaatggaatacttcatttctaaaatagtattcgttttctaattctttaatgtgaaatcgtatactagaaagggaaaaattatctttgagttttccgttagaaaagaaccacgaaactaatgttctgattgcgtccgattccgttgctgaattaatggatttacaccaaaaactcatataacttctagatgtagaagcattcgctaaaaaattagtagaatcaaaggatataagtagatgttccaacaagtgagcaattcccaagatttcatctatatcattctcgaatccgaaattagaaattcccaagtagatatcctttttcatccgatcgttgatgaaaatacgaactttattcggtaagacaatcatttactaaggagtaaaataggaagtaatgttcgtatgtcgttatcatcgtataaattaaaggtgtgttttttaccattaagtgacattataattttaccaatattggaattataatataggtgtatttgcgcactcgcgacggttgatgcatcggtaaatatagctgtatctaatgttctagtcggtatttcatcatttcgctgtctaataatagcgttttctctatctgtttccattacagctgcctgaagtttattggtcggataatatgtaaaataataagaaatacatacgaataacaaaaataaaataagatataataaagatgccatttagagatctaattttgtttaacttgtccaaattcctacttacagaagatgaggaatcgttggagatagtgtcttccttatgtagaggatttgaaatatcttataatgacttgataacttactttccagataggaaataccataaatatatttataaagtatttgaacatgtagatttatcggaggaattaagtatggaattccatgatacaactctgagagatttagtctatcttagattgtacaagtattccaagtgtatacggccgtgttataaattaggagataatctaaaaggcatagttgttataaaggacaggaatatttatattagggaagcaaatgatgacttgatagaatatctcctcaaggaatacactcctcagatttatacatattctaatgagcgcgtccccataactggttcaaaattaattctttgtggattttctcaagttacatttatggcgtatacaacgtcgcatataacaacaaataaaaaggtagatgttctcgtttccaaaaaatgtatagatgaactagtcgatccaataaattatcaaatacttcaaaatttatttgataaaggaagcggaacaataaacaaaatactcaggaagatattttattcggtaacaggtggccaaactccataggtagctttttctatttcggattttagaatttccaaattcaccagcgatttatcggttttggtgaaatccaaggatttattaatgtccacaaatgccatttgttttgtctgtggattgtatttgaaaatggaaacgatgtagttagatagatgcgctgcgaagtttcctattagggttccgcgcttcacgtcacccagcatacttgaatcaccatcctttaaaaaaaatgataagatatcaacatggagtatatcatactcggattttaattcttctactgcatcactgacattttcacaaatactacaatacggtttaccgaaaataatcagtacgttcttcatttatgggtatcaaaaacttaaaatcgttactgctggaaaataaatcactgacgatattagatgataatttatacaaagtatacaatggaatatttgtggatacaatgagtatttatatagccgtcgccaattgtgtcagaaacttagaagagttaactacggtattcataaaatacgtaaacggatgggtaaaaaagggagggcatgtaaccctttttatcgatagaggaagtataaaaattaaacaagacgttagagacaagagacgtaaatattctaaattaaccaaggacagaaaaatgttagaattagaaaagtgtacatccgaaatacaaaatgttaccggatttatggaagaagaaataaaggcagaaatgcaattaaaaatcgataaactcacatttcaaatatatttatctgattctgataacataaaaatatcattgaatgagatactaacacatttcaacaataatgagaatgttacattattttattgtgatgaacgagacgcagaattcgttatgtgtctcgaggctaaaacacatttctctaccacaggagaatggccgttgataataagtaccgatcaggatactatgctatttgcatctgctgataatcatcctaagatgataaaaaacttaactcaactgtttaaatttgttccctcggcagaggataactatttagcaaaattaacggcgttagtgaatggatgtgatttctttcctggactctatggggcatctataacacccaccaacttaaacaaaatacaattgtttagtgattttacaatcgataatatagtcactagtttggcaattaaaaattattatagaaagactaactctaccgtagacgtgcgtaatattgttacgtttataaacgattacgctaatttagacgatgtctactcgtatattcctccttgtcaatgcactgttcaagaatttatattttccgcattagatgaaaaatggaatgaatttaaatcatcttatttagaaagcgtgccgttaccctgccaattaatgtacgcgttagaaccacgcaaggagattgatgtttcagaagttaaaactttatcatcttatatagatttcgaaaatactaaatcagatatcgatgttataaaatctatatcctcgatcttcggatattctaacgaaaactgtaacacgatagtattcggcatctataaggataatttactactgagtataaataattcattttactttaacgatagtctgttaataaccaatactaaaagtgataatataataaatataggttactagattaaaaatggtgttccaactcgtgtgctctacatgcggtaaagatatttctcacgaacgatataaattgattatacgaaaaaaatcattaaaggatgtactcgtcagtgtaaagaacgaatgttgtaggttaaaattatctacacaaatagaacctcaacgtaacttaacagtgcaacctctattggatataaactaatatggatccggttaattttatcaagacatatgcgcctagaggttctattatttttattaattataccatgtcattaacaagtcatttgaatccatcgatagaaaaacatgtgggtatttattatggtacgttattatcggaacacttggtagttgaatctacctatagaaaaggagttcgaatagtcccattggatagtttttttgaaggatatcttagtgcaaaagtatacatgttagagaatattcaagttatgaaaatagcagctgatacgtcattaactttattgggtattccgtatggatttggtcataatagaatgtattgttttaaattggtagctgactgttataaaaatgccggtattgatacatcgtctaaacgaatattgggcaaagatatttttctgagccaaaacttcacagacgataatagatggataaagatatatgattctaataatttaacattttggcaaattgattaccttaaagggtgagttaatatgcataactactcctccgttgttttttccctcgttctttttcttaacgttgtttgccatcactctcataatgtaaagatattctaaaatggtaaacttttgcatatcggacgcagaaattggtataaatgttgtaattgtattatttcccgtcaatggactagtcacagctccatcagttttatatcctttagagtatttctcactcgtgtctaacattctagagcattccatgatctgtttatcgttgatattggccggaaagatagattttttattttttattatattactattggcaattgtagatataacttctggtaaatatttttctaccttttcaatctcttctattttcaagccggctatatattctgctatattgttgctagtatcaataccttttctggctaagaagtcatatgtggtattcactatatcagttttaactggtagttccattagcctttccacttctgcagaataatcagaaattggttctttaccagaaaatccagctactataataggctcaccgatgatcattggcaaaatcctatattgtaccagattaatgagagcatatttcatttccaataattctgctagttcttgagacattgatttatttgatgaatctagttggttctctagatactctaccatttctgccgcatacaataacttgttagataaaatcagggttatcaaagtgtttagcgtggctagaatagtgggcttgcatgtattaaagaatgcggtagtatgagtaaaccgttttaacgaattatatagtctccagaaatctgtggcgttacatacatgagccgaatgacatcgaagattgtccaatatttttaatagctgctctttgtccattatttctatatttgactcgcaacaattgtagataccattaatcaccgattcctttttcgatgccggacaatagcacaattgtttagctttggactctatgtattcagaattaatagatatatctctcaatacagattgcactatacattttgaaactatgtcaaaaattgtagaacgacgctgttctgcagccatttaactttaaataatttacaaaaatttaaaatgagcatccgtataaaaatcgataaactgcgccaaattgtggcatatttttcagagttcagtgaagaagtgtctataaatgtagactcgacggatgagttaatgtatatttttgccgccttgggcggatctgtaaacatttgggccattatacctctcagtgcatcagtgttttaccgaggagccgaaaacattgtgtttaatcttccggtgtccaaggtaaaatcgtgtttgtgtagttttcacaatgatgccatcatagatatagaacctgatctggaaaataatctagtaaaactttctagttatcatgtagtaagtgtcgattgtaataaggaactgatgcctattaggacagatactactatttgtctaagtatagatcaaaagaaatcttacgtgtttaattttcacaagtatgaagaaaaatgttgtggtagaaccgtcattcatttagaatggttgttgggctttatcaagtgtattagtcagcatcagcatttggctattatgtttaaagatgacaatattattatgaagactcctggtaatactgatgcattttccagggaatattctatgactgaatgttctcaagaactacaaaagttttctttcaaaatagctatctcgtctctcaacaaactacgaggattcaaaaagagagtcaatgtttttgaaactagaatcgtaatggataatgacgataacattttaggaatgttgttttcggatagagttcaatcctttaagatcaacatctttatggcgtttttagattaatactttcaatgagataaatatgggtggcggagtaagtgttgagctccctaaacgggatccgcctccgggagtacccactgatgagatgttattaaacgtggataaaatgcatgacgtgatagctcccgctaagcttttagaatatgtgcatataggaccactagcaaaagataaagaggataaagtaaagaaaagatatccagagtttagattagttaacacaggacccggtggtctttcggcattgttaagacaatcgtataatggaaccgcacccaattgctgtcgcacttttaatcgtactcattattggaagaaggatggaaagatatcagataagtatgaagagggtgcagtattagaatcgtgttggccagacgttcacgacactggaaaatgcgatgttgatttattcgactggtgtcagggggatacgttcgatagaaacatatgccatcagtggatcggttcagcctttaataggagtaatagaactgtagagggtcaacaatcgttaataaatctgtataataagatgcaaacattatgtagtaaagatgctagtgtaccaatatgcgaatcatttttgcattatttacgcgcacacaatacagaagatagcaaagagatgatcgattatattctaagacaacagtctgcggactttaaacagaaatatatgagatgtagttatcccactagagataagttagaagagtcattaaaatatgcggaacctcgagaatgttgggatccagagtgttcgaatgccaatgttaatttcttactaacacgtaattataataatttaggactttgcaatattgtacgatgtaatactagcgtgaacaacttacagatggataaaacttcctcattaagattgtcatgtggattaagcaatagtgatagattttctactgttcccgtcaatagagcaaaagtagttcaacataatattaaacactcgttcgacctaaaattgcatttgatcagtttattatctctcttggtaatatggatactaattgtagctatttaaatgggtgccgcggcaagcatacagacgacggtgaatacactcagcgaacgtatctcgtctaaattagaacaagaagcgaacgctagtgctcaaacaaaatgtgatatagaaatcggaaatttttatatccgacaaaaccatggatgtaacctcactgttaaaaatatgtgctctgcggacgcggatgctcagttggatgctgtgttatcagccgctacagaaacatatagtggattaacaccggaacaaaaagcatacgtgccagctatgtttactgctgcgttaaacattcagacgagtgtaaacactgttgttagagattttgaaaattatgtgaaacagacttgtaattctagcgcggtcgtcgataacaaattaaagatacaaaacgtaatcatagatgaatgttacggagccccaggatctccaacaaatttggaatttattaatacaggatctagcaaaggaaattgtgccattaaggcgttgatgcaattgactactaaggccactactcaaatagcacctaaacaagttgctggtacaggagttcagttttatatgattgttatcggtgttataatattggcagcgttgtttatgtactatgccaagcgtatgttgttcacatccaccaatgataaaatcaaacttattttagccaataaggaaaacgtccattggactacttacatggacacattctttagaacttctccgatggttattgctaccacggatatgcaaaactgaaaatatattgataatattttaatagattaacatggaagttatcgctgatcgtctagacgatatagtgaaacaaaatatagcggatgaaaaatttgtagattttgttatacacggtctagagcatcaatgtcctgctatacttcgaccattaattaggttgtttattgatatactattatttgttatagtaatttatatttttacggtacgtctagtaagtagaaattatcaaatgttgttggtgttggtggcgctagtcatcacattaactattttttattactttatactataatagtactagactgacttctaacaaacatctcacctgccataaataaatgcttgatattaaagtcttctatttctaacactattccatctgtggaaaataatactctgacattatcgctaattgacacatcggtgagtgatatgcctataaagtaataatcttctttgggcacatataccagtgtaccaggttctaacaacctatttactggtgctcctgtagcatactttttctttaccttgagaatatccatcgtttgcttggtcaatagcgatatgtgattttttatcaaccactcgaaaaagtaattggagtgttcatatcctctacgggctattgtctcatggccgtgtatgaaatttaagtaacacgactgtggtagatttgttctatagagccggttgccgcaaatagatagaactaccaatatgtctgtacaaatgttaaacattaattgattaacagaaaaaacaatgttcgttctgggaatagaaaccagatcaaaacaaaattcgttagaatatatgccacgtttatacatggaatataaaataactacagtttgaaaaataacagtatcatttaaacatttaacttgcggggttaatctcacaactttactgtttttgaactgttcaaaatatagcatcgatccgtgagaaatacgtttagccgcctttaatagaggaaatcccaccgcctttctggatctcaccaacgacgatagttctgaccagcaactcatttcttcatcatccacctgttttaacatataataggcaggagatagatatccgtcattgcaatattccttctcgtaggcacacaatctaatattgataaaatctccattctcttctctgcatttattatcttgtctcggtggctgattaggctgtggtcttggtttaggccttggtctatcgttgttgaatctattttggtcattaaatctttcatttcttcctggtatatttctatcacctcgtttggttggatttttgtctatattatcgtttgtaacatcggtacgggtattcatttatcacaaaaaaaacttctctaaatgagtctactgctagaaaacctcatcgaagaagataccatattttttgcaggaagtatatctgagtatgatgatttacaaatggttattgccggcgcaaaatccaaatttccaagatctatgctttctatttttaatatagtacctagaacgatgtcaaaatatgagttggagttgattcataacgaaaatatcacaggagcaatgtttaccacaatgtataatataagaaacaatttgggtctaggagatgataaactaactattgaagccattgaaaactatttcttggatcctaacaatgaagttatgcctcttattattaataatacggatatgactgccgtcattcctaaaaaaagtggtaggagaaagaataagaacatggttatcttccgtcaaggatcatcacctatcttgtgcattttcgaaactcgtaaaaagattaatatttataaagaaaatatggaatccgcgtcgactgagtatacacctatcggagacaacaaggctttgatatctaaatatgcgggaattaatgtcctgaatgtgtattctccttccacatccataagattgaatgccatttacggattcaccaataaaaataaactagagaaacttagtactaataaggaactagaatcgtatagttctagccctcttcaagaacccattaggttaaatgattttctgggactattggaatgtgttaaaaagaatattcctctaacagatattccgacaaaggattgattactataaatggagaatgttcctaatgtatactttaatcctgtgtttatagagcccacgtttaaacattctttattaagtgtttataaacacagattaatagttttatttgaagtattcgttgtattcattctaatatatgtattttttagatctgaattaaatatgttcttcatgcctaaacgaaaaatacccgatcctattgatagattacgacgtgctaatctagcgtgtgaagacgataaattaatgatctatggattaccatggatgacaactcaaacatctgcgttatcaataaatagtaaaccgatagtgtataaagattgtgcaaagcttttgcgatcaataaatggatcacaaccagtatctcttaacgatgttcttcgcagatgatgattcattttttaagtatttggctagtcaagatgatgaatcttcattatctgatatattgcaaatcactcaatatctagactttctgttattattattgatccaatcaaaaaataaattagaagccgtgggtcattgttatgaatctctttcagaggaatacagacaattgacaaaattcacagactctcaagattttaaaaaactgtttaacaaggtccctattgttacagatggaagggtcaaacttaataaaggatatttgttcgactttgtgattagtttgatgcgattcaaaaaagaatcctctctagctaccaccgcaatagatcctattagatacatagatcctcgtcgcgatatcgcattttctaacgtgatggatatattaaagtcgaataaagtgaacaataattaattctttattgtcatcatgaacggcggacatattcagttgataatcggccccatgttttcaggtaaaagtacagaattaattagacgagttagacgttatcaaatagctcaatataaatgcgtgactataaaatattctaacgataatagatacggaacgggactatggacgcatgataagaataattttgaagcattggaagcaactaaactatgtgatgtcttggaatcaattacagatttctccgtgataggtatcgatgaaggacagttctttccagacattgttgaattctgtgagcgtatggcaaacgaaggaaaaatagttatagtagccgcactcgatgggacatttcaacgtaaaccgtttaataatattttgaatcttattccattatctgaaatggtggtaaaactaactgctgtgtgtatgaaatgctttaaggaggcttccttttctaaacgattgggtgaggaaaccgagatagagataataggaggtaatgatatgtatcaatcggtgtgtagaaagtgttacgtcggctcataatattatattttttatctaaaaaactaaaaataaacattgattaaattttaatataatacttaaaaatggatgttgtgtcgttagataaaccgtttatgtattttgaggaaattgataatgagttagattacgaaccagaaagtgcaaatgaggtcgcaaaaaaactgccgtatcaaggacagttaaaactattactaggagaattattttttcttagtaagttacagcgacacggtatattagatggtgccaccgtagtgtatataggatcggctcctggtacacatatacgttatttgagagatcatttctataatttaggagtgatcatcaaatggatgctaattgacggccgccatcatgatcctattttaaatggattgcgtgatgtgactctagtgactcggttcgttgatgaggaatatctacgatccatcaaaaaacaactgcatccttctaagattattttaatttctgatgtgagatccaaacgaggaggaaatgaacctagtacggcggatttactaagtaattacgctctacaaaatgtcatgattagtattttaaaccccgtggcatctagtcttaaatggagatgcccgtttccagatcaatggatcaaggacttttatatcccacacggtaataaaatgttacaaccttttgctccttcatattcagctgaaatgagattattaagtatttataccggtgagaacatgagactgactcgagttaccaaattagacgctgtaaattatgaaaaaaagatgtactaccttaataagatcgtccgtaacaaagtagttgttaactttgattatcctaatcaggaatatgactattttcacatgtactttatgctgaggaccgtgtactgcaataaaacatttcctactactaaagcaaaggtactatttctacaacaatctatatttcgtttcttaaatattccaacaacatcaactgaaaaagttagtcatgaaccaatacaacgtaaaatatctagcaaaaattctatgtctaaaaacagaaatagcaagagatccgtacgcggtaataaatagaaacgtactactgagatatactaccgatatagagtataatgatttagttactttaataaccgttagacataaaattgattctatgaaaactgtgtttcaggtatttaacgaatcatccataaattatactccggttgatgatgattatggagaaccaatcattataacatcgtatcttcaaaaaggtcataacaagtttcctgtaaattttctatacatagatgtggtaatatctgacttatttcctagctttgttagactagatactacagaaactaatatagttaatagtgtactacaaacaggcgatggtaaaaagactcttcgtcttcccaaaatgttagagacggaaatagttgtcaagattctctatcgccctaatataccattaaaaattgttagatttttccgcaataacatggtaactggagtagagatagccgatagatctgttatttcagtcgctgattaatcaattagtagagatgagataagaacattataataatcaataatatatcttatatcttatatcttatatcttatatcttgtttagaaaaatgctaatattaaaatagctaacgctagtaatccaatcggaagccatttgatatctataatagggtatctaatttcctgatttaaatagcggacagctatattctcggtagctactcgtttggaatcacaaacattatttacatctaatttactatctgtaatggaaacgtttcccaatgaaatggtacaatccgatacattgcattttgttatatttttttttaaagaggctggtaacaacgcatcgcttcgtttacatggctcgtaccaacaataatagggtaatcttgtatctattcctatccgtactatgcttttatcaggataaatacatttacatcgtatatcgtctttgttagcatcacagaatgcataaatttgttcgtccgtcatgataaaaatttaaagtgtaaatataactattatttttatagttgtaataaaaagggaaatttgattgtatactttcggttctttaaaagaaactgacttgataaaaatggctgtaatctctaaggttacgtatagtctatatgatcaaaaagagattaatgctacagatattatcattagtcatgttaaaaatgacgacgatatcggtaccgttaaagatggtagactaggtgctatggatggggcattatgtaagacttgtgggaaaacggaattggaatgtttcggtcactggggtaaagtaagtatttataaaactcatatagttaagcctgaatttatttcagaaattattcgtttactgaatcatatatgtattcactgcggattattgcgttcacgagaaccgtattccgacgatattaacctaaaagagttatcgggacacgctcttaggagattaaaggataaaatattatccaagaaaaagtcatgttggaacagtgaatgtatgcaaccgtatcaaaaaattactttttcaaagaaaaaggtttgtttcgtcaacaagttggatgatattaacgttcctaattctctcatctatcaaaagttaatttctattcatgaaaagttttggccattattagaaattcatcaatatccagctaacttattttatacagactactttcccatccctccgttgattattagaccggctattagtttttggatagatagtatacccaaagagaccaatgaattaacttacttattaggtatgatcgttaagaattgtaacttgaatgctgatgaacaggttatccagaaggcggtaatagaatacgatgatattaaaattatttctaataacactaccagtatcaatttatcatatattacatccggcaaaaataatatgattagaagttatatcgtcgcccgacgaaaagatcagaccgctagatctgtaattggtcccagtacatctatcaccgttaatgaggtaggaatgcccgcatatattagaaatacacttacagaaaagatatttgttaatgcctttacagtggataaagttaaacaactattagcgtcaaaccaagttaaattttactttaataaacgattaaaccaattaacaagaatacgccaaggaaagtttattaaaaataaaatacatttattgcctggtgattgggtagaagtagctgttcaagaatatacaagtattatttttggaagacagccgtctctacatagatacaacgtcatcgcttcatctatcagagctaccgaaggagatactatcaaaatatctcccggaattgccaactctcaaaatgctgatttcgacggggatgaggaatggatgatattagaacaaaatcctaaagctgtaattgaacaaagtattcttatgtatccgacgacgttactcaaacacgatattcatggagcccccgtttatggatctattcaagatgaaatcgtagcagcgtattcattgtttaggatacaagatctttgtttagatgaagtattgaacatcttggggaaatatggaagagagttcgatcctaaaggtaaatgtaaattcagcggtaaagatatctatacttacttgataggtgaaaagattaattatccgggtctcttaaaggatggtgaaattattgcaaacgacgtagatagtaattttgttgtggctatgaggcatctgtcattggctggactcttatccgatcataagtcgaacgtggaaggtatcaactttattatcaagtcatcttatgtttttaagagatatctatctatttacggttttggggtgacattcaaagatctgagaccaaattcgacgttcactaataaattggaggccatcaacgtagaaaaaatagaacttatcaaagaagcatacgccaaatatctcaacgatgtaagagacgggaaaatagttccattatctaaagctttagaggcggactatgtggaatccatgttatccaacttgacaaatcttaatatccgagagatagaagaacatatgagacaaacgctgatagatgatccagataataacctcctgaaaatggccaaagcgggttataaagtaaatcccacagaactaatgtatattctaggtacgtatggacaacaaaggattgatggtgaaccagcagagactcgagtattgggtagagttttaccttactatcttccagactctaaggatccagaaggaagaggttatattcttaattctttaacaaaaggattaacgggttctcaatattacttttcgatgctggttgcaagatctcaatctactgatatcgtctgtgaaacatcacgtaccggaacactggctagaaaaatcattaaaaagatggaggatatggtggtcgacggatacggacaagtagttataggtaatacgctcatcaagtacgccgccaattataccaaaattctaggctcagtatgtaaacctgtagatcttatctatccagatgagtccatgacttggtatttggaaattagtgctctgtggaataaaataaaacagggattcgtttactctcagaaacagaaacttgcaaagaagacattggcgccgtttaatttcctagtattcgtcaaacccaccactgaggataatgctattaaggttaaggatctgtacgatatgattcataacgtcattgatgatgtgagagagaaatacttctttacggtatctaatatagattttatggagtatatattcttgacgcatcttaatccttctagaattagaattacaaaagaaacggctatcactatctttgaaaagttctatgaaaaactcaattatactctaggtggtggaactcctattggaattatttctgcacaggtattgtctgagaagtttacacaacaagccctgtccagttttcacactactgaaaaaagtggtgccgtcaaacaaaaacttggtttcaacgagtttaataacttgactaatttgagtaagaataagaccgaaattatcactctggtatccgatgatatctctaaacttcaatctgttaagattaatttcgaatttgtatgtttgggagaattaaatccagacatcactcttcgaaaagaaacagataggtatgtagtagatataatagtcaatagattatacatcaagagagcagaaataaccgaattagtcgtcgaatatatgattgaacgatttatctcctttagcgtcattgtaaaggaatggggtatggaaacattcattgaggatgaggataatattagatttactgtctacctaaatttcgttgaaccggaagaattgaatcttagtaagtttatgatggttcttccgggtgccgccaacaagggaaagattagtaaattcaagattcctatctctgactatacgggatatgacgacttcaatcaaacaaaaaagctcaataagatgactgtagaactcatgaatctaaaagaattgggttctttcgatttggaaaacgtcaacgtgtatcctggagtatggaatacatacgatatcttcggtatcgaggccgctcgtgaatacttgtgcgaagccatgttaaacacctatggagaagggttcgattatctgtatcagccttgtgatcttctcgctagtttactatgtgctagttacgaaccagaatcagtgaataaattcaagttcggcgcagctagtactcttaagagagctacgttcggagacaataaagcattgttaaacgcggctcttcataaaaagtcagaacctattaacgataatagtagctgccacttttttagcaaggtccctaatataggaactggatattacaaatactttatcgacttgggtcttctcatgagaatggaaaggaaactatctgataagatatcttctcaaaagatcaaggaaatggaagaaacagaagacttttaattcttatcaataacatatttttctatgatctgtcttttaaacgatggattttccacaaatgcgcctctcaagtccctcatagaatgatacacgtataaaaaatatagcataggcgatgactccttatttttagacattagatatgccaaaatcatagccccgcttctatttactcccgcagcacaatgaaccaacacgggctcgtttcgttgatcacatttagataaaaaggcggttacgtcgtcaaaatatttactaatatcggtagttgtatcatctaccaacggtatatgaataatattaatattagagttaggtaatgtatatttatccatcgtcaaatttaaaacatatttgaacttaacttcagatgatggtgcatccatagcatttttataatttcccaaatacacattattggttacccttgtcattatagtgggagatttggctctgtgcatatctccagttgaacgtagtagtaagtatttatacaaacttttcttatccatttataacgtacaaatggataaaactactttatcggtaaacgcgtgtaatttagaatacgttagagaaaaggctatagtaggcgtacaagcagccaaaacatcaacacttatattctttgttattatattggcaattagtgcgctattactctggtttcagacgtctgataatccagtctttaatgaattaacgagatatatgcgaattaaaaatacggttaacgattggaaatcattaacggatagcaaaacaaaattagaaagtgatagaggtagacttctagccgctggtaaggatgatatattcgacttcaaatgtgtggatttcggcgcctattttatagctatgcgattggataagaaaacatatctgccgcaagctattaggcgaggtactggagacgcgtggatggttaaaaaggcggcaaaggtcgatccatctgctcaacaattttgtcagtatttgataaaacacaagtctaataatgttattacttgtggtaatgagatgttaaatgaattaggttatagcggttattttatgtcaccgcattggtgttccgattttagtaatatggaatagtgttagataaatgcggtaacgaatgttcctgtaaggaaccataacagcttagatttaacgttaaagatgagcataaacataataaacaaaattacaatcaaacttataacattaatatcaaacaatccaaaaaatgaaatcagtggagtagtaaacgcgtacataactcctggataacgtttagcagctgccgttcctattctagaccaaaaattcggtttcatgttttcgaaacggtattctgcaacaagtcgaggatcgtgttctacatatttggcggcgttatccagtatctgcctattgatcttcatttcgttttcgattctggctatttcaaaataaaatcccgatgatagacctccagactttataatttcatctacgatgttcagcgccgtagtaactttaataatataggctgataagctaacatcataccctcctgtatatgtgaatatggcatgatttttgtccattacaagctcggttttaactttattgcctgtaataatttctctcatctgtaggatatctatttttttgtcatgcattgccttcaagacgggacgaagaaacgtaatatcctcaataacgttatcgttttctacaataactacatattctacctttttattttctaactcagtaaaaaaattagaatcccatagggctaaatgtctagcgatatttcttttcgtttcctctgtacacatagtgttacaaaaccctgaaaagaagtgagtatacttgtcatcatttctaatgtttcctccagtccactgtataaacgcataatccttgtaatgatctggatcatccttgactaccacaacatttcttttttctggcataacttcgttgtcctttacatcatcgaacttctgatcattaatatgctcatgaacattaggaaatgtttctgatggaggtctatcaataactggcacaacaataacaggagttttcaccgccgccatttagttattgaaattaatcatatacaactctttaatacgagttatattttcgtctatccattgtttcacattgacatatttcgacaaaaagatataaaatgcgtattccaatgcttctctgtttaatgaattactaaaatatacaaacacgtcactgtctggcaataaatgatatcttagaatattgtaacaatttattttgtattgcacatgttcgtgatctatgagttcttcttcgaatggcataggatctccgaatctgaaaacgtataaataggagttagaataataatatttgagagtattggtaatatataaactctttagcggtataattagtttttttctctcaatttctatttttagatgtgatggaaaaatgactaattttgtagcattagtatcatgaactctaatcaaaatcttaatatcttcgtcacacgttagctctttgaagtttttaagagatgcatcagttggttctacagatggagtaggtgcaacaattttttgttctacacatgtatgtactggagccattgttttaactataatggtgcttgtatcgaaaaactttaatgcagatagcggaagctcttcgccgcgactttctacgtcgtaattgggttctaacgccgatctctgaatggatactagttttctaagttctaatgtgattctctgaaaatgtaaatccaattcctccggcattatagatgtgtatacatcggtaaataaaactatagtatccaacgatcccttctcgcaaattctagtcttaaccaaaaaatcgtatataaccacggagatggcgtatttaagagtggattcttctaccgttttgttcttggatgtcatataggaaactataaagtccgcactactgttaagaatgattactaacgcaactatatagtttaaattaagcattttggaaacataaaataactctgtagacgatacttgactttcgaataagtttgcagacaaacgaagaaagaacagacctctcttaatttcagaagaaaactttttttcgtattcctgacgtctagagtttatatcaataagaaagttaagaattagtcggttaatgttgtatttcattacccaagtttgagatttcataatattatcaaaagacatgataatattaaagataaagcgctgactatgaacgaaatagctatatggttcgctcaagaatatagtcttgttaaacgtggaaacgataactgtatttttaatcacgtcagcggcatctaaattaaatataggtatatttattccacacactctacaatatgccacaccatcttcataataaataaattcgttagcaaaattattaattttagtgaaatagttagcgtcaactttcatagcttccttcaatctaatttgatgctcacacggtgcgaattccactctaacatcccttttccatgcctcaggttcatcgatctctataatatctagttttttgcgtttcacaaacacaggctcgtctctcgcgatgagatctgtatagtaactatgtaaatgataactagatagaaagatgtagctatatagatgacgatcctttaagagaggtataataactttaccccaatcagatagactgttgttatggtcttcggaaaaagaatttttataaatttttccagtattttccaaatatacgtacttaacatctaaaaaatccttaatgataataggaatggataatccgtctattttataaagaaatacatatcgcacattatacttttttttggaaatgggaataccgatgtgtctacataaatatgcaaagtctaaatattttttagagaatcttagttggtccaaattcttttccaagtacggtaatagatttttcatattgaacggtatcttcttaatctctggttctagttccgcattaaatgatgaaactaagtcactatttttataactaacgattacatcacctctaacatcatcatttaccagaatactgatcttcttttgtcgtaaatacatgtctaatgtgttaaaaaaaagatcatacaagttatacgtcatttcatctgtggtattcttgtcattgaaggataaactcgtactaatctcttctttaacagcctgttcaaatttatatcctatatacgaaaaaatagcaaccagtgtttgatcatccgcgtcaatattctgttctatcgtagtgtataacaatcgtatatcttcttctgtgatagtcgatacgttataaaggttgataacgaaaatatttttatttcgtgaaataaagtcatcgtaggattttggacttatattcgcgtctagtagatatgcttttatttttggaatgatctcaattagaatagtctctttagagtccatttaaagttacaaacaactaggaaattggtttatgatgtataatttttttagtttttatagattctttattctatacttaaaaaatgaaaataaatacaaaggttcttgagggttgtgttaaattgaaagcgagaaataatcataaattatttcattatcgcgatatccgttaagtttgtatcgtaatggcgtggtcaattacgaataaagcggatactagtagcttcacaaagatggctgaaatcagagctcatctaaaaaatagcgctgaaaataaagataaaaacgaggatattttcccggaagatgtaataattccatctactaagcccaaaaccaaacgagccactactcctcgtaaaccagcggctactaaaagatcaaccaaaaaggaggaagtggaagaagaagtagttatagaggaatatcatcaaacaactgaaaaaaattctccatctcctggagtcagcgacattgtagaaagcgtggctgctgtagagctcgatgatagcgacggggatgatgaacctatggtacaagttgaagctggtaaagtaaatcatagtgctagaagcgatctctctgacctaaaggtggctaccgacaatatcgttaaagatcttaagaaaattattactagaatctctgcagtatcgacggttctagaggatgttcaagcagctggtatctctagacaatttacttctatgactaaagctattacaacactatctgatctagtcaccgagggaaaatctaaagttgttcgtaaaaaagttaaaacttgtaagaagtaaatgcgtgcacttttttataaagatggtaaactctttaccgataataattttttaaatcctgtatcagacgataatccagcgtatgaggttttgcaacatgttaaaattcctactcatttaacagatgtagtagtatatgaacaaacgtgggaggaggcgttaactagattaatttttgtgggaagcgattcaaaaggacgtagacaatacttttacggaaaaatgcatgtacagaatcgcaacgctaaaagagatcgtatttttgttagagtatataacgttatgaaacgaattaattgttttataaacaaaaatataaagaaatcgtccacagattccaattatcagttggcggtttttatgttaatggaaactatgttttttattagatttggtaaaatgaaatatcttaaggagaatgaaacagtagggttattaacactaaaaaataaacacatagaaataagtcccgatgaaatagttatcaagtttgtaggaaaggacaaagtttcacatgaatttgttgttcataagtctaatagactatataaaccgctattgaaactgacggatgattctagtcccgaagaatttctgttcaacaaactaagtgaacgaaaggtatacgaatgtatcaaacagtttggtattagaatcaaggatctccgaacgtatggagtcaattatacgtttttatataatttttggacaaatgtaaagtccatatctcctcttccgtcaccaaaaaagttaatagcgttaactatcaaacaaactgctgaagtggtaggtcatactccatcaatttcaaaaagagcttatatggcaacgactattttagaaatggtaaaggataaaaattttttagatgtagtatctaaaactacgttcgatgaattcctatctatagtcgtagatcacgttaaatcatctacggatggatgatatagatctttacacaaataattacaagaccgataaatggaaatggataagcgtatgaaatctctcgcaatgacagctttcttcggagagctaagcacattagatattatggcattgataatgtctatatttaaacgccatccaaacaataccattttttcagtggataaggatggtcagtttatgattgatttcgaatacgataattataaggcttctcaatatttggatctgaccctcactccgatatctggagatgaatgcaagactcacgcatcgagtatagccgaacaattggcgtgtgtggatattattaaagaggatattagcgaatatatcaaaactactccccgtcttaaacgatttataaaaaaataccgcaatagatcagatactcgcatcagtcgagatacagaaaagcttaaaatagctctagctaaaggcatagattacgaatatataaaagacgcttgttaataagtaaatgaaaaaaaactagtcgtttataataaaacacgatatggatgccaacgtagtatcatcttctactattgcgacgtatatagacgctttagcgaagaatgcttcagaattagaacagaggtctaccgcatacgaaataaataatgaattggaactagtatttattaagccgccattgattactttgacaaatgtagtgaatatctctacgattcaggaatcgtttattcgatttaccgttactaataaggaaggtgttaaaattagaactaagattccattatctaaggtacatggtctagatgtaaaaaatgtacagttagtagatgctatagataacatagtttgggaaaagaaatcattagtgacggaaaatcgtcttcacaaagaatgcttgttgagactatcgacagaggaacgtcatatatttttggattacaagaaatatggatcctctatccgactagaattagtcaatcttattcaagcaaaaacaaaaaactttacgatagactttaagctaaaatattttctaggatccggtgcccaatctaaaagttctttgttgcacgctattaatcatccaaagtcaaggcctaatacatctctggaaatagaattcacacctagagacaatgaaacagttccatatgatgaactaataaaggaattgacgactctctcgcgtcatatatttatggcttctccagagaatgtaattctttctccgcctattaacgcgcctataaaaacctttatgttgcctaaacaagatatagtaggtttggatctggaaaatctatatgccgtaactaagactgacggcattcctataactatcagagttacatcaaacgggttgtattgttattttacacatcttggttatattattagatatcctgttaagagaataatagattccgaagtagtagtctttggtgaggcagttaaggataagaactggaccgtatatctcattaagctaatagagcccgtgaatgctatcagtgatagactagaagaaagtaagtatgttgaatctaaactagtggatatttgtgatcggatagtattcaagtcaaagaaatacgaaggtccgtttactacaactagtgaagtcgtcgatatgttatctacatatttaccaaagcaaccagaaggtgttattctgttctattcaaagggacctaaatctaacattgattttaaaattaaaaaggaaaatactatagaccaaactgcaaatgtagtatttaggtacatgtccagtgaaccaattatctttggagaatcgtctatctttgtagagtataagaaatttagcaacgataaaggctttcctaaagaatatggttctggtaagattgtgttatataacggcgttaattatctaaataatatctattgtttggaatatattaatacacataatgaagtgggtattaagtccgtggttgtacctattaagtttatagcagaattcttagttaatggagaaatacttaaacctagaattgataaaaccatgaaatatattaactcagaagattattatggaaatcaacataatatcatagtcgaacatttaagagatcaaagcatcaaaataggagatatctttaacgaggataaactatcggatgtgggacatcaatacgccaataatgataaatttagattaaatccagaagttagttattttacgaataaacgaactagaggaccgttgggaattttatcaaactacgtcaagactcttcttatttctatgtattgttccaaaacatttttagacgattccaacaaacgaaaggtattggcgattgattttggaaacggtgctgacctggaaaaatacttttatggagagattgcgttattggtagcgacggatccggatgctgatgctatagctagaggaaatgaaagatacaacaaattaaactctggaattaaaaccaagtactacaaatttgactacattcaggaaactattcgatccgatacatttgtctctagtgtcagagaagtattctattttggaaagtttaatatcatcgactggcagtttgctatccattattcttttcatccgagacattatgctaccgtcatgaataacttatccgaactaactgcttctggaggcaaggtattaatcactaccatggacggagacaaattatcaaaattaacagataaaaagacttttataattcataagaatttacctagtagcgaaaactatatgtctgtagaaaaaatagctgatgatagaatagtggtatataatccatcaacaatgtctactccaatgactgaatacattatcaaaaagaacgatatagtcagagtgtttaacgaatacggatttgttcttgtagataacgttgatttcgctacaattatagaacgaagtaaaaagtttattaatggcgcatctacaatggaagatagaccgtctacaaaaaactttttcgaactaaatagaggagccattaaatgtgaaggtttagatgtcgaagacttacttagttactatgttgtttatgtcttttctaagcggtaaataataatatggtatgggttctgatatccccgttctaaatgcattaaataattccaatagagcgatttttgttcctataggaccttccaactgtggatactctgtattgttaatagatatattaatacttttgtcgggtaacagaggttctacgtcttctaaaaataaaagttttataacatctggcctgttcataaataaaaacttggcgattctatatatactcttattatcaaatctagccattgtcttatagatgtgagctactgtaggtgtaccatttgattttctttctaatactatatatttctctcgaagaagttcttgcacatcatctgggaataaaatactactgttgagtaaatcagttattttttttatatcgatattgatggacatttttatagttaaggataataagtatcccaaagtcgataacgacgataacgaagtatttatacttttaggaaatcacaatgactttatcagattaaaattaacaaaattaaaggagcatgtatttttttctgaatatattgtgactccagatacatatggatctttatgcgtcgaattaaatgggtctagttttcagcacggtggtagatatatagaggtggaggaatttatagatgctggaagacaagttagatggtgttctacatccaatcatatatctaaagatatacccgaagatatgcacactgataaatttgtcatttatgatatatacacttttgacgctttcaagaataaacgattggtattcgtacaggtacctccgtcgttaggagatgatagtcatttgactaatccgttattgtctccgtattatcgtaattcagtagccagacaaatggtcaataatatgatttttaatcaagattcatttttaaaatatttattagaacatctgattagaagccactatagagtttctaaacatataacaatagttagatacaaggataccgaagaattaaatctaacgagaatatgttataatagagataagtttaaggcgtttgtattcgcttggtttaacggcgtttcggaaaatgaaaaggtactagatacgtataaaaaggtatctaatttgatataatgaattcagtgactgtatcacacgcgccatatactattacttatcacgatgattgggaaccagtaatgagtcaattggtagagttttataacgaagtagccagttggctgctacgagacgagacgtcgcctattcctgataagttctttatacagttgaaacaaccgcttagaaataaacgagtatgtgtgtgcggtatagatccgtatccgaaagatggaactggtgtaccgttcgaatcaccaaattttacaaaaaaatcaattaaggagatagcttcatctatatctagattaaccggagtaattgattataaaggttataaccttaatataatagacggggttataccctggaattattacttaagttgtaaattaggagaaacaaaaagtcacgcgatctactgggataagatttccaagttactgctgcagcatataactaaacacgttagtgttctttattgtttgggtaaaacagatttctcgaatatacgggcaaagttagaatccccggtaactaccatagtcggatatcatccagcggctagagaccgccaattcgagaaagatagatcatttgaaattatcaacgttttactggaattagacaacaaggcacctataaattgggctcaagggtttatttattaatgctttagtgaaattttaacttgtgttctaaatggatgcggctattagaggtaatgatgttatctttgttcttaagactataggtgtcccgtcagcgtgcagacaaaatgaagatccaagatttgtagaagcatttaaatgcgacgagttagaaagatatattgagaataatccagaatgtacactattcgaaagtcttagggatgaggaagcatactctatagtcagaattttcatggatgtagatttagacgcgtgtctagacgaaatagattatttaacggctattcaagattttattatcgaggtgtcaaactgtgtagctagattcgcgtttacagaatgcggtgccattcatgaaaatgtaataaaatccatgagatctaatttttcattgactaagtctacaaatagagataaaacaagttttcatattatctttttagacacgtataccactatggatacattgatagctatgaaacgaacactattagaattaagtagatcatctgaaaatccactaacaagatcgatagacactgccgtatataggagaaaaacaactcttcgggttgtaggtactaggaaaaatccaaattgcgacactattcatgtaatgcaaccaccgcatgataatatagaagattacctattcacttacgtggatatgaacaacaatagttattacttttctctacaacaacgattggaggatttagttcctgataagttatgggaaccagggtttatttcattcgaagacgctataaaaagagtttcaaaaatattcattaattctataataaactttaatgatctcgatgaaaataattttacaacggtaccactggtcatagattacgtaacaccttgtgcattatgtaaaaaacgatcgcataaacatccgcatcaactatcgttggaaaatggtgctattagaatttacaaaactggtaatccacatagttgtaaagttaaaattgttccgttggatggtaataaactgtttaatattgcacaaagaattttagacactaactctgttttattaaccgaacgaggagaccatatagtttggattaataattcatggaaatttaacagcgaagaacccttgataacaaaactaattttgtcaataagacatcaactacctaaggaatattcaagcgaattactctgtccaagaaaacgaaagactgtagaagctaacatacgagacatgttagtagattcagtggagaccgatacctatccggataaacttccgtttaaaaatggtgtattggacctggtagacggaatgttttactctggagatgatgctaaaaaatatacgtgtactgtatcaaccggatttaaatttgacgatacaaagttcgtcgaagacagtccagaaatggaagagttaatgaatatcattaacgatatccaaccattaacggatgaaaataagaaaaatagagagctatatgaaaaaacattatctagttgtttatgtggtgctaccaaaggatgtttaacattcttttttggagaaactgcaactggaaagtcgacaaccaaacgtttgttaaagtctgctatcggtgacctgtttgttgagacgggtcaaacaattttaacagatgtattggataaaggacctaatccatttatcgctaacatgcatttgaaaagatctgtattctgtagcgaactacctgattttgcctgtagtggatcaaagaaaattagatctgacaatattaaaaagttgacagaaccttgtgtcattggaagaccgtgtttctccaataaaattaataatagaaaccatgcgacaatcattatcgatactaattacaaacctgtttttgataggatagataacgcattaatgagaagaattgccgtcgtgcgattcagaacacacttttctcaaccttctggtagagaggctgctgaaaataatgacgcgtacgataaagtcaaactattagacgaggggttagatggtaaaatacaaaataatagatatagattcgcatttctatacttgttggtgaaatggtacagaaaatatcatgttcctattatgaaactatatcctacaccggaagagattcctgactttgcattctatctcaaaataggtactctgttagtatctagctctgtaaagcatattccattaatgacggacctctccaaaaagggatatatattgtacgataatgtggttactcttccgttgactactttccaacagaaaatatccaagtattttaattctagactatttggacacgatatagagagcttcatcaatagacataagaaatttgccaatgttagtgatgaatatctgcaatatatattcatagaggatatttcatctccgtaaatatatgctcatatatttatagaagatatcacatatctaaatgaataccggaatcatagatttatttgataatcatgttgatagtataccaactatattacctcatcagttagctactctagattatctagttagaactatcatagatgagaacagaagcgtgttattgttccatattatgggatcaggtaaaacaataatcgctttgttgttcgccttggtagcttccagatttaaaaaggtttacattctagtgccgaacatcaacatcttaaaaattttcaattataatatgggtgtagctatgaacttgtttaatgacgaattcatagctgagaatatctttattcattccacaacaagtttttattctcttaattataacgataacgtcattaattataacggattatctcgctacaataactctatttttatcgttgatgaggcacataatatctttgggaataatactggagaacttatgaccgtgataaaaaataaaaacaagattccttttttactattgtctggatctcccattactaacacacctaatactctgggtcatattatagatttaatgtccgaagagacgatagattttggtgaaattattagtcgtggtaagaaagtaattcagacacttcttaacgaacgcggtgtgaatgtacttaaggatttgcttaaaggaagaatatcatattacgaaatgcctgataaagatctaccaacgataagatatcacggacgtaagtttctagatactagagtagtatattgtcacatgtctaaacttcaagagagagattatatgattactagacgacagctatgttatcatgaaatgtttgataaaaatatgtataacgtgtcaatggcagtattgggacaacttaatctgatgaataatttagatactttatttcaggaacaggataaggaattgtacccaaatctgaaaataaataatggcgtgttatacggagaagaattggtaacgttaaacattagttccaaatttaaatactttattaatcggatacagacactcaacggaaaacattttatatacttttctaattctacatatggcggattggtaattaaatatatcatgctcagtaatggatattctgaatataatggttctcagggaactaatccacatatgataaacggcaaaccaaaaacatttgctatcgttactagtaaaatgaaatcgtctttagaggatctattagatgtgtataattctcctgaaaacgatgatggtagtcaattgatgtttttgttttcatcaaacattatgtccgaatcctatactctaaaagaggtaaggcatatttggtttatgactatcccagatactttttctcaatacaaccaaattcttggacgatctattagaaaattctcttacgccgatatttctgaaccagttaatgtatatcttttagccgccgtatattccgatttcaatgacgaagtgacgtcattaaacgattacacacaggatgaattaattaatgttttaccatttgacatcaaaaagctgttgtatctaaaatttaagacgaaagaaacgaatagaatatactctattcttcaagagatgtctgaaacgtattctcttccaccacatccatcaattgtaaaagttttattgggagaattggtcagacaatttttttataataattctcgtattaagtataacgataccaagttacttaaaatggttacatcagttataaaaaataaagaagacgctaggaattacatagatgatattgtaaacggtcacttctttgtatcgaataaagtatttgataaatctcttttatacaaatacgaaaacgatattattacagtaccgtttagactttcctacgaaccatttgtttggggagttaactttcgtaaagaatataacgtggtatcttctccataaaactgatgagatatataaagaaataaatgtcgagctttgttaccaatggatacctttccgttacattggaaccacacgagctgacgttagacataaaaactaatattaggaatgccgtatataagacgtatctccatagagaaattagtggtaaaatggccaagaaaatagaaattcgtgaagacgtggaattacctctcggcgaaatagttaataattctgtagttataaacgttccgtgtgtaataacctacgcgtattatcacgttggggatatagtcagaggaacattaaacatcgaagatgaatcaaatgtaactattcaatgtggagatttaatctgtaaactaagtagagattcgggtactgtatcatttagcgattcaaagtactgcttttttcgaaatggtaatgcgtatgacaatggcagcgaagtcactgccgttctaatggaggctcaacaaggtatcgaatctagttttgtttttcttgcgaatatcgtcgattcataaaaaagagaatagcggtaagtataaacacgaatactatggcaataattgcgaatgttttattctcttcgatatatttttgataatatgaaaaacatgtctctctcaaatcggacaaccatctcataaaatagttctcgcgcgctggagaggtagttgccgctcgtataatctctccagaataatatacttgcgtgtcgtcgttcaatttatacggatttctatagttctctgttatataatgcggttttccatcatgattagacgacgacaatagtgttctaaatttagatagttgatcagaatgaatgtttattggcgttggaaaaattatccatacagcgtctgcagagtggttgatagttgttcctagatatgtaaaataatccaacttactaggcagcaaattgtctagataaaatactgaatcaaacggtgcagacgtattggcggatctaatggaatccaattgattaactatcttttgaaaatatacatttttatgatccaatacttgtaagaatatagaaataatgataagtccatcatcgtgtttttttgcctcttcataagaactatattttttcttattccaatgaacaagattaatctctccagagtatttgtacacatctatcaagtgattggatccataatcgtcttcctttccccaatatatatgtagtgatgataacacatattcattggggagaaaccctccacttatatatcctcctttaaaattaatccttactagttttccagtgttctggatagtggttggtttcgactcattataatgtatgtctaacggcttcaatcgcgcgttagaaattgcttttttagtttctatattaataggagatagttgttgcggcatagtaaaaatgaaatgataactgtttaaaaatagctcttagtatgggaattacaatggatgaggaagtgatatttgaaactcctagagaattaatatctattaaacgaataaaagatattccaagatcaaaagacacgcatgtgtttgctgcgtgtataacaagtgacggatatccgttaataggagctagaagaacttcattcgcgttccaggcgatattatctcaacaaaattcagattctatctttagagtatccactaaactattacggtttatgtactacaatgaactaagagaaatctttagacggttgagaaaaggttctatcaacaatatcgatcctcactttgaagagttaatattattgggtggtaaactagataaaaaggaatctattaaagattgtttaagaagagaattaaaagaggaaagtgatgaacgtataacagtaaaagaatttggaaatgtaattctaaaacttacaacacgggataaattatttaataaagtatatataagttattgcatggcgtgttttattaatcaatcgttggaggatttatcgcatactagtatttacaatgtagaaattagaaagattaaatcattaaatgattgtattaacgacgataaatacgaatatctgtcttatatttataatatgctagttaatagtaaatgaacttttacagatctagtataattagtcagattattaagtataatagacgactagctaagtctattatttgcgaggatgactctcaaattattacactcacggcattcgttaaccaatgcctatggtgtcataaacgagtatccgtgtccgctattttattaactactgataacaaaatattagtatgtaacagacgagatagttttctctattctgaaataattagaactagaaacatgtttagaaagaaacgattatttctgaattattccaattatttgaacaaacaggaaagaagtatactatcgtcatttttttctctagatccagctactactgataatgatagaatagacgctatttatccgggtggcatacccaaaaggggtgagaatgttccagagtgtttatccagggaaattaaagaagaagttaatatagacaattcttttgtattcatagacactcggttttttattcatggcatcatagaagataccattattaataaattttttgaggtaatcttctttgtcggaagaatatctctaacgagtgatcaaatcattgatacatttaaaagtaatcatgaaatcaaggatctaatatttttagatccgaattcaggtaatggactccaatacgaaattgcaaaatatgctctagatactgcaaaacttaaatgttacggccatagaggatgttattatgaatcattaaaaaaattaactgaggatgattgattaaaaaatataaattaatttaccatcgtgtatttttataacgggattgtccggcatatcatgtagatagttaccgtctacatcgtatactcgaccatctacgcctttaaatcctctatttattgacattaatctattagaattggaataccaaatattagtaccctcaattagtttattggtaatattttttttagacgatagatcgatggctcttgaaaccaaggttttccaaccggactcattgtcgatcggtgagaagtctttttcattagcatgaatccattctaatgatgtatgtttaaacactctaaacaattggacaaattcttttgatttgctttgaatgatttcaaataggtcttcgtctacagtaggcataccattagataatctagccattataaagtgcacgtttacatatctacgttctggaggagtaagaacgtgactattgagacgaatggctcttcctactatctgacgaagagacgcctcgttccatgtcatatctaaaatgaagatatcattaattgagaaaaaactaataccctcgcctccactagaagagaatacgcatgttttaatgcattctccgttagtgtttgattcttggttaaactcagccaccgccttgattctagtatcttttgttctagatgagaactctatattagagataccaaagactttgaaatatagtaataagatttctattcctgactgattaacaaatggttcaaagactagacatttaccatgggatgctaatattcccaaacatacatctataaatttgacgcttttctcttttaattcagtaaatagagagatatcagccgcactagcatcccctttcaatagttctccctttttaaaggtatctaatgcggatttagaaaactctctatctcttaatgaatttttaaaatcattatatagtgttgctatctcttgcgcgtattcgcccggatcacgattttgtctttcaggaaagctatcgaacgtaaacgtagtagccatacgtctcagaattctaaatgatgatatacctgtttttatttcagcgagtttagccttttgataaatttcttcttgctttttcgacatattaacgtatcgcattaatactgttttcttagcgaatgatgcagacccttctacgtcatcaaaaatagaaaactcgttattaactatatacgaacatagtcctcctagtttggagactaattctttttcatcgactagacgtttattctcaaatagtgattggtgttgtaaggatcctggtcgtagtaagttaaccaacatggtgaattcttgcacactattgacgataggtgtagccgataaacaaatcatcttatggttttttaacgcaatggtcttagataaaaaattatatactgaacgagtaggacggatcttaccatcttctttgattaatgatttagaaatgaagttatgacattcatcaatgatgacgcatattctactcttggaattaatagttttgatattagtaaaaaatttatttctaaaattttgatcatcgtaattaataaaaatacaatccttcgttatctctggagcgtatctgagtatagtgttcatccaaggatcttctatcaaagcctttttcaccaataagataatagcccaattcgtataaatatccttaagatgtttgagaatatatacagtagtcattgttttaccgacacccgtttcatggaacaataaaagagaatgcatactgtctaatcctaagaaaactcttgctacaaaatgttgataatccttgaggcgtactacgtccgaccccatcatttcaacgggcatattagtagttctgcgtaaggcataatcgatataggccgcgtgtgatttactcatttatgagtgataagtaataactatgttttaaaaatcacagcagtagtttaactagtcttctctgatgtttgttttcgatactttttgaatcagaagtcatactagaataaagcaacgagtgaacgtaatagagagcttcgtatactctattcgaaaactctaagaacttattaatgaattccgtatccactggattgtttaaaatactaaattgaacactgttcacatccttccaagaagaagacttagtgacggacttaacatgagacataaataaatccaaattttttttacaaacatcactagccaccataatggcgctatctttcaaccagctatcgcttacgcattttagcagtctaacatttttaaagagactacaatatattctcatagtatcgattacacctctaccgaataaagttggaagtttaataatacaatatttttcgtttacaaaatcaaataatggtcgaaacacgtcgaaggttaacatcttataatcgctaatgtatagattgttttcagtgagatgattattagatttaatagcatctcgttcacgtttgaacagtttattgcgtgcgctgaggtcggcaactacggcgtccgctttagtactcctcccataatactttacgctattaatctttaaaatttcatagactttatctagatcgctttctggtaacatgatatcatgtgtaaaaagttttaacatgtcggtcggcattctatttagatcattaactctagaaatctgaagaaagtaattagctccgtattccagactaggtaatgggcttttacctagagacagattaagttctggcaatgtttcataaaatggaagaaggacatgcgttccctcccggatattttttacaatttcatccatttacaactctatagtttgttttcattattattagttattatctcccataatcttggtaatacttaccccttgatcgtaagataccttatacaggtcattacatacaactaccaattgtttttgtacataatagattggatggttgacatccatggtggaataaactactcgaacagatagtttatctttccccctagatacattagccgtaatagttgtcggcctaaagaatatctttggtgtaaagttaaaagttagggttcttgttccattattgctttttgtcagtagttcattataaattctcgagatgggtccgttctctgaatatagaacatcatttccaaatctaacttctagtctagaaataatatcggtcttattcttaaaatctattcccttgatgaagggatcgttaatgaacaaatccttggcctttgattcggctgatctattatctccgttatagacgttacgttgactagtccaaagacttacaggaatagatgtatcgatgatgttgatactatgtgatatgtgagcaaagattgttctcttagtggcatcactatatgttccagtaatggcggaaaactttttagaaatgttatatataaaagaattttttcgtgttccaaacattagcagattagtatgaagataaacactcatattatcaggaacattatcaatttttacatacacatcagcatcttgaatagaaacgataccatcttctggaacctctacgatctcggcagactccggataaccagtcggtgggccatcgctaacaataactagatcatccaacaatctactcacatatgcatctatataatctttttcatcttgtgagtaccctggatacgaaataaatttattatccgtatttccataataaggtttagtataaacagagagagatgttgccgcatgaacttcagttacagtcgccgttggttggtttatttgacctattactctcctaggtttctctataaacgatggtttaatttgtacattcttaaccatatatccaataaagctcaattcaggaacataaacaaattctttgttgaacgtttcaaagtcgaacgaagagtcacgaataacgatatcggatactggattgaaggttaccgttacggtaatttttgaatcggatagtttaagactgctgaatgtatcttccacatcaaacggagttttaatataaacgtatactgtagatggttctttaatagtgtcattaggagttaggccaatagaaatatcattaagttcactagaatatccagagtgtttcaaagcaattgtattattgatacaattattatataattcttcgccctcaatttcccaaataacaccgttacacgaagagatagatacgtgattaatacatttatatccaacatatggtacgtaactgaatcttcccatacctttaacttctggaagttccaaactcagaaccaaatgattaagcgcagtaatatactgatccctaatttcgaagctagcgatagcctgattgtctggaccatcgtttgtcataactccggatagagaaatatattgcggcatatacaaagttggaatttgactatcgactgcgaagacattagaccgtttaatagagtcatccccaccgatcaaagaattaatgatagtattattcattttctatttaaaatggaaaaagcttacaataaactccgtagagaaatatctataatttgtgagttttccttaaagtaacagcttccgtaaacgccgtctttatctcttagtaggtttattgtatttatgaccttttccttatcttcatagaatactaaaggcaacaaagaaatttttggttcttctctaagagctacgtgagacttaaccatagacgccaacgaatccctacatattttagaacagaaatacccaacttcaccacccttgaatgtctcaatactaataggtttaaaaaccaaatcttgattacaaaaccaacacttatcaattacactatttgtcttaatagacacatctgccatagatttataatactttggtagtatacaagcgagtgcttcttctttagcgggcttaaagactgctttaggtgctgaaataaccacatctggaaggcttactcgcttagccatttaattacggaactatttttttatacttctaatgagcaagtagaaaacctctcatctacaaaaacgtactcgtgtccataatcctctaccatagttacacgttttttagatctcatatgtgctaaaaagttttcccatactaattggttactattatttttcgtataatttttaacagtttgaggttttagatttttagttacagaagtgatatcgaatattttatccaaaaagaatgaataattaattgtcttagaaggagtgttttcttggcaaaagaataccaagtgcttaaatatttctactacttcattaatcttttctgtactcagattcagtttctcatcttttacttgattgattatttcaaagactaacttataatcctttttatttattctctcgttagccttaagaaaactagatacaaaatttgcatctacatcatccgtggatatttgatttttttccatgatatccaagagttccgagataatttctccagaacattgatgagacaataatctccgcaatacatttctcaaatgaataagtttattagacacatggaagtttgactttttttgtacctttgtacatttttgaaataccgactcgcaaaaaatacaatattcatatccttgttcagatactataccgttatgtctacaaccgctacataatcgtagattcatgttaacactctacgtatctcgtcgtccaatattttatataaaaacattttatttctagacgttgccagaaaatcctgtaatatttttagttttttgggctgtgaataaagtatcgccctaatattgttaccgtcttccgccaatatagtagttaaattatccgcacatgcagaagaacaccgcttaggcggattcagtacaatgttatatttttcgtaccaactcatttaaatatcataatctaaaatagttctgtaatatgtctagcgctaatatattgatcataatcctgtgcataaattaagatacaacaatgtctcgaaatcatcgacatggcttcttccatagttagaagatcgtcgtcaaagttagcaacgtgattcatcaacatttgctgttttgaggcagcaaatactgaaccgtcgccattcaaccattcataaaaaccatcgtctgaatccattgataatttcttgtactggtttttgagagctcgcatcaatctagcatttctagctcccggattgaaaacagaaagaggatcgtacatccagggtccattttctgtaaatagaatcgtataatgtcccttcaagaagatatcagacgatccacaatcaaagaattggtctccgagtttgtaacaaactgcggactttaacctatacatgataccgtttagcataatttctggtgatacgtcaatcggagtatcatctattagagatctaaagccggtgtaacattctccaccaaacatattcttattctgacgtcgttctacataaaacatcattgctccattaacgataacaggggaatgaacagcactacccatcacattagttcccaatggatcaatgtgtgtaactccagaacatcttccatagcctatgttaggaggagcgaacaccactcttccactattgccatcgaatgccatagaataaatatccttggaattgatagaaatcggactgtcggatgttgtgatcatcttcataggattaacaactatgtatggtgccgcctgaagtttcatatcgtaactgatgccgtttataggtctagccacagaaaccaacgtaggtctaaatccaactatagacaaaatagaagccaatatctgttcctcatctgtcataacttgagagcatccagtatgaataatcttcattagatggggatctaccgcatcatcatcgttacaataaaaaattcccattctaatgttcataattgcttttctaatcatggtatgcatgtttgctctctgaatctctgtggaaattagatctgatacacctgtaatcactatcggattatcctccgtaagacgattaaccaacaacatataattataagactttacttttctaaattcataaagttgctggattaggctataggtgtctccatgtacatacgcgttctcgagcgcaggaagtttaataccgaatagtgccatcagaataggatgaatatagtaattagtttctggttttctataaataaaagacaaatcttgtgaactagacatatcggtaaaatgcatggattggaatcgtgtagtcgacagaagaatatgatgattagatggagagtatattttatctaactctttgagttggtcaccgattctaggactagctcgagaatgaataagtactaaaggatgagtacatttcacagaaacactagcattgttcaatgtgctctttacatgggtaaggagttgaaatagctcgtttctatttgttctgacaatatttagtttattcataatgttaagcatatcctgaatagtaaagttagatgtgtcatacttgttagtagttagatatttagcaattgcattcccatcatttctcaatctcgtactccaatcatgtgtagatgctacttcatctatagaaaccatacaatcctttttgataggctgttgagattgattatttcctgcacgtttaggtttggtacgttgatttctagcccctgcggatataaagtcatcgtctacaatttgggacaatgaattgcatacactacaagacaaagatttatcagaagtgtgaatatgatcttcatctaccaaagaaagagtttgattagtataactagattttagtcctgcgttagatgttaaaaaaacatcgctattgaccacggcttccattatttatattcgtagtttttactcgaaagcgtgattttaatatccaatcttattacttttggaatcgttcaaaacctttgactaattgtagaatttgatctattgccctacgcgtatactcccttgcatcatatacgttcgtcaccagatcgtttgtttcggcctgaagttggtgcatatctttttcaacactcgacatgagatccttaagggccatatcgtctagattttgttgagatgctgctcctggatttggattttgttgtgctgttgtacatactgtaccaccagtaggtgtaggagtacatacagtggccacaataggaggttgaggaggtgtaaccgttggagtagtacaagaaatacttccatccgattgttgtgtacatgtagttgttggtaacgtctgagaaggttgggtagatggcggtgtcgtcgtcttttgatctttattaaatttagagataatatcctgaacagcattgctcggcgtcaacgctggaaggagtgaactcgccggcgcatcagtatcttcagacagccaatcaaaaagattagacatatcagatgatgtattagtttgttgtcgtggttttggtgtaggagcagtactactaggtagaagaataggagccgatgtagctgttggaaccggctgtggagttatatgaatagttggttgtagcggttggataggctgtctgctggcggccatcatattatctctagctagttgttctcgcaactgtctttgataatacgactcttgagactttagtcctatttcaatcgcttcatcctttttcgtatccggatccttttcttcagaataatagattgacgactttggtgtagaggattctgccagcctctgtgagaacttgttaaagaagtccatttaaggctttaaaattgaattgcgattataagattaaatggcagacacagacgatattatcgactatgaatccgatgatctcaccgaatacgaggatgatgaagaagaggaagaagatggagagtcactagaaactagtgatatagatcccaaatcttcttataagattgtagaatcagcatccactcatatagaagatgcgcattccaatcttaaacatatagggaatcatatatctgctcttaaacgacgctatactagacgtataagtctatttgaaatagcgggtataatagcagaaagctataacttgcttcaacgaggaagattacctctagtttcagaattttctgacgaaacgatgaagcaaaatatgctacatgtaattatacaagagatagaggagggttcttgtcctatagtcatcgaaaagaacggagaattgttgtcggtaaacgattttgacaaagatggtctaaaattccatctagactatattatcaaaatttggaaacttcaaaaacgatattagaatttatacgaatatcgttctctaaatgtcacaatcaagtctcgcatgttcagcaatttattgtcgtactttatatcgtgttcattaacgatatcttgcaaaatagtaatgattctatcttccttcgatagatattcttcagagattattgtcttatattctttcttgttatcagatatgaatttgataagactttgaacattattgatacccgtctgtttaattttttctacagatattttagttttggcagattctatcgtatctgtcaatagacatccaacatcgacattcgacgtcaattgtctataaatcaacgtataaattttagaaataacattagcgaattgttgtgcattgatgtcgttattctgaaacagtatgattttaggtagcattttcttaacaaagagaacgtatttattgttactcagttgaacagatgatatatccagattactaacgcatctgattccgtataccaaactttcagaagaaatggtgtacaattgtttgtattcattcaatgtctctttttcagaaattagtttagagtcgaatactgcaataattttcaagagatagttttcatcagataagattttatttagtgtagatatgataaaactattgttttgttggagaacttgatacgccgcgttctctgtagtcgacgctctcaaatgggaaacaatctccattatttttttggaatcggatactatatcttcggtatcttgacgcagtctagtatacatagagttaagagagattagagtttgtacattaagcaacatgtctctaaatgtggctacaaacttttcctttttcacatcatctagtttattatataccgatttcacaacggcaccagatttaaggaaccagaatgaaaaactctgataactacaatatttcatcatagttacgattttatcatcttctatagttggtgtaatagcgcatacctttttctccaagactggaaccaacgtcataaaaatgtttaaatcaaaatccatatcaacatctgatgcgctaagaccagtctcgcgttcaagattatctttactaatggtgacgaactcatcgtatagaactctaagtttgtccattatttatttacagatttagttgtttaatttatttgtgctcttccagagttgggatagtatttttctaacgtcggtattatattattaggatctacgttcatatgtatcataatattaatcatccacgttttgataaatctatctttagcttctgaaataacgtatttaaacaaaggagaaaaatatttagctacggcatcagacgcaataacattttttgtaaatgtaacgtatttagacgacagatcttcgttaaaaagttttccatctatgtagaatccatcggttgttaacaccattcccgcgtcagattgaataggagtttgaatagtttgttttggaaatagatccttcaataacttatagttgggtgggaaaaaatcgattttatcactagactctttcttttttactatcattacctcatgaactatttcttgaatgagtatatgtattttctttcctatatcggacgcgttcattggaaaatataccatgtcgttaactataagaatatttttatcctcgtttacaaactgaataatatcagatgtagttcgtaaacgaactatatcatcaccagcacaacatctaactatatgatatccactagtttcctttagccgtttattatcttgttccatattagcagtcattccatcatttaagaaggcgtcaaaaataatagggagaaatgacattttggattctgttacaactttaccaaaattaaggatatacggacttactatctttttctcaacgtcgatttgatgaacacacgatgaaaatgtgcttctatgagattgatcatgtagaaaacaacaagggatacaatattttcgcatatcatgaaatatattaagaaatcccaccttattatatttccccaaaggatccatgcacgtaaacattatgccgttatcattaataaagacttctttctcatcggatctgtaaaagttgttactgatttttttcattccaggatctagataattaataatgatgggttttctattcttattctttgtattttggcatatcctagaccagtaaacagtttccactttggtaaaatcagcagacttttgaacgctattaaacatggcattaatggcaataactaaaaatgtaaaatatttttctatgttaggaatatggtttttcactttaatagatatatggtttttggccaaaatgatagatatttttttatccgaggatagtaaaatattattagtcgccgtctctataaaaatgaagctagtctcgatatccaattttattctagaattgataggagtcgccaaatgtaccttatacgttatatctcccttgatgcgttccatttgtgtatctatatcggacacaagatctgtaaatagttttacgttattaatcatcacggtatcgccgtcgctagataacgctaatgtaccatccaagtcccaaatggagagatttaactgttcatcgtttagaataaaatgattaccggtcatattaataaagtgttcatcgtatctagataacaacgacttataattaatgtccaagtcttgaactcgctgaatgatcttttttaacccagttagttttagattggtacgaaatatattgttaaactttgattctacagtaatgtccaaatctagttgtggaaatacttccatcaacattgtttcaaacttgataatattattatctacatcttcgtacgatccaaattccggaatagatgtatcgcacgctcttgccacccagataaccaaaaagtcacacgctccaggatatacattgtataaaaagctatcgttttttagtagtgtttttttctgcgtgtatacgaagggattaaaaatagtattatcaacgtaactatattccaaattattcttatgagaatagataataatatcgtccttaatatctaacaaatttcctaaatatccctttaattgagtcattcgaagcgtcaatagaatatgtctcttaactatttccggctgttgtatatttaaatgacttcgtaaaaaataatatatgggcgacttctcatctatgtaatcatatggagtgagatatagggctcgttctacctcctgccccttacccacctgtaataccaattgcggacttactatatatcgcatatttatatcgtggggtaaagtgaaaatctactaccgatgatgtaagtcttacaatgttcgaaccagtaccagatcttaatttggaggcctccgtagaactaggggaggtaaatatagatcaaacaacacctatgataaaggaaaatagcggttttatatcccgcagtagacgtctattcgcccatagatctaaggatgatgagagaaaactagcactacgattctttttacaaagactttattttttagatcatagagagattcattatttgttcagatgcgttgacgctgtaaaagacgtcactattaccaaaaaaaataacattatcgtggcgccttatatagcacttttaactatcgcatcaaaaggatgcaaacttacagaaacaatgattgaagcattctttccagaactatataatgaacatagtaagaaatttaaattcaactctcaagtatccatcatccaagaaaaactcggataccagtttggaaactatcacgtttatgattttgaaccgtattactctacagtagctctggctattcgagatgaacattcatctggcatttttaatatccgtcaagagagttatctggtaagttcattatctgaaataacatatagattttatctaattaatctaaaatctgatcttgttcaatggagtgctagtacgggcgctgtaattaatcaaatggtaaatactgtattgattacagtgtatgaaaagttacaactggtcatagaaaatgattcacaatttacatgttcattggctgtggaatcaaaacttccaataaaattacttaaagatagaaatgaattatttacaaaattcattaacgagttaaaaaagaccagttcattcaagataagcaaacgcgataaggatacgctattaaaatattttacttaggactggagttagaatttatagacgactcatttcgtttatcattgttactattattactattactatcattattagtgttggcattattagtattcttcttgtcatcttgttcagaaatatacagcaatgctatacctaatactaaatacattatcatgctcgcaatggctctaacaacaacgaaccaaaatgaatttggtcgtagcttttgttcacaaaaatacataaagaaatgtctacataaatctatggcgccattggctacttgaaatagcgccagtcctcctacagattttaatatagctgtataacatgacatttattcatcatcaaaagagacagagtcaccatctgtcatatttagattttttttcatgtgttcaaagtatcctctactcatttcattataatagtttatcatacttagaattttaggacggatcaatgagtaagacttgactagatcgtcagtagtaatttgtgcatcgtctattctgcatccgcttcgtcgaataatgtatagcatcgctttgagattctccatagctatcaagtctttatacaatgacatggaaatatctgtgaatactttatacttctccaacatcgatgccttaacatcatcgcctactttagcattgaaaatacgttctattgtgtagatggatgtagcaagatttttaaacaacaatgccatcttacacgatgattgcctcaagtctccaatcgtttgtttagaacgattagctacagagtccaatgcttggctgactagcatattattatctttagaaattgtattcttcaatgaggcgtttatcatatctgtgatttcgttagtcatattacagtctgactgggttgtaatgttatccaacatatcacctatggatacggtacacgtaccagcatttgtaataatcctatctaagatgttgtatggcattgcgcagaaaatatcttctcctgtaatatctccactctcgataaatctactcagattattcttaaatgccttattctctggagaaaagatatcagtgtccatcatttcattaatagtatacgcagaaaagataccacgagtatcaattctatccaagatacttatcggttccgagtcacagataatggtttcctctccttcgggagatcctgcatagaaatatctaggacaatagtttctatactgtctgtaactctgataatctctaaagtcactaactgataccatgaaattgagaagatcaaacgctgaagtaattaatttttctgcctcgtttttactacaactagttttcatcaatgtagtgacgatgtattgtttagttacttttggtctaatactgatgatagagatattattgcttcccataatggatcttctagtagtcaccttaaagcccattgatgcgaatagcagatagataaagtcttggtatgactcctttctaatatagtacggactacctttgtcacccaactttatacccacataagccataacaacctctttaatagccgtttcatgaggtttatcagccatgagcctgagtagttggaagaatctcatgaatcccgtctcagaaagtcctatatgcatgatagatttatctttcctgggaaactctcgtatagtcatagatgaaatactctttaaagtttctgaaataagattagtaacagtcttacctccgactactctaggtaacaaacaaactctaataggtgttttctctgcggagataatatcagaaaggatagagcaataagtagtattattgtgattataaagaccgaatacataacaggtagaatttataaacatcatgtcctgaaggtttttagacttgtattcctcgtaatccataccgtcccaaaacatggatttggtaactttgatagccgtagatctttgttccttcgccaacaggttaaagaaattaataaagaatttgttgtttctatttatgtccacaaattgcacgtttggaagcgccacggttacattcactgcagcattttgaggatcgcgagtatgaagtacgatgttattgtttactggtatatctggaaagaaatctaccagtctaggaataagagattgatatcgcatagaaatagtaaagtttataatctcatcatcgaagagcattttgttaccattgtaataaatatccactctgtcatatgtataaatgaagtactgttcaaacatgatgagatgtttatatgttggcatagtagtgagatcgacgtttggtaatggcaatgtattaagattaactccataatgtctagcagcatctgcgatgttataagcgtcgtcaaagcggggtcgatcttgtattgttatatattgtctaacacctataagattatcaaaatcttgtctgcttaatacaccgttaacaatttttgccttgaattcttttattggtgcattaataacatccttatagaggatgttaaacaaataagtgttatcaaagttaagatctggatatttcttttctgctagaacatccattgagtcggagccatctggtttaatataaccaccgataaatctagctctgtattctgtatccgtcaatctaatattaagaaggtgttgagtgaaaggtggaagatcgtaaaagctgtgagtattaatgataggattagtttccgaactaatgttaattggggtattaataatatctatatttccagcgttaagtgtaacattaaacagttttaattcacgtgacgtggtatcaattaaataattaatgcccaatttggatatagcagcctgaagctcatcttgtttagttacggatcctaatgagttattaagcaatatatcgaacggatgaacgaaggttgttttaagttggtcacatactttgtaatctagacatagatgcggaagaacggtagaaactatacgaaataaatattcagagtcctctaattgatcaagagtaactattgacttaataggcatcatttatttagtattaaatgacgaccgtaccagtgacggatatacaaaacgatttaattacagagttttcagaagataattatccatctaacaaaaattatgaaataactcttcgtcaaatgtctattctaactcacgttaacaacgtggtagatagagaacataatgccgccgtagtgtcatctccagaggaaatatcctcacaacttaatgaagatctatttccagatgatgattcaccggccactattatcgaacgagtacaacctcatactactattattgacgatactccacctcctacgtttcgtagagagttattgatatcggaacaacgtcaacaacgagaaaaaagatttaatattacagtatcgaaaaatgctgaagcaataatggaatctagatctatgataacttctatgccaacacaaacaccatccttgggagtagtttatgataaagataaaagaattcagatgttagaggatgaagtggttaatcttagaaatcaacgatctaatacaaaatcatctgataatttagataattttaccaaaatactatttggtaagactccgtataaatcaacagaagttaataagcgtatagccatcgttaattatgcaaatttgaacgggtctcccttatcagtcgaggacttggatgtttgttcggaggatgaaatagatagaatctataaaacgattaaacaatatcacgaaagtagaaaacgaaaaattatcgtcactaacgtgattattattgtcataaacattatcgagcaggcattgctaaaactcggatttgaagaaatcaaaggactgagtaccgatatcacttcagaaattatcgatgtggagatcggagatgactgcgatgctgtagcatcaaaactaggaatcggtaacagtccggttcttaatattgtattgtttatactcaagatattcgttaaacgaattaaaattatttaatttaatacattcccatatccagacaacaatcgtctggattaatctgttcctgtcgtctcataccggacgacatattaatctttttattagtgggcatctttttagatggtttctttttcccagcattaactgattcgatacctagaagatcgtgattgatctctccgaccattccacgaacttctaattggccgtctctgacggtaccataaactattttaccagcattagtaacagcttggacaatctgaccatccatcgcattgtacgatgtagtagtaactgttgttctacgtctaggagcaccagaagtatttttggagcccttggaggctgatgtagaagaagacgaggattttgattttggtttacatgtaatacattttgaactctttgattttgtatcacatgcgccggcagtcacatctgtttgagaattaagattattgttgcctcctttgacggctgcatctccaccgatttgcgctagtagatttttaagctgtggtgtaatcttattaactgtttcgatataatcatcgtaactgcttctaacggctaaattttttttatccgccatttagaagctaaaaatatttttatttatgcagaagatttaactagattatacaatgaactaatatgatccttttccagattatttacaaacttggtattttttggttctggaggaggcgaatttaaattcggacttggattcggattttgtaagttcttgatcttattatacatcgagtataggatggcgacagtaactgctacacaaataccgatcaaaagaagaataccaatcatttattgacaataacttcactattgatcaagtatgcaatatatcatcttttcactaaataagtagtaataatgattcaacaatgtcgagatatatggacgataataatttagttcatggaaatatcgctatgattggtgtgaatgactccgctaactctgtggggtgcgcagtgctttccccacatagaataaattagcattccgactgtgataataataccaagtataaacgccataatactcaatactttccatgtacgagtgggactggtagacttactaaagtcaataaaggcgaagatacacgaaagaatcaaaagaatgattccagcgattagcacgccggaaaaataatttccaatcataagcatcatgtccatttaactaataaaaattttaaatcgccgaatgaacaaagtggaatataaaccatataaaaacaatagtttgtactgcaaaaataatatctatttttgttttcgaagatatggtaaaattaaatagtagtacacagcatgttataactaacagcagcaacggctcgtaattacttatcatttactagacgaaaaggtggtgggatattttcttgctcaaataatacgaatatatcacccatccattttatgcgatgtttatatactctaatctttaatagatctatagacgacgggtttaccaacaatatagattttatcgattcatctaatttaaacccttccttaaacgtgaatgatctattatctggcataacgatgaccctacctgatgaatcggacaatgtactgggccatgtagaataaattatcaacgaattatcgtctacgaacatttatatcatttgttttaattttaggacgcgaataaatggatataaaatagaaaataacagatattacaaccagtgttatggccgcgcccaaccaggtaggcagttttattttatcttttactacaggttctcctggatgtacgtcaccaacggcggacgtagttctagtacaattagacgtaagttccgcttgggaattttttaacgctaaagagttaacgttaatcgtgcacccaacgtatttacatctagttcgttgaacatcttgattataatataaccattttctatctctagattcgtcagtgcactcatgtaaccaacataccctaggtcctaaatatttatctccggaattagattttggataattcgcgcaccaacaatttctatttcctttatgatcgttacaaaagacgtataatgccgtatccccaaaagtaaaataatcaggacgaataattctaataaactcagaacaatatctcgcatccatatgtttggagcaaatatcggaataagtagacatagccggtttccgttttgcacgtaaccattctaaacaattggggtttccaggatcgtttctacaaaatccagtcatgaaatcgtcacaatgttctgtcttgtaattattattaaatatttttggacagtgtttggtatttgtcttagaacaacattttgccacgctatcactatcgcccaggagataatccttttttataaaatgacatcgttgcccggatgctatataatcagtagcgtgttttaaatccttaatatattcaggagttacctcgttctgataatagattaatgatccaggacgaaatttgaaagaactacatggttctccatgaattaatacatattgtttagcaaattcaggaactataaaactactacaatgatctatcgacataccatctatcaaacaaaacttgggtttaatttctcccggagatgtttcataatagtacgtataactttcttctgcaaacttaacagctctattatattcaggataattaaaacctaattccatatatttgtctcgtatatctgctattcctggtgctattttgattctattaagagtaacagctgcccccattcttaataatcgtcagtatttaaactgttaaatgttggtatatcaacatctaccttatttcccgcagtataaggtttgttgcaggtatactgttcaggaatggttacatttatacttcttctatagtcctgtctttcgatgttcatcacatatgcaaagaacagaataaacaaaataatgtaagaaataatattaaatatctgtgaattcgtaaatacattgattgccataataattacagcagctacaatacacacaatagacattcccacagtgttgccattacctccacgatacatttgagttactaagcaataggtaataactaagctagtaagaggcaatagaaaagatgagataaatatcatcaatatagagattagaggagggctatatagagccaagacgaacaaaatcaaaccgagtaacgttctaacatcattatttttgaagattcccaaataatcattcattcctccataatcgttttgcatcatacctccatctttaggcataaacgattgctgctgttcctctgtaaataaatctttatcaagcactccagcacccgcagagaagtcgtcaagcatattgtaatatcttaaataactcatttatatattaaaaaatgtcactattaaagatggagtataatctttatgccgaactaaaaaaaatgacttgtggtcaacccctaagtctttttaacgaagacggggatttcgtagaagttgaaccgggatcatcctttaagtttctgatacctaagggattttacgcctctccttccgtaaagacgagtctagtattcgagacattaacaacgaccgataataaaatcactagtatcaatccaacaaatgcgccaaagttatatcctcttcaacgcaaagtcgtatctgaagtagtttctaatatgaggaaaatgatcgaatcaaaacgtcctctatacattactcttcacttggcgtgtggatttggtaagactattaccacgtgttatcttatggctacacacggtagaaaaaccgtcatttgcgtacccaataaaatgttaatacatcaatggaagacacaggtagaggcagtcggattggaacataagatatccatagatggagtaagtagtctattaaaggaactaaagactcaaagtccggatgtattaatagtagtcagtagacatctgacaaacgatgccttttgtaaatatatcaataagcattatgatttgttcatcttggatgaatcacatacgtataatctgatgaacaatacagcagttacaagatttttagcgtattatcctccgatgatgtgttattttttaactgctacacctagaccatctaaccgaatttattgtaacagtattattaatattgccaagttatccaatctaaaaaaaactatctatgcagtagatagtttttttgagccatattccacagataatattagacatatggtaaaacgactagatggaccatctaataaatatcatatatataccgagaagttattatctgtagacgagcctagaaatcaacttattcttgataccctggtagaagaattcaagtcaggaactattaatcgcattttagttattactaaactacgtgaacatatggtattattctacaaacgattattagattttttcggaccagaggttgtatttataggagacgcccaaaatagacgtactccagatatggtcaaatcaatcaaggaactaaatagatttatattcgtatccaccttattttattccggtactggtttagatattcctagtttggattcgttgttcatttgctcggcagtaatcaacaatatgcaaatagagcaattactagggagggtatgtcgagaaacagaactattagataggacggtatatgtatttcctaacacatccatcaaagaaataaagtacatgataggaaatttcatgcaacgaattattagtctgtctgtagataaactaggatttaaacaaaaaagttatcggaaacatcaagaatccgatcccacttctgcatgtacaacatcatccagagaagaacgtgtattaaatagaatatttaactcgcaaaatcgttaagaagtttaagcgacgatccgcatgctgcgcaggccagtgtattacccctcatagtattaatataatccaatgatacttttgtgatgtcggaaatcttaaccaatttagactgacaggcagaacacgtcatgcaatcatcatcgtcatcgataactgtagtcttgggcttctttttgcgactcttcattccggaacgcacattggtgctatccatttaggtagtaaaaaataagtcagaatatgccctataacacgatcgtgcaaaacctggtatatcgtctctatctttatcacaatatagtgtatcgacatttttattattattgacctcgtttatcttggaacatggaatgggaacatttttgttatcaacggccatctttgccttaattccagatgttgtaaaattataactaaacagtctatcatcgacacaaatgaaattcttgtttagacgtttgtagtttacgtatgcggctcgttcgcgtctcattttttcagatattgcaggtactataatattaaaaataagaatgaaataacataggattaaaaataaagttatcatgacttctagcgctgatttaactaacttaaaagaattacttagtctgtacaaaagtttgagattttcagattctgcggctatagaaaagtataattctttggtagaatggggaacatctacttactggaaaataggcgtgcaaaaggtagctaatgtcgagacgtcaatatctgattattatgatgaggtaaaaaataaaccgtttaatattgatccgggctattacattttcttaccggtatattttgggagcgtctttatttattcgaagggtaaaaatatggtagaacttggatctggaaactcttttcaaataccagatgatatgcgaagtgcgtgtaacaaagtattagacagcgataacggaatagactttctgagatttgttttgttaaacaatagatggataatggaagatgctatatcaaaatatcagtctccagttaatatatttaaactagctagtgagtacggattaaacatacccaaatatttagaaattgaaatagaggaagacacattatttgacgacgagttatactctattatagaacgctctttcgatgataaatttccaaaaatatccatatcgtatattaagttgggagaacttagacggcaagttgtagactttttcaaattctcattcatgtatattgagtccatcaaggtagatcgtataggagataatatttttattcctagcgttataacaaaatcaggaaaaaagatattagtaaaagatgtagaccatttaatacgatccaaggttagagaacatacatttgtaaaagtaaaaaagaaaaacacattttccattttatacgactatgatggaaacggaacagaaactagaggagaagtaataaaacgaattatagacactataggacgagactattatgttaacggaaagtatttctctaaggttggtagtgcaggcttaaagcaattgactaataaattagatattaatgagtgcgcaactgtcgatgagttagttgatgagattaataaatccggaactgtaaaacgaaaaataaaaaaccaatcagcatttgatttaagcagagaatgtttgggatatccagaagcggattttataacgttagttaataacatgcggttcaaaatagaaaattgtaaggttgtaaatttcaatattgaaaatactaattgtttaaataacccgagtattgaaactatatatggaaactttaaccagttcgtctcaatctttaatgtcgtcaccgatgtcaaaaaaagattattcgagtgaaataatatgcgcctttgatataggtgcaaaaaatcctgccagaactgttttagaagtcaaggataactccgttagggtattggatatatcaaaattagactggagttctgattgggaaaggcgcatagctaaagatttgtcacaatatgaatacactacagttcttctagaacgtcagcctagaaggtcgccgtatgttaaatttatctattttattaaaggctttttatatcatacatcggctgccaaagttatttgcgtctcgcctgtcatgtctggtaattcatatagagatcgaaaaaagagatcggtcgaagcatttcttgattggatggacacattcggattgcgagactccgttccggatagacgcaaattagacgatgtagcggatagtttcaatttggctatgagatacgtattagataaatggaatactaattatacaccttataataggtgtaaatctagaaattacataaaaaaaatgtaataacgttagtaacgccattatggataatctatttacctttctacatgaaatagaagatagatatgccagaactatttttaactttcatctaataagttgcgatgaaataggagatatatatggtcttatgaaagaacgcatttcctcagaggatatgtttgataatatagtgtataataaagatatacatcctgccattaagaaactagtgtattgcgacatccaacttactaaacacattattaatcagaatacgtatccggtatttaacgattcttcacaagtgaaatgttgtcattatttcgacataaactcagataatagcaatattagctctcgtacagtagagatatttgagagggaaaagtcatctcttgtatcatatattaaaactaccaataagaagagaaaggtcaattacggcgaaataaagaaaactgttcatggaggcactaatgcaaattacttttccggtaaaaagtctgacgagtatctgagtactacagttagatccaacattaatcaaccttggatcaaaaccatctctaagaggatgagagttgatatcattaatcactctatagtaacgcgtggaaaaagctctatattacaaactatagaaattatttttactaatagaacatgtgtgaaaatattcaaggattctactatgcacattattctatccaaggacaaggatgaaaaggggtgtatacacatgattgacaaattattctatgtctattataatttatttctgttgttcgaagatatcatccaaaacgagtactttaaagaagtagctaatgttgtaaaccacgtactcacggctacggcattagatgagaaattattcctaattaagaaaatggctgaacacgatgtttatggagttagcaatttcaaaatagggatgtttaacctgacatttattaagtcgttggatcataccgttttcccctctctgttagatgaggatagcaaaataaagttttttaaggggaaaaagctcaatattgtagcattacgatctctggaggattgtataaattacgtgactaaatccgagaatatgatagaaatgatgaaggaaagatcgactattttaaatagcatagatatagaaacggaatcggtagatcgtctaaaagaattgcttctaaaatgaaaaaaaacactaattcagaaatggatcaacgactagggtataagtttttggtgcctgatcctaaagccggagttttttatagaccgttacatttccaatatgtatcgtattctaattttatattgcatcgattgcatgaaatcttgaccgtcaagcggccaatcttatcgtttaagaataatacagaacgaattatgatagaaattagcaatgttaaagtgactcctccagattactcacctataatcgcgagtattaaaggtaagagttatgacgcattagccacgttcactgtaaatatctttaaagaggtaatgaccaaagagggtatatccatcactaaaataagtagttatgagggaaaagattctcatttgataaaaattccgctactaataggatacgggaataaaaatccacttgatacagccaagtatcttgttcctaatgtcataggtggagtctttatcaataaacaatctgtcgaaaaagtaggaattaatctagtagaaaagattacaacatggccaaaatttagggttgttaagccaaactcattcactttctcgttttcctccgtatcccctcctaatgtattaccgacaagatatcgccattacaagatatctctggatatatcacaattggaagcgttgaatatatcatcgacaaagacatttataacggtcaatattgttttgctgtctcaatatttatctagagtgagtctagaattcattagacgtagtttatcatacgatatgcctccagaagttgtctatctagtaaacgcgataatagatagtgctaaacgaattactgaatctattactgactttaatattgatacatacattaatgacctggtggaagctgaacacattaaacaaaaatctcagttaacgattaacgagttcaaatatgaaatgctgcataactttttacctcatatgaactatacacccgatcaactaaagggattttatatgatatctttactaagaaagtttctctactgtatcttccacacttctagatatccagatagagattcgatggtttgtcatcgcatcctaacgtacggcaaatattttgagacgttggcacatgatgaattagagaattacataggcaacatccgaaacgatatcatgaacaatcacaagaacagaggcacttacgcggtaaacattcatgtactaacaactcccggacttaatcacgcgttttctagcttattgagtggaaagttcaaaaagtcagacggtagttatcgaacacatcctcactattcatggatgcagaatatttctattcctaggagtgttggattttatccggatcaagtaaagatttcaaagatgttttctgtcagaaaataccatccaagtcaatatctttacttttgttcatcagacgttccggaaagaggtcctcaggtaggtttagtatctcaattgtctgtcttgagttccattacaaatatactaacgtctgagtatttggatttggaaaagaaaatttgtgagtatatcagatcatattataaagatgatataagttactttgaaacaggatttccaatcactatagaaaatgctctagtcgcatctcttaatccaaatatgatatgtgattttgtaactgactttagacgtagaaaacggatgggattcttcggtaacttggaggtaggtattactttagttagggatcacatgaatgaaattcgcattaatattggagcgggaagattagtcagaccattcttggttgtggataacggagagctcatgatggatgtgtgtccggagttagaaagcagattagacgacatgacattctctgacattcagaaagagtttccgcatgtcatcgaaatggtagatatagaacaatttacttttagtaacgtatgtgaatcggttcaaaaatttagaatgatgtcaaaggatgaaagaaagcaatacgatttatgtgactttcctgccgaatttagagatggatatgtagcatcttcactagtgggaatcaatcacaattctggacccagagctattcttggatgtgctcaagctaaacaagctatctcttgtctgagttcggatatacgaaataaaatagacaatggaattcatttgatgtatccagagaggccaatcgtgattagtaaggctttagaaacttcaaagattgcggctaattgcttcggccaacatgttactatagcattaatgtcgtacaaaggtatcaatcaagaggatggaattatcatcaaaaaacaatttattcagagaggcggtctcgatattgttacagccaagaaacatcaagtagaaattccattggaaaactttaataacaaagaaagagataggtctaacgcctattcaaaattagaaagtaatggattagttagactgaatgctttcttggaatccggagacgctatggcacgaaatatctcatcaagaactcttgaagatgattttgctagagataatcagattagcttcgatgtttccgagaaatataccgatatgtacaaatctcgcgttgaacgagtacaagtagaacttactgacaaagttaaggtacgagtattaaccatgaaagaaagaagacccattctaggagacaaatttaccactagaacgagtcaaaagggaacagtcgcgtatgtcgcggatgaaacggaacttccatacgacgaaaatggtatcacaccagatgtcattattaattctacatccatcttctctagaaaaactatatctatgttgatagaagttattttaacagccgcatattctgctaagccgtacaacaataagggagaaaaccgacctgtctgttttcctagtagtaacgaaacatccatcgatacatatatgcaattcgctaaacaatgttatgagcattcaaatccgaaattgtccgatgaagaattatcggataaaatcttttgtgaaaagattctctatgatcctgaaacggataagccttatgcatccaaagtattttttggaccaatttattacttgcgtctgaggcatttaactcaggacaaggcaaccgttagatgtagaggtaaaaagacgaagctcattagacaggcgaatgagggacgaaaacgtggaggaggtatcaagttcggagaaatggagagagactgtttaatagcgcatggtgcagccaatactattacagaagttttgaaagattcggaagaagattatcaagatgtgtatgtttgtgaaaattgtggagacatagcagcacaaatcaagggtattaatacatgtcttagatgttcaaaacttaatctctctcctctcttaacaaaaattgataccacgcacgtatctaaagtatttcttactcaaatgaacgccagaggcgtaaaagtcaaattagatttcgaacgaaggcctccttcgttttataaaccattagataaagttgatctcaagccgtcttttctggtgtaatattctagtttggtagtagatacatatcaatatcatcaaattcgagatccgaattataaaatgggcgtggattgttaactatagaatcggacgtctgatattcgaaaatctgtggagtttcaggttttggtgaaggtgtaactgctacttgggatactgaagtctgatattcagaaagctgtggatgttctggttcgacatccaccgatggtgtcacatcactaatcggttcggtaacgtctgtggatggaggtgctacttctacagaacctgtagcctcagttgtcaacggagatacatttttaatgcgagaaaatgtataatttggtaatggtttcttatgtggatctgaagaagaggtaagatatctactagaaagataccgatcacgttctagttctcttttgtagaacttaactttttctttctccgcatctagttgatattccaacctcttcacgttactacgttcagattccaattcacgttcgcatgggttacctccgcagtttttacgagcgatttcacgttcagccttcatgcgtctctccctctctctatcgagtttatcagagcagtctttctgaaggcgatcgaactccataaatttctccaacgctttgattgtttccatagatttccgaagttcagcttttaggactgtgattctttttctttcgaattcacagctggatgtacaaccgtttccattaccgccatctctaagtttcttttctagatcggcaacatttcatccccatgccttttacattcctcgagtctactgtcgtcgaaatatcgttccagctccttttcgacatcaataactttagcacgttgtctctcaagctctcttttgtagttatctgattccctggcacgtttaagatcttcatgcaattgagtcagctcttaacttcctctcttgcttcttcgtcatagtacgcgcaatcactgtgagatccattgttaccacgtctacactcggcgagctcgcgtttaagagattcaatttcccgtttgtattggtccatgtttccattgctaccaccattagatttacaggctgctagttgtcgttcgagatcagaaatacgggttttcttggaattgatttcgtcgatgtacttggcatcgaaacacttattaagttctttttccaattctacgattttatttctttcgcgagtcaattccctcctgtagtaactatctgttttgtcagattcacgctctctacgtagactttcttgcaagttactaatttgttccctagcacgtccgagtttagttttatatgctgaatagagttctgattcatcctttgagcagatctctagcgatcgtttaagattcctaattctagtctttagcctatttacctcctcagaagatgttccgttaccgttgcgtttacactcgttaagctgtctatcaagatccatgattctatctctaagacgttgcatctctctttccatatcagcattgctttcattattacgtctgcagtcactcaactgtctttcaatatctgagattctatctctaagacgtcgcatctctctctgtttcggcattggtttcattattacgtttacagtcgttcaactgtctttcaagatctgatattctagattggagtctgctaatctctgtagcattttcacggcattcactcagttgtctttcaagatctgaaattttagattggagtctgctaatctctgtaagatttcctcctccgctctcgatgcagtcggtcaacttattctctagttctctaatacgcgaacgcagtgcatcaacttcttgcgtgtcttcctggttgcgtgtacattcatcgagatctctaacgcgtcgtcgttcttcctcaagttctctgcgtactacagaaagcgtgtccttatcttgttgatatttagcaatttctgattctagagtactgattttgcttacgtagttactaatatttgtcttggccttatcaagatcctccttgtatttgtcgcattccttgatatccctacgaagtctggacagttcccattcgacattacgacgtttatcgatttcagctcggagatcgtcatcgcgttgttttagccacatacgactgagttcaagttctcgttgacaagatccatctacttttccattcctaatagtatccagttccttttctagttctgaacgcatttctcgttccctatcaagcgattctctcaattctcggatagtcttcttatcaatttctaataaatctgaaccatcatctgtcccattttgaatatccctgtgttctttgatctcttttgtaagtcggtcgattctttcggttttataaacagaatccctttccaaagtcctaatcttactgagtttatcactaagttctgcattcaattcggtgagttttctcttggcttcttccaactctgttttaaactctccactatttccgcattcttcctcgcatttatctaaccattcaattagtttattaataactagttggtaatcagcgattcctatagccgttcttgtaattgtgggaacataattaggatcttctaatggattgtatggcttgatagcatcatctttatcattattagggggatggacaaccttaattggttggtcctcatctcctccagtagcgtgtggttcttcaataccagtgttagtaataggcttaggcaaatgcttgtcgtacgcgggcacttcctcatccatcaagtatttataatcgggttctacttcagaatattcttttctaagagacgcgacttcgggagttagtagaagaactctgtttctgtatctatcaacgctggaatcaatactcaagttaaggatagcgaatacctcatcgtcatcatccgtatcttctgaaacaccatcatatgacatttcatgaagtctaacgtattgataaatagaatcagatttagtattaaacagatccttaacctttttagtaaacgcatatgtatattttagatctccagatttcataatatgatcacatgccttaaatgtcagtgcttccatgatataatctggaacactaatgggtgacgaaaaagatacagcaccatatgctacgttgataaataaatctgaaccactaagtagataatgattaatgttaagaaagaggaaatattcagtgtataggtatgtcttggcgtcatatcttgtactaaacacgctaaacagtttgttaatgtgatcaatttccaatagattaattagagcagcgggaataccaacaaacatattaccacatccgtattttctatgaatatcacatatcatgttaaaaaatcttgatagaagagcgaatatctcgtctgacttaatgagtcgtagttcagcagcaacataagtcataactgtaaatagaacatactttcctgtagtgttgattctagactccacatcaacaccattattaaaaatagttttatatacatctttaatctgctctccgttaatcgtcgaacgttctagtatacggaaacactttgatttcttatctgtagttaatgacttagtgatatcacgaagaatattacgaattacatttcttgtttttcttgagagacctgattcagaactcaactcatcgttccatagtttttctacctcagtggcgaaatctttggagtgcttggtacatttttcaataaggttcgtgacctccatttattataaaaaatttattcaaaacttaactacaatcgggtaattataaaatcgtagatctcccatgtggcggaatactaccatctatcgcatgtggatggacagtaggtaatggccatgggaacagtaatgtttgcatatttatctttcttgccagtattactgcatattgtcccaatgtttcgatgtgatgttctaacctatcaactgccgctgtatcacaacaatagtgtccgatgaaattaagattatgatccaatgtgtttaatatatgattatcaagtcttatacgatccgcgtcttttttgacaggatcaggttcttctacaggaagaagtttcggcctcttatgatattcatgtctgggaaacggtggtctagggtgaggctccggtatcggagtgggttttggattataatcatcatcgtctatgacatcatcttcgacttcgatatttattttgctatcttgatgatgtcctgtatcagttgcattttcagcactcgactgaatattagcgcattcattgtctattattaccatatttctaaacccaaaatgtatgtgttgaacatcagtactatcgttgatgagtcttatagcatgaattcgcttatcgttatcgggtttatcttctgtcaccttagcaattccttttttattaaactctacataatcatatccatttctattgtttgttctaatataaacgagtatagcatcattgctaaatttttcaatagtatcaaaaacagaatatcctaaaccatataatatatattcaggaacactcaaactaaatgtccaggattctcctaaatacgtaaactttaatagtgcgaaatcattcaaaaatctaccacttatagatagatagtacataaatgcgtatagtagtctacctatctctttattatgaaaaccggcattacgatcatatatgtcgtgatatacctgtgatccgtttacgttaaaccataaatacatgggtgatcctataaacatgaatttatttctaattctcagagctatagttaattgaccgtgtaatatttgcttacatgcatacttgatacgcttattaataagatttttatcattgctcgttatttcagaatcgtatatataaggagtaccatcgtgattcttaccagatattatacaaaatactatatataaaatatattgacccacgttagtaatcatataaatgtttaacgttttaaattttgtattcaatgatccattatcatacgctatcatggtcttgtaatattcattctttaaaatataatattgtgttagccattgcattggagctcctaatggagattttctattctcatccattttaggataggctttcataaagtccctaataacttcgtgaataatgtttctatgttttctactgatgcatgtatttgcttcgatttttttatcccatgtttcatctatcatagatttaaacgcagtaatgctcgcaacattaacatcttgaaccgttggtacaattccgttccataaatttataatgttcgccatttatataactcattttttgaatatacttttaattaacaaaagagttaagttactcatatggacgccgtccagtctgaacatcaatctttttagccagagatatcatagccgctcttagagtttcagcgtgattttccaacctaaatagaacttcatcgttgcgtttacaacacttttctatttgttcaaactttgttgttacattagtaatctttttttccaaattagttagccgttgtttgagagtttcctcattgtcgtcttcatcggctttaacaattgcttcgcgtttagcctctggctttttagcagcctttgtagaaaaaaattcagttgctggaattgcaagatcgtcatctccggggaaaagagttccgtccatttaaagtacagattttagaaactgacactctgcgttatttatatttggtacaacacatggattataaatattgatgttaataacatcagaaaatgtaaagtctatacattgttgcatcgtgttaaattttctaatggatctagtattattgggtccaacttctgcctgaaatccaaatatggaagcggatacaaaaccgtttcctggataaaccacacatctccacttttgctttacatcagaaattgtgtcgttgacatcttgaactctcctatctaatgccggtgttccacctatagattttgaatattcgaatgctgcatgagtagcattaaattccttaatattgccataattttcatatattgagtaaccctggataaaaagtaaacacaccgcagccgtcgctaccacaataaaaaaaattgatagagagttcatttataatctattagaagctgacaaaatttttttacacgcatcagacaatgctttaataaatagttcaacatctacttttgtcatatcgaaccgatggtatgattctaacctagaattacatccgaaaaagttgactatgttcatagtcattaagtcattaacaaacaacattccagactctggattataagacgatactgtttcgtcacaattacctaccttaatcatgtgattatgaatattggctattagagcaccttctaagaaatctataatatctttgaaacacgatttaaaatcaaaccacgaatatacttctacgaagaaagttagtttacccataggagaaataactataaatggagatctaaatacaaaatccggatctatgatagttttaacattattatattctctattaaatacctccacatctaaaaatgttaattttgaaactatgtcttcgtttattaccgtacctgaactaaacgctataagctctattgtttgagaactctttaaacgatattcttgaaatacatgtaacaaagtttcctttaactcggtcggtttatctaccatagttacagaatttgtatccttatctataatataataatcaaaatcgtataaagttatataattatcgcgttcagattgggatcttttcaaatagactaaaaaccccatttctctagtaagtatcttatgtatatgtttgtaaaatatcttcatggtgggaatatgctctaccacagttagccattcctcattgacagcggtagatgtattagacaaaactattccaatgtttaacaagggccattttacgagattattaaatccttgtttgataaatgtagccaatgagggttcgagttcaacgacgattgaattctcttcccgcggatgctgcatgatgaacgacgggatgttgttcgattgatttggaattctttttcgactttttgtttatattaaatattttaaaatttatagcggatagcaattcatgtaccacggataatgtagacgcgtattgcgcatcgatatctttattattagataaatttatcaataaatgtgagaagtttgcctcgttaaggtcttccatttaaatattatataaacatttgtgtttgtaacttattcgtcttttatggaatagttttttactagtaaagctgcaattacacactttgtccgtaaaacataaatataaacaccagcttttatcaatcgttccaaaaagtcgacggcggacatttttaacatggcatctattttaaatacacttaggtttttggaaaaaacatcattttataattgtaacgattcaataactaaagaaaagattaagattaaacataagggaatgtcatttgtattttataagccaaagcattctaccgttgttaaatacttgtctggaggaggtatatatcatgatgatttggttgtattggggaaggtaacaattaataatctaaagatgatgctattttacatggatttatcatatcatggagtgacaagtagtggagcaatttacaaattgggatcgtctatcgatagactttctctaaataggactattgttacaaaagttaataattatgatgatacattttttgacgacgatgattgatcgctattgcacaattttgtttttgtactttctaatatagtgtttaggttctttttcatatgagaatattgatttactaaaatatctatgtttaacttttgttctatgacgtccttatcggcggtatcggtacatatacgtaattcaccttcacaaaatacggagtcttcgataataatagccaatcgattattggatctagctgtctgtatcatattcaacatgtttaatatatcctttcgtttcccctttacaggcatcgatcgtagcatattttccgcgtctgatatggaaatgttaaaactacaaaaatgcgtaatgttagcccgtcctaatattggtacgtgtctataagtttggcatagtagaataatagacgtgtttaaatgccttccaaagtttaagaattctattagagtattgcattttgatagtttatcgcctacatcatcaaaaataagtaaaaagtgtgctgattttttatgattttgtgcgacagcaatacatttttctatgttacttttagttcgtatcagattatattctagagattcctgactactaacgaaattaatatgatttggccaaatgtatccatcataatctgggttataaacgggtgtaaacaagaatatatgtttatattttttaactagtgtagaaaacagagatagtaaatagatagtttttccagatccagatcctcccgttaaaaccattctaaacggcatttttaataaattttctcttgaaaattgtttttcttggaaacaattcataattatatttacagttactaaattaatttgataataaatcaaaatatggaaaactaaggttgttagtagggaggagaacaaagaaggcacatcgtgatataaataacatttattatcatgatgacaccagaaaacgacgaagagcagacatctgtgttctccgctactgtttacggagacaaaattcagggaaagaataaacgcaaacgcgtgattggtctatgtattagaatatctatggttatttcactactatctatgattaccatgtccgcgtttctcatagtgcgcctaaatcaatgcatgtctgctaacgaggctgctattactgacgccgctgttgccgttgctgctgcatcatctactcatagaaaggttgcgtctagcactacacaatatgatcacaaagaaagctgtaatggtttatattaccagggttcttgttatatattacattcagactaccagttattctcggatgctaaagcaaattgcactgcggaatcatcaacactacccaataaatccgatgtcttgactacctggctcattgattatgttgaggatacatggggatctgatggtaatccaattacaaaaactacatccgattatcaagattctgatgtatcacaagaagttagaaagtatttttgtgttaaaacaatgaactaatatttatttttgtacattaataaatgaaatcgcttaatagacaaactgtaagtaggtttaagaagttgtcggtgccggccgctataatgatgatactctcaaccattattagtggcataggaacatttctgcattacaaagaagaactgatgcctagtgcttgcgccaatggatggatacaatacgataaacattgttatttagatactaacattaaaatgtctacagataatgcggtttatcagtgtcgtaaattacgagctagattgcctagacctgatactagacatctgagagtattgtttagtattttttataaagattattgggtaagtttaaaaaagaccaatgataaatggttagatattaataatgataaagatatagatattagtaaattaacaaattttaaacaactaaacagtacgacggatgctgaagcgtgttatatatacaagtctggaaaactggttaaaacagtatgtaaaagtactcaatctgtactatgtgttaaaaaattctacaagtgacaacaaaaaatgaattaataataagtcgttaacgtacgccgccatggacgccgcgtttgttattactccaatgggtgtgttgactataacagatacattgtatgatgatctcgatatctcaatcatggactttataggaccatacattataggtaacataaaaactgtccaaatagatgtacgggatataaaatattccgacatgcaaaaatgctactttagctataagggtaaaatagttcctcaggattctaatgatttggctagattcaacatttatagcatttgtgccgcatacagatcaaaaaataccatcatcatagcatgcgactatgatatcatgttagatatagaagataaacatcagccattttatctattcccatctattgatgtttttaacgctacaatcatagaagcgtataacctgtatacagctggagattatcatctaatcatcaatccttcagataatctgaaaatgaaattgtcgtttaattcttcattctgcatatcagacggcaatggatggatcataattgatgggaaatgcaatagtaattttttatcataaaagttgtaaagtaaataataaaacaataaatattgaactagtagtacgtatattgagcaatcagaaatgatgctggtacctcttatcacggtgaccgtagttgcgggaacaatattagtatgttatatattatatatttgtaggaaaaagatacgtactgtctataatgacaataaaattatcatgacaaaattaaaaaagataaagagttctaattccagcaaatctagtaaatcaactgatagcgaatcagactgggaggatcactgtagtgctatggaacaaaacaatgacgtagataatatttctaggaatgagatattggacgatgatagcttcgctggtagtttaatatgggataacgaatccaatgttatggcgcctagcacagaacacatttacgatagtgttgctggaagcacgctgctaataaataatgatcgtaatgaacagactatttatcagaacactacagtagtaattaatgaaacggagactgttgaagtacttaatgaagataccaaacagaatcctaactattcatccaatcctttcgtaaattataataaaaccagtatttgtagcaagtcaaatccgtttattacagaacttaacaataaatttagtgagaataatccgtttagacgagcacatagcgatgattatcttaataagcaagaacaagatcatgaacacgatgatatagaatcatcggtcgtatcattggtgtgattagtttcctttttataaaattgaagtaatatttagtattattgctgccgtcacgttgtacaaatggagatattccctgtattcggcatttctaaaattagcaattttattgctaataatgactgtagatattatatagatacagaacatcaaaaaattatatctgatgagatcaatagacagatggatgaaacggtacttcttaccaacatcttaagcgtagaagttgtaaatgacaatgagatgtaccatcttattcctcatagattatcgacgattatactctgtattagttctgtcggaggatgtgttatctctatagataatgacatcaatggcaaaaatattctaacctttcccattgatcatgctgtaatcatatccccactgagtaaatgtgtcgtagttagcaagggtcctacaaccatattggttgttaaagcggatatacctagcaaacgattggtaacatcgtttacaaacgacatactatatgtaaacaatctgtcactgattaattatttgccgttgtctgtattcattattagacgagtcaccgactatttggatagacacatatgcgatcagatatttgctaataataagtggtattcccttataaccatcgacgataagcaatatcctattccatcaaactgtataggtatgtcctctgccaagtacataaattctagcatcgagcaagatactttaatccatgtttgtaacctcgagcatccgttcgactcagtatacaaaaaaatgcagtcgtacaattctctacctatcaaggaacaaatattgtacggtagaattgataatataaatatgagcattagtatttctgtggattaatagatttctagtatggggatcattaatcatctctaatctctaaatacctcataaaacgaaaaaaaagctattatcaaatactgtacggaatggattcattctcttctctttttatgaaactctgttgtatatctactgataaaactggaagcaaaaaatctgatagaaagaataagaataagatcaaggattatatggaacacgattattataaaataacaatagttcctggttcctcttccacgtctactagctcgtggtattatacacatgcctagtaatagtctctttgcgttgacggaaagcagactagaaataacaggctaaaatgttcagacaccataatagttcccaacccagataataacagagttccatcaacacattcctttaaactcaatcccaaacccaaaaccgttaaaatgtatccggccaattgatagtagataatgaggtgtacagcgcatgataatttacacagtaaccaaaatgaaaatactttagtaattataagaaatatagacggtaatgtcatcatcaacaatccgataatatgcctgagagtaaacattgacggataaaacaaaaatgctccgcataactctatcatggcaataacacaaccaaatacttgtaagattcctaaattagtagaaaatacaacgaatatcgatgtataagtgatctcgagaaataataagaataaagtaatgcccgtaaagataaacatcaacattgtttggtaatcattaaaccaattagtatgaagttgaactaatttcacagtagattttattccagtgttatcctcgcatgtataagtacctggtaagatatctttatattccataatcaatgagacatcactatctgataacgaatgaagtctagcactagtatgccatttacttaatatggtcgtcttggaagttttattataagttaaaatatcatggttatccaatttccatctaatatactttgtcggattatctatagtacacggaataatgatggtatcattacatgctgtatactctatggtctttgtagttgttataacaaccaacgtatagaggtatatcaacgatattctaactcttgacattttttatttatttaaaatgatacctttgttatttattttattctattttgctaacggtattgaatggcataagtttgaaacgagtgaagaaataatttctacttacttattagacgacgtattatacacgggtgttaatggggcggtatacacattttcaaataataaactaaacaaaactggtttaactaataataattatataacaacatctataaaagtagaggatgcggataaggatacattagtatgcggaaccaataacggaaatcccaaatgttggaaaatagacggttcagacgacccaaaacatagaggtagaggatacgctccttatcaaaatagcaaagtaacgataatcagtcacaacggatgtgtactatctgacataaacatatcaaaagaaggaattaaacgatggagaagatttgacggaccatgtggttatgatttatacacggcggataacgtaattccaaaagatggtttacgaggagcattcgtcgataaagacggtacttatgacaaagtttacattcttttcactgatactatcggctcaaagagaattgtcaaaattccgtatatagcacaaatgtgcctaaacgacgaaggtggtccatcatcattgtctagtcatagatggtcgacgtttctcaaagtcgaattagaatgtgatatcgacggaagaagttatagacaaattattcattctagaactataaaaacagataatgatacgatactatatgtattcttcgatagtccttattccaagtccgcattatgtacctattctatgaataccattaaacaatctttttctacgtcaaaattggaaggatatacaaagcaattgccgtctccagctcctggtatatgtttaccagctggaaaagttgttccacataccacgtttgaagtcatagaacaatataatgtactagatgatattataaagcctttatctaaccaacctatcttcgaaggaccgtctggtgttaaatggttcgatataaaggagaaggaaaatgaacatcgggaatatagaatatacttcataaaagaaaattctatatattcgttcgatacaaaatctaaacaaactcgtagctcgcaagtcgatgcgcgactattttcagtaatggtaactgcgaaaccgttatttatagcagatatagggataggagtaggaatgccacaaatgaaaaaaatacttaaaatgtaatcttaatcgagtacaccacacgacaatgaacaaacataagacagattatgctggttatgcttgctgcgtaatatgcggtctaattgtcggaattatttttacagcgacactattaaaagttgtagaacgtaaattagttcatacaccattaatagataaaacgataaaagatgcatatattagagaagattgtcctactgactggataagctataataataaatgtatccatttatctactgatcgaaaaacctgggaggaaggacgtaatgcatgcaaagctctaaattcaaattcggatctaattaagatagagactccaaacgagttaagttttttaagaagccttagacgaggctattgggtaggagaatccgaaatattaaaccagacaaccccatataattttatagctaagaatgccacgaagaatggaactaaaaaacggaaatatatttgtagcacaacgaatactcccaaactgcattcgtgttacactatataacaattacactacatttttatcataccactacttcggttagatgttttagaaaaaaataaatatcgccgtaccgttcttgtttttataaaaataacaattaacaattatcaaattttttctttaatattttacgtggttgaccattcttggtggtaaaataatctcttagtgttggaatggaatgctgtttaatgtttccacactcatcgtatattttgacgtatgtagtcacatcgtttacgcaatagtcagactgtagttctatcatgcttcctacatcagaaggaggaacagttttaaagtctcttggttttaatctattaccgttagttttcatgaaatcctttgttttatccacttcacattttaaataaatgtccactatacattcttttgttaattttactagatcgtcatgggtcatagaatttataggttccgtagtccatggatccaaactagcaaacttcgcgtatacggtatcgcgattagtgtatacaccaactgtatgaaaattaagaaaacagtttaataaatcaacagaaatatttaatcctccgtttgatacagatgcgccatatttatggatttcggattcacacgttgtttgtctgaggtgttcgtctagtgttgcttctacgtaaacttcgattcccatatattctttattgtcagaatcgcataccgatttatcatcatacactgtttgaaaactaaatggtatacacatcaaaataataaataataacgagtacattctgcaatattgttatcgtaattggaaaaatagtgttcgagtgagttggattatgtgagtattggattgtatattttattttatattttgtaataagaataaaatgctaatgtcaagtttattccaatagatgtcttattaaaaacatatataataaataacaatggctgaatggcataaaattatcgaggatatctcaaaaaataataagttcgaggatgccgccatcgttgattacaagactacaaagaatgttctagctgctattcctaacagaacatttgccaagattaatccgggtgaaattattcctctcatcactaatcgtaatattctaaaacctcttattggtcagaaatattgtattgtatatactaactctctaatggatgagaacacgtatgctatggagttgcttactgggtacgcccctgtatctccgatcgttatagcgagaactcataccgcacttatatttttgatgggtaagccaacaacatccagacgtgacgtgtatagaacgtgtagagatcacgctacccgtgtacgtgcaactggtaattaaaataaaaagtaatattcatatgtagtgtcaattttaaatgatgatgatgaaatggataatatccatattgacgatgtcaataatgccggtattggcatacagttcatcgatttttagatttcattcagaggatgtggaattatgttatgggcatttgtattttgataggatctataatgtagtaaatataaaatataatccgcatattccatatagatataattttattaatcgcacgttaaccgtagatgaactagacgataatgtcttttttacacatggttattttttaaaacacaaatatggttcacttaatcctagtttgattgtctcattatcaggaaacttaaaatataatgatatacaatgctcagtaaatgtatcgtgtctcattaaaaatttggcaacgagtacatctactatattaacatctaaacataagacttattctctacatcggtccacgtgtattactataataggatacgattctattatatggtataaagatataaatgacaagtataatgacatctatgattttactgcaatatgtatgctaatagcgtctacattgatagtgaccatatacgtgtttaaaaaaataaaaatgaactcttaattatgctatgctattagaaatggataaaatcaaaattacggttgattcaaaaattggtaatgttgttaccatatcgtataacttggaaaagataactattgatgtcacacctaaaaagaaaaaagaaaaggatgtattattagcgcaatcagttgctgtcgaagaggcaaaagatgtcaaggtagaagaaaaaaatattatcgatattgaagatgacgatgatatggatgtagaaagcgcgtaatactatctataaaaataagtatataataaatactttttatttacggtactcttgtagtggtgataccctactcgattatttttttaaaaaaatacttattctgattcttctaaccatttccgtgttcgtttgaatgccacatcgacgtcaaagataggggagtagttgaaatctagttctgcattgttggtacgcacctcaaatgtagtgttggatatcttcaacgtatagttgttgagtagtgatggttttctaaatagaattctcttcatatcattcttgcacgcgtacatttttagcatccatcttggaattctagatccttgttctattcccaatggtttcatcaatagaagattaaacatatcgtacgaacacgatggagagtaatcgtagcaaaagtaagcatttcctttaatctcagatcccggatactggatatattttgcagccaacacgtgcatccatgcaacatttcctacatatacccggctatgcaccgcgtcatcatcgactgtacgatacataatgttaccgtgttgcttacattgctcgtaaaagactttcgtcaatttgtctccttctccgtaaattctagtgggtcttaggcaacaagtatacaattttgctccattcatgattacggaattattggctttcataaccagttgctcggccatacgtttactttttgcgtatacatgtcctggtgatatatcataaagggtatgctcatggccgatgaatggatcaccgtgtttattgggtcctattgcttccatgctactagtatagatcaaatacttgattcctaggtccacacaagctgccaaaatagtctgtgttccataatagtttactttcatgatttcattatcggtgtattttccaaatacatccactagagcagccgtatgaataatcagatttaccccatctagcgcttctctcaccttatcaaagtcgtttatatcacattgtatatagtttataaccttaactttcgaggttattggttgtggatcttctacaatatctatgactctgatttcttgaacatcatctgcactaattaacagttttactatatacctgcctagaaatccggcaccaccagtaaccgcgtacacggccattgctgccactcataatatcagactacttattctattttactaaataatggctgtttgtataatagaccacgataatatcagaggagttatttactttgaaccagtccatggaaaagataaagttttaggatcagttattggattaaaatccggaacgtatagtttgataattcatcgttacggagatattagtcaaggatgtgattccataggcagtccagaaatatttatcggtaacatctttgtaaacagatatggtgtagcatatgtttatttagatacagatgtaaatatatctacaattattggaaaggcgttatctatttcaaaaaatgatcagagattagcgtgtggagttattggtatttcttacataaatgaaaagataatacattttcttacaattaacgagaatggcgtttgatatatcagttaatgcgtctaaaacaataaatgcattagtttacttttctactcagcaaaataaattagtcatacgtaatgaagttaatgatacacactacactgtcgaatttgatagggacaaagtagttgacacgtttatttcatataatagacataatgacaccatagaaataagaggggtgcttccagaggaaactaatattggttgcgcggttaatacgccggttagtatgacttacttgtataataagtatagttttaaactgattttagcagaatatataagacacagaaatactatatccggcaatatttattcggcattgatgacactagatgatttggctattaaacagtatggagacattgatctattatttaatgagaaacttaaagtagactccgattcgggactatttgactttgtcaactttgtaaaggatatgatatgttgtgattctagaatagtagtagctctatctagtctagtatctaaacattgggaattgacaaataaaaagtataggtgtatggcattagccgaacatatatctgatagtattccaatatctgagctatctagactacgatacaatctatgtaagtatctacgcggacacactgagagcatagaggatgaatttgattattttgaagacgatgattcgtctacatgttctgccgtaaccgacagggaaacggatgtataattttttttatagcgtgaaggatatgataaaaaatataattgttgtatttatcccattctaatcaccttatatgattctgtaacacaataaaggagtctcatagatgtatagaggtcagatactggtttgataaactgtttattccacataagtatgtttgactttatggttagacccgcatactttaacaaatcactgaaaattggagttaggtattgacctctcagaatcagttgccgttctggaacattaaatgtattttttatgatatactccaacgcatttatgtgggcatacaacaagtcattactaatggagtattccaagagttttagttgtctagtatttaacaagagaagagatttcaacagactgtttatgaactcgaatgccgcctcattgtcgcttatattgatgatgtcgaattctcccaatatcatcaccgatgagtagctcatcttgttatcgggatccaagttttctaaagatgtcattaaaccctcgatcatgaatggatttatcatcatcgtttttatgttggacatgagcttagtccgtttgtccacatctatagacgacgatttctgaattatttcatatatccctctctttaactccaggaacttgtcaggatggtctactttaatatgttctcgtctaagagatgaaaatctttggatggtcgcacgcgacttttctctaaaggatgatgttgcccaagatcctctcttaaatgaatccatcttatccttggacaagatggacagtctattttccttagatggtttaatatttttgttacccatgatctataaaggtagacctaatcgtctcggatgacctatatatttattttcagttttattatacgcataaattgtaaaaaatatgttaggtttacaaaaatgtctcgtggggcattaatcgtttttgaaggattggacaaatctggaaaaacaacacaatgtatgaacatcatggaatctataccggcaaacacgataaaatatcttaactttcctcagagatccactgtcactggaaagatgatagatgactatctaactcgtaaaaaaacctataatgatcatatagttaatctattattttgtgcaaatagatgggagtttgcatcttttatacaagaacaactagaacagggaattactttaatagttgatagatacgcattttctggagtagcgtatgccgccgctaaaggcgcgtcaatgactctcagtaagagttatgaatctggattgcctaaacccgacttagttatattcttggaatctggtagcaaagaaattaatagaaacgtcggcgaggaaatttatgaagatgttacattccaacaaaaggtattacaagaatataaaaaaatgattgaagaaggagatattcattggcaaattatttcttctgaattcgaggaagatgtaaagaaggagttgattaagaatatagttatagaggctatacacacggttactggaccagtggggcaactgtggatgtaatagtgaaattacattttttataaatagatgttagtacagtgttataaatggatgaagcatattactctggcaacttggaatcagtactcggatacgtgtccgatatgcataccgaactcgcatcaatatctcaattagttattgccaagatagaaactatagataatgatatattaaacaaggacattgtaaattttatcatgtgtagatcaaacttggataatccatttatctctttcctagatactgtatatactattatagatcaagagaactatcagactgagttgattaattcattagacgacaatgaaattatcgattgtatagttaataagtttatgagcttttataaggataacctagaaaatatagtagatgctatcattactctaaaatatataatgaataatccagattttaaaactacgtatgcagaagtactcggttccagaatagccgatatagatattaaacaagtgatacgtaagaatatactacaattgtctaatgatatccgcgaacgatatttgtgaaaaatattaaaaaaaaatactttttttattaaatgacgtcgcttcgcgaatttagaaaattatgctgtgatatatatcacgcatcaggatataaagaaaaatctaaattaattagagactttataacagatagggatgataaatatttgatcattaagctattgcttcccggattagacgatagaatttataacatgaacgataaacaaattataaaattatatagtataatatttaaacaatctcaggaagatatgctacaagatttaggatacggatatataggagacactattaggactttcttcaaagagaacacagaaatccgtccacgagataaaagcattttaactttagaagacgtggatagtttcttaactacgttatcatccgtaactaaagaatcgcatcaaataaaattattgactgatattgcatccgtttgtacatgtaatgatttaaaatgtgtagtcatgcttattgataaagatctaaaaattaaagcgggtcctcggtacgtacttaacgctattagtcctcatgcctatgatgtgtttagaaaatctaataacttgaaagagataatagaaaattcatctaaacaaaatctagactctatatctatttctgttatgactccaattaatcccatgttagcggaatcgtgtgattctgtcaataaggcgtttaaaaaatttccatcaggaatgtttgcggaagtcaaatacgatggtgaaagagtacaagttcataaaaataataacgagtttgccttctttagtagaaacatgaaaccagtactctctcataaagtggattatctcaaagaatacataccgaaagcatttaaaaaagctacgtctatcgtattggattctgaaattgttcttgtagacgaacataatgtaccgctcccgtttggaagtttaggtatacacaaaaagaaagaatataaaaactctaacatgtgtttgttcgtgtttgactgtttgtactttgatggattcgatatgacggacattccattgtacgaacgaagatcttttctcaaagatgttatggttgaaatacccaatagaatagtattctcagagttgacgaatattagtaacgagtctcagttaactgacgtattggatgatgcactaacgagaaaattagaaggattggtcttaaaagatattaatggagtatacgaaccgggaaagagaagatggttaaaaataaagcgagactatttgaacgagggttccatggcagattctgccgatttagtagtactaggtgcctactatggtaaaggagcaaagggtggtatcatggcagtctttctaatgggttgttacgacgatgaatccggtaaatggaagacggttaccaagtgttcaggacacgatgataatacgttaagggagttgcaagaccaattaaagatgattaaaattaacaaggatcccaaaaaaattccagagtggttagtagttaataaaatctatattcccgattttgtagtagaggatccgaaacaatctcagatatgggaaatttcaggagcagagtttacatcttccaagtcccataccgcaaatggaatatccattagatttcctagatttactaggataagagaggataaaacgtggaaagaatctactcatctaaacgatttagtaaacttgactaaatcttaatagttacatacaaactgaaaattaaaataacactatttagttggtggtcgccatggatggtgttattgtatactgtctaaacgcgctagtaaaacatggcgaggaaataaatcatataaaaaatgatttcatgattaaaccatgttgtgaaagagtttgtgaaaaagtcaagaacgttcacatcggcggacaatctaaaaacaatacagtgattgcagatttgccatatctggataatgctgtatcggatgtatgcaattcactgtataaaaagaatgtatcaagaatatccagatttgctaatttgataaagatagatgacgatgacaagactcctactggtgtatataattattttaaacctaaagatgccattcctgttatcatatctataggaaaggataaagatgtctgtgaactattaatctcatcagacatatcgtgtgcatgcgtggagttaaattcatatcacgtagccattcttcccatggatgtttccttttttaccaaaggaaatgcatcattgattattctcctgtttgatttctctatcgatgcggcacctctcttaagaagtgtaaccgataataatgttattatatctagacaccagcgtctacatgacgagcttccgagttccaattggttcaagttttacataagtataaagtccgactattgttctatattatatatggttgttgatggatctgtgatgcatgcgatagctgataatagaactcacgcaattattagcaaaaatatattagacaatactacgattaacgatgagtgtagatgctgttattttgaaccacagattaggattcttgatagagatgagatgctcaatggatcatcgtgtgatatgaacagacattgtattatgatgaatttacctgatgtaggcgaatttggatctagtatgttggggaaatatgaacctgacatgattaagattgctctttcggtggctggtaatttaataagaaatcgagactacattcccgggagacgaggatatagctactacgtttacggtatagcctctagataatttttttaagcacgaaataaaaaacataattttaaaccaatctatttcatactattttgtgtgatcaccatggacataaagatagatattagtatttctggtgataaatttacggtgactactaggagggaaaatgaagaaagaaaaaaatatctacctctccaaaaagaaaaaactactgatgttatcaaacctgattatcttgagtacgatgacttgttagatagagatgagatgtttactattctagaggaatattttatgtacagaggtctattaggcctcagaataaaatatggacgactctttaacgaaattaaaaaattcgacaatgatgcggaagaacaattcggtactatagaagaactcaagcagaaacttagattaaattctgaagagggagcagataactttatagattatataaaggtacaaaaacaggatatcgtcaaacttactgtatacgattgcatatctatgataggattgtgtgcatgcgtggtagatgtttggagaaatgagaaactgttttctagatggaaatattgtttacgagcgattaaactgtttattaatgatcacatgcttgataagataaaatctatactgcagaatagactagtatatgtggaaatgtcatagaaagttaaaagttaatgagagcaaaaatatataaggttgtattccatatttgttatttttttctgtaatagttagaaaaatacattcgatggtctatctatcagattattatgtgttataaggtactttttctcataataaactagagtatgagtaagatagtgtttttcaaaacatataaatctaaaattgatggatgagatatacagctattaatttcgaaaatatattttaatctgataactttaaacatggatttttaatggtggtttaacgttttaaaaaaagattttgttattgtagtatatgataatattaaaagatggatataaagaatttgctgactgcatgtactattttttacattactacattggctacggcagatatacctacttcgtcactgccacacgctccggtaaacggggcatgtgacgagggagaatatcttgataagaggcataatcaatgttgtaatcagtgtccacctggagaatttgccaaggtcagatgtaatggtaacgataacacaaaatgtgaacgctgcccacctcatacatataccgcaatccccaattactctaatggatgtcatcaatgtagaaaatgcccaacaggatcatttgataaggtaaagtgtaccggaacacagaacagtaaatgttcgtgtcttcctggttggtattgcgctactgattcttcacagactgaagattgtcgagattgtataccaaaaaggagatgtccatgcggatactttggtggaatagatgaacaaggaaatcctatttgtaaatcgtgttgtgttggtgaatattgcgactacctacgtaattatagacttgatccatttcctccatgcaaactatctaaatgtaattaattatgattttgatgataatgttaccatacattatatcgctacttggttagtgtattattcagtatgaagacctattaataattacttatcttttgacgatcttgttataattataatataaaaatacttatggcatagtaactcataattgctgacgcgataaattcgtaataatctgttttgttcaaatttttataaggaatctacaggcataaaaataaaaatataatttataatatactcttacagcgcgccatcatgaataacagcagtgaattgattgctgttattaatggatttagaaatagtggacgattttgtgatattaatatagttattaatgatgaaaggataaacgctcataaactcatcctatctggagcctccgaatatttttccattctgttttccaataattttatcgattctaatgaatacgaagttaatctaagtcatttagattatcaaagcgtaaacgatttgatcgattacatttatgggatacctttgagcctaactaacgataacgtgaaatatattctttcaaccgctgattttttacaaattggatctgctattacggagtgtgaaaattacatacttaaaaatctttgttctagaaactgtatcgatttctacatatacgctgataaatataataacaagaaaatagaatcagcgtcgtttaacacaatattacaaaatattttgagactcatcaacgatgaaaactttaaatacttaacagaggaatcaatgataaaaattttaagcgatgatatgttaaatataaaaaatgaggatttcgccccactaattctcattaaatggttagagagtactcaacaaccatgcaccgtcgagttacttaaatgcctcagaatatcattgctttccccacaagttataaaatcactttatagtcatcgactggttagttcaatctacgaatgtataacattcttaaacaatatagcattcttggatgaatcatttcctagataccatagcatcgagttgatatctatcggtataagtaattcgcatgataagatttccataaactgctacaatcataaaaaaaatacatgggaaatgatatcttcacgtagatataggtgtagtttcgcagtggccgtcctggataatattatttatatgatgggtggatatgatcagtccccgtatagaagttcaaaggttatagcgtacaatacatgtacaaattcttggatatatgatataccagagctaaaatatcctcgttctaattgtgggggactggctgatgacgaatacatttattgtataggcggcatacgcgatcaggattcatcgttgacatctagtattgatagatggaagccatcaaaaccatattggcagaagtatgctaaaatgcgcgaaccaaaatgtgatatgggggttgcgatgttaaacggattaatatatgttataggtggaatcgttaaaggtgacacgtgtaccgacgcactagagagtttatcagaagatggatggatgaagcatcaacgtcttccaataaaaatgtccaatatgtcgacgattgttcatgatggcaagatttatatatctggaggttacaacaatagtagtgtagttaatgtaatatcgaatttagtccttagctataattcgatatatgatgaatggaccaaattatcatcattaaacattcctagaattaatcccgctctatggtcagcgcataataaattatatgtaggaggaggaatatctgatgatgttcgaactaatacatctgaaacatacgacaaagaaaaagattgttggacattggataatggtcacgtgttaccacgcaattatataatgtataaatgcgaaccgattaaacataaatatccattggaaaaaacacagtacacgaatgattttctaaagtatttggaaagttttataggtagttgatagaacaaaatacataattttgtaaaaataaatcactttttatactaatatgacacgattaccaatacttttgttactaatatcattagtatacgctacaccttttcctcagacatctaaaaaaataggtgatgatgcaactctatcatgtaatcgaaataatacaaatgactacgttgttatgagtgcttggtataaggagcccaattccattattcttttagctgctaaaagcgacgtcttgtattttgataattataccaaggataaaatatcttacgactctccatacgatgatctagttacaactatcacaattaaatcattgactgctagagatgccggtacttatgtatgtgcattctttatgacatcgcctacaaatgacactgataaagtagattatgaagaatactccacagagttgattgtaaatacagatagtgaatcgactatagacataatactatctggatctacacattcaccggaaactagttctgagaaacctgattatatagataattctaattgctcgtcggtattcgaaatcgcgactccggaaccaattactgataatgtagaagatcatacagacaccgtcacatacactagtgatagcattaatacagtaagtgcatcatctggagaatccacaacagacgagactccggaaccaattactgataaagaagatcatacagtcacagacactgtctcatacactacagtaagtacatcatctggaattgtcactactaaatcaaccaccgatgatacgtacaatgataatgatacagtaccaccaactactgtaggcggtagtacaacctctattagcaattataaaaccaaggactttgtagaaatatttggtattaccgcattaattatattgtcggccgtggcaatattctgtattacgtattatatatgtaataaacgttcacgtaaatacaaaacagagaacaaagtctagatttttgacttacataaatgtctgggatagtaaaatctatcatattgagcgggccatctggtttaggaaagacagccatagccaaaagactatgggaatatatttggatttgtggtgtcccataccactagatttcctcgtcctatggaacgagaaggtgtcgattaccattacgttaacagagaggccatctggaagggaatagccgccggaaactttctagaacatactgagtttttaggaaatatttacggaacttctaaaactgctgtgaatacagcggctattaataatcgtatttgtgtgatggatctaaacatcgatggcgttagaagtcttaaaaatacgtacctaatgccttactcggtgtatataagacctacctctcttaaaatggttgagaccaagcttcgttgtagaaacactgaagcggatgatgagattcatcgtcgtgtgatgttggcaaaaactgacatggatgaggcaggtgaagccggtctattcgacactattatcattgaagatgatgtgaatttagcatatagtaagttaattcagatactacaggaccgtattagaatgtattttaacactaattagagacttaagacttaaaacttgataattaataatataactcgtttttatatgtggctatttcaacgtctaatgtattagttaaatattaaaacttaccacgtaaaacttaaaatttaaaatgatatttcattgacagatagatcacacattatgaactttcaaggacttgtgttaactgacaattgcaaaaatcaatgggtcgttggaccattaataggaaaaggtggatttggtagtatttatactactaatgacaataattatgtagtaaaaatagagcccaaagctaacggatcattatttaccgaacaggcattttatactagagtacttaaaccatccgttatcgaagaatggaaaaaatctcacaatataaagcacgtaggtcttatcacgtgcaaggcatttggtctatacaaatccattaatgtggaatatcgattcttggtaattaatagattaggtgcagatctagatgcggtgatcagagccaataataatagactaccaaaaaggtcggtgatgttgatcggaatcgaaatcttaaataccatacaatttatgcacgagcaaggatattctcacggagatattaaagcgagtaatatagtcttagatcaaatagataagaataaattatatctagtggattacggattggtttctaaattcatgtctaatggcgaacatgttccatttataagaaatccaaataaaatggataacggtactctagaatttacacctatagattcgcataaaggatacgttgtatctagacgtggagatctagaaacacttggatattgtatgattagatggttgggaggtatcttaccatggactaagatatctgaaacaaagaattgtgcattagtaagtgccacaaaacagaaatatgttaacaatactgcgactttgttaatgaccagtttgcaatatgcacctagagaattgctgcaatatattaccatggtaaactctttgacatattttgaggaacccaattacgacaagtttcggcacatattaatgcagggtgtatattattaagtgtggtgtttggtcgataaaaattaaaaaataacttaatttattattgatctcgtgtgtacaaccgaaatcatggcgatgttttacgcacacgctctcggtgggtacgacgagaatcttcatgcctttcctggaatatcatcgactgttgccaatgatgtcaggaaatattctgttgtgtcagtttataataacaagtatgacattgtaaaagacaaatatatgtggtgttacagtcaggtgaacaagagatatattggagcactgctgcctatgtttgagtgcaatgaatatctacaaattggagatccgatccatgatcaagaaggaaatcaaatctctatcatcacatatcgccacaaaaactactatgctctaagcggaatcgggtacgagagtctagacttgtgtttggaaggagtagggattcatcatcacgtacttgaaacaggaaacgctgtatatggaaaagttcaacatgattattctactatcaaagagaaggccaaagaaatgagtacacttagtccaggacctatcatcgattaccacgtctggataggagattgtatctgtcaagttactgctgtggacgtacatggaaaggaaattatgagaatgagattcaaaaagggtgcggtgcttccgatcccaaatctggtaaaagttaaacttggggagaatgatacagaaaatctttcttctactatatcggcggcaccatcgaggtaaccacctctctggaagacagcgtgaataatgtactcatgaaacgtttggaaactatacgccatatgtggtctgttgtatatgatcattttgatattgtgaatggtaaagaatgctgttatgtgcatacgcatttgtctaatcaaaatcctataccgagtactgtaaaaacaaatttgtacatgaagactatgggatcatgcattccatggaagctctagagtatcttagcgaactgaaggaatcaggtggatggagtcccagaccagaaatgcaggaatttgaatatccagatggagtggaagacactgaatcaattgagagattggtagaggagttcttcaatagatcagaacttcaggctggtaattctattaattgttaaacatacatctgtttcagctaagcaactaagaacacgtatacggcagcagcttccttctatactctcatcttttaccaacacaaagggtggatatttgttcattggagttgataataatacacacaaagtatttggattcacggtgggttacgactacctcagactgatagagaatgatatagaaaagcatatcaaaagactttgtgttgtgtatttctgtgagaagaaagaggacatcaagtacgcgtgtcgattcatcaaggtatataaacctggggatgaggctacctcgacatacgtgtgcgctatcaaagtggaaagatgctgttgtgctgtgtttgcagattggccagaatcatggtatatggatactaatggtatcaagaagtattctccagatgaatgggtgtcacatataaaattttaattaatgtaactatagagaacaaataataaggttgtaatatcatatagacaataactaacaattaattagtaactgttatctcttttttaattaaccaactaactatatacctattaatacatcgtaattatagttcttaacatctattaatcattaattcgcttctttaattttttataaactaacattgttaattgaaaagggataacatgttacagaatataaattatatatggatttttttaaaaaggaaatacttgactggagtatatatttatctcttcattatatagcacgcgtgttttccaatttttccacatcccatataatacaggattataatctcgttcgaacatacgagaaagtggataaaacaatagttgattttttatctaggttgccaaatttattccatattttagaatatggggaaaatattctacatatttattctatggatgatgctaatacgaatattataattttttttctagatagagtattaaatattaataagaacgggtcatttatacacaatctcgggttatcatcatccattaatataaaagaatatgtatatcaattagttaataatgatcatccagataataggataagactaatgcttgaaaatggacgtagaacaagacattttttgtcctatatatcagatacagttaatatctatatatgtattttaataaatcatggattttatatagatgccgaagacagttacggttgtacattattacatagatgtatatatcactataagaaatcagaatcagaatcatacaatgaattaattaagatattgttaaataatggatcagatgtagataaaaaagatacgtacggaaacacaccttttatcctattatgtaaacacgatatcaacaacgtggaattgtttgagatatgtttagagaatgctaatatagactctgtagactttaatagatatacacctcttcattatgtctcatgtcgtaataaatatgattttgtaaagttattaatttctaaaggagcaaatgttaatgcgcgtaataaattcggaactactccattttattgtggaattatacacggtatctcgcttataaaactatatttggaatcagacacagagttagaaatagataatgaacatatagttcgtcatttaataatttttgatgctgttgaatctttagattatctattatccagaggagttattgatattaactatcgtactatatacaacgaaacatctatttacgacgctgtcagttataatgcgtataatacgttggtctatctattaaacaaaaatggtgattttgagacgattactactagtggatgtacatgtatttcggaagcagtcgcaaacaacaacaaaataataatggaagtactattgtctaaacgaccatctttgaaaattatgatacagtctatgatagcaattactaaacataaacagcataatgcagatttattgaaaatgtgtataaaatatactgcgtgtatgaccgattatgatactcttatagatgtacagtcgctacagcaatataaatggtatattttaagatgtttcgatgaaatagatatcatgaagagatgttatataaaaaataaaactgtattccaattagttttttgtatcaaagacattaatactttaatgagatacggtaaacatccttctttcgtgaaatgcactagtctcgacgtatacggaagtcgtgtacgtaatatcatagcatctattagatatcgtcagagattaattagtctattatccaagaagctggatcctggagataaatggtcgtgttttcctaacgaaataaaatataaaatattggaaaactttaacgataacgaactatccacatatctaaaaatcttataaacattattaaaatataaaatctaagtaggataaaatcacactacatcattgtttccttttagtgctcgacagtgtatactatttttaacgctcataaataaaaatgaaaacgatttccgttgttacgttgttatgcgtactacctgctgttgtttattcaacatgtactgtacccactatgaataacgctaaattaacgtctaccgaaacatcgtttaatgataaccagaaagttacgtttacatgtgatcagggatatcattctttggatccaaatgctgtctgtgaaacagataaatggaaatacgaaaatccatgcaaaaaaatgtgcacagtttctgattatgtctctgaactatataataaaccgctatacgaagtgaattccaccatgacactaagttgcaacggcgaaacaaaatattttcgttgcgaagaaaaaaatggaaatacttcttggaatgatactgttacgtgtcctaatgcggaatgtcaacctcttcaattagaacacggatcgtgtcaaccagttaaagaaaaatactcatttggggaatatatgactatcaactgtgatgttggatatgaggttattggtgcttcgtacataagttgtacagctaattcttggaatgttattccatcatgtcaacaaaaatgtgatatgccgtctctatctaacggattaatttccggatctacattttctatcggtggcgttatacatcttagttgtaaaagtggttttacactaacggggtctccatcatccacatgtatcgacggtaaatggaatcccatactcccaatatgtgtacgaactaacgaaaaatttgatccagtggatgatggtcccgacgatgagacagatttgagcaaactctcgaaagacgttgtacaatatgaacaagaaatagaatcgttagaagcaacttatcatataatcatagtggcgttgacaattatgggcgtcatatttttaatctccgttatagtattagtttgttcctgtgacaaaaataatgaccaatataagttccataaattgctaccgtaaatataaatccgttaaaataattaataatttaataacaaacaagtatcaaaagattaaagacttatagctagaatcaattgagatgtcttcttcagtggatgttgatatctacgatgccgttagagcatttttactcaggcactattataacaagagatttattgtgtatggaagaagtaacgccatattacataatatatacaggctatttacaagatgcgccgttataccgttcgatgatatagtacgtactatgccaaatgaatcacgtgttaaacaatgggtgatggatacacttaatggtataatgatgaatgaacgcgatgtttctgtaagcgttggcaccggaatactattcatggaaatgtttttcgattacaataaaaatagtatcaacaatcaactaatgtatgatataattaatagcgtatctataattctagctaatgagagatatagaagcgcttttaacgacgatggtatatacatccgtagaaatatgattaacaagttgtacggatacgcatctctaactactattggcacgatcgctggaggtgtttgttattatctgttgatgcatctagttagtttgtataaataattatttcaatatactagttaaaattttaagattttaaatgtataaaaaactaataacgtttttatttgtaataggtgcattagcatcctattcgaataatgagtacactccgtttaataaactgagtgtaaaactctatatagatggagtagataatatagaaaattcatatactgatgataataatgaattggtgttaaattttaaagagtacacaatttctattattacagagtcatgcgacgtcggatttgattccatagatatagatgttataaacgactataaaattattgatatgtataccattgactcgtctactattcaacgcagaggtcacacgtgtagaatatctaccaaattatcatgccattatgataagtacccttatattcacaaatatgatggtgatgagcgacaatattctattactgcagagggaaaatgctataaaggaataaaatatgaaataagtatgatcaacgatgatactctattgagaaaacatactcttaaaattggatctacttatatatttgatcgtcatggacatagtaatacatattattcaaaatatgatttttaaaaatttaaaatatattatcacttcagtgacagtagtcaaataacaaacaacaccatgagatatattataattctcgcagttttgttcattaatagtatacatgctaaaataactagttataagtttgaatccgtcaattttgattccaaaattgaatggactggggatggtctatacaatatatcccttaaaaattatggcatcaagacgtggcaaacaatgtatacaaatgtaccagaaggaacatacgacatatccgcatttccaaagaatgatttcgtatctttctgggttaaatttgaacaaggcgattataaagtggaagagtattgtacgggactatgcgtcgaagtaaaaattggaccaccgactgtaacattgactgaatacgacgaccatatcaatttgtacatcgagcatccgtatgctactagaggtagcaaaaagattcctatttacaaacgcggtgacatgtgtgatatctacttgttgtatacggctaacttcacattcggagattctaaagaaccagtaccatatgatatcgatgactacgattgcacgtctacaggttgcagcatagactttgtcacaacagaaaaagtgtgcgtgacagcacagggagccacagaagggtttctcgaaaaaattactccatggagttcgaaagtatgtctgacacctaaaaagagtgtatatacatgcgcaattagatccaaagaagatgttcccaatttcaaggacaaaatggccagagttatcaagagaaaatttaatacacagtctcaatcttatttaactaaatttctcggtagcacatcaaatgatgttaccacttttcttagcatgcttaacttgactaaatattcataactaatttttattaatgatacaaaaacgaaataaaactgcatattatacactggttaacgcccttataggctctaaccattttcaagatgaggtccctgattatagtccttctgttcccctctatcatctactccatgtctattagacgatgtgagaagactgaagaggaaacatggggattgaaaatagggttgtgtataattgccaaagatttctatcccgaaagaactgattgcagtgttcatctcccaactgcaagtgaaggattgataactgaaggcaatggattcagggatatacgaaacaccgataaattataaaaaaagcaatgtgtccgctgtttccgttaataatactattttcgtaactggcggattattcataaataactctaatagcacgatcgtggttaacaatatggaaaaacttgacatttataaagacaaacaatggtcgattatagaaatgcctatggctagggtatatcacggcattgactcgacatttggaatgttatattttgccggaggtctatccgttaccgaacaatatggtaatttagagaaaaacaacgagatatcttgttacaatcctagaacgaataagtggtttgatatttcatatactatttataagatatccatatcatcattgtgtaaactaaataacgtcttctatgtatttagtaaggacattggatatgtggaaaagtatgatggtgcatggaagttagtacatgatcgtctccccgctataaaggcattatcaacttctccttattgattgaaaatgaaaatataaatagtttttatgtatagcagtattaccctatagttttattgcttactactaacatggatacagatgttacaaatgtagaagatatcataaatgaaatagatagagagaaagaagaaatactaaaaaatgtagaaattgaaaataataaaaacattaacaagaatcatccaagtggatatattagagaagcactcgttattaataccagtagtaatagtgattccattgataaagaagttatagaatgtatcagtcacgatgtaggaatatagatcatatctactaatttttataatcgatacaaaacataaaaaacaactcgttattacatagcaggcatggaatccttcaagtattgttttgataacgatggcaagaaatggattatcggaaatactttatattctggtaattcaatactatataaggtcagaaaaaatttcactagttcgttctacaattacgtaatgaagatagatcacaaatcacacaagccattgttgtctgaaatacgattctatatatctgtattggatcctttgactatcgacaactggacacgggaacgtggtataaagtatttggctattccagatctgtatggaattggagaaaccgatgattatatgttcttcgttataaaaaattcgggaagagtattcgccccaaaggatactgaatcagtcttcgaagcatgcgtcactatgataaacacgttagagtttatacactctcgaggatttacccatggaaaaatagaaccgaggaatatactgattagaaataaacgtctttcactaattgactattctagaactaacaaactatacaagagtggaaactcacatatagattacaacgaggacatgataacttcaggaaatatcaattatatgtgtgtagacaatcatcttggagcaacagtttcaagacgaggagatttagaaatgttgggatattgcatgatagaatggttcggtggcaaacttccatggaaaaacgaaagtagtataaaagtaataaaacaaaaaaaagaatataaaaaatttatagctactttctttgaggactgttttcctgaaggaaatgaacctctggaattagttagatatatagaattagtatacacgttagattattctcaaactcctaattatgacagactacgtaaactgtttatacaagattgaaattatattcttttttttatagagtgtggtagtgttacggatatctaatattaatattagactatctctatcgcgctacacgaccaatatcgattactatggatatcttctatgaaaggagagaatgtatttatttctccagcgtcaatctcgtcagtattgacaatactgtattatggagctaatggatccactgctgaacagctatcaaaatatgtagaaacggaggagaacacggataaggttagcgctcagaatatctcattcaaatccatgaataaagtatatgggcgatattctgccgtgtttaaagattcctttttgagaaaaattggcgataagtttcaaactgttgacttcactgattgtcgcactatagatgcaatcaacaagtgtgtagatatctttactgaggggaaaatcaatccactattggatgaaccattgtctcctagcaattagtgccgtatactttaaagcaaaatggttgacgccattcgaaaaggaatttaccagtgattatcccttttacgtatctccgacggaaatggtagacgtaagtatgatgtctatgtacggcaaggcatttaatcacgcatctgtaaaagaatcattcggcaacttttcaatcatagaactgccatatgttggagatactagtatgatggtcattcttccagacaagattgatggattagaatccatagaacaaaatctaacagatacaaattttaagaaatggtgtgactttatggatgctatgtttatagatgttcacattcccaagtttaaggtaacaggctcgtataatctggtggatactctagtaaagtcaggactgacagaggtgttcggttcaactggagattatagcaatatgtgtaatttagatgtgagtgtcgacgctatgatccacaaaacgtatatagatgtcaatgaagagtatacagaagcagctgcagcaacttctgtactagtggcagactgtgcatcaacaattacaaatgagttctgtgcagatcatccgttcatctatgtgattaggcatgttgatggaaaaattcttttcgttggtagatattgctctccgacaactaattgttaaccattttttttaaaaaaaatagaaaaaacatgtggtattagtgcaggtcgttgttcttccaattgcaattggtaagatgacggccaactttagtacccacgtcttttcaccacagcactgtggatgtgacagactgaccagtattgatgacgtcaaacaatgtttgactgaatatatttattggtcgtcctatgcataccgcaacaggcaatgcgctggacaattgtattccacactcctctcttttagagatgatgcggaattagtgttcatcgacattcgcgagctggtaaaaaatatgccgtgggatgatgtcaaagattgtacagaaatcatccgttgttatataccggatgagcaaaaaaccatcagagagatttcggccatcatcggactttgtgcatatgctgctacttactggggaggtgaagaccatcccactagtaacagtctgaacgcattgtttgtgatgcttgagatgctaaattacgtggattataacatcatattccggcgtatgaattgatgagttgtacatcttgacattttcttctttcttccagaaacaaactttttttacccactataaaataaaatgagtatactacctgttatatttttttattcttcattcgttcagacttttaacgcgcctgaatgtatcgacaaagggcaatattttgcatcattcatggagttagaaaacgagccagtaatcttaccatgtccttaaataaatacgctatcatccggatataatatattagatattttatgggaaaaacgaggagcggataatggtagcaatatgctaattctgaacccgacacaatcagactctggtatttatatatgcattaccacgaacgaaacctactgtgacatgatgtcgttaaatttgacaatcgtgtctgtctcagaatcaaatatagattttatctcgtatccacaaatagtaaatgagagatctactggcgaaatggtatgtcccaatattaatgcatttattgctagtaacgtaaacgcagatattatatggagcggacatcgacgccttagaaataagagacttaaacaacggacacctggaattattaccatagaagatgttagaaaaaatgatgctggttattatacatgtgttttagaatatatatacggtggcaaaacatataacgtaaccagaattgtaaaattagaggtacgggataaaataataccttctactatgcaattaccagatggcattgtaacttcaataggtagtaatttgactattgcatgcagagtatcgttgagacctcccacaacggatgcagacgtcttttggataagtaatggtatgtattacgaagaagatgatggggacggaaacggtagaataagtgtagcaaataaaatctatatgaccgataagagacgtgttattacatcccggttaaacattaatcctgtcaaggaagaagatgctacaacgtttacgtgtatggcgtttactattcctagcatcagcaaaacagttactgttagtataacgtgaatgtatgttgttacatttccatgtcaattgagtttataagaatttttatacattatcttccaacaaacaattgacgaacgtattgctatgattaactcccacgatactatgcatattattaatcattaacttgcagactatacctagtgctattttgacatactcatgttcttgtgtaattgcggtatctatattattaaagtacgtaaatctagctatagttttattatttaattttagataatataccgtctccttatttttaaaaattgccacatcctttattaaatcatgaatgggaatttctatgtcatcgttagtatattgtgaacaacaagagcagatatctataggaaagggtggaatgcgatacattgatctatgtagttttaaaacacacgcgaactttgaagaatttatataaatcattccatcgatacatccttctatgttgagatgtatatatccaggaattcgtttattaatatcgggaaatgtataaactaaaacattgcccgaaagcggtgcctctatctgcgttatatccgttcttaacttacaaaatgtaaccaatacctttgcatgacttgttttgttcggcaacgttagtttaaacttgacgaatggattaattacaatagcatgatccgcgcatctattaagtttttttactttaacgcccttgtatgtttttacagagactttatctaaatttctagtgcttgtatgtgttataaatataacgggatatagaaccgaatcacctaccttagatacccaattacattttatcagatccagataataaacaaattttgtcgccctaactaattctatattgttatatattttacaattggttatgatatcatgtaataacttggagtctaacgcgcatcgtcgtacgtttatacaattgtgatttagtgtagtatatctacacatgtatttttccgcactatagtattctggactagtgataaaactatcgttatatctatcttcaatgaactcatcgagatattgctctctgtcatattcatacacctgcataaactttctagacatcttacaatccgtgttattttaggatcatatttacatatttacgggtatatcaaagatgttagattagttaatgggaatcgtctataataatgaatattaaacaattatatgaggacttttaccacaaagcatcataaaaatgagtcgtcgtctgatttatgttttaaatatcaaccgcaaatcaactcataaaatacaagagaatgaaatatatacatattttagtcattgcaatatagaccatacttctacagaacttgattttgtagttaaaaactatgatctaaacagacgacaacctgtaactgggtatactgcactacactgctatttgtataataattactttacaaacgatgtactgaagatattattaaatcatggagtggatgtaacgatgaaaaccagtagcggacgtatgcctgtttatatattgcttactagatgttgtaatatttcacatgatgtagtgatagatatgatagacaaagataaaaaccacttattacatagagactattccaacctattactagagtatataaaatctcgttacatgttattaaaggaagaggatatcgatgagaacatagtatccactttattagataagggaatcgatcctaactttaaacaagacggatatacagcgttacattattattatttgtgtctcgcacacgtttataaaccaggtgagtgtagaaaaccgataacgataaaaaaggccaagcgaattatttctttgtttatacaacatggagctaatctaaacgcgttagataattgtggtaatacaccattccatttgtatcttagtattgaaatgtgtaataatattcatatgactaaaatgctgttgacttttaatccgaatttcgaaatatgtaataatcatggattaacgcctatactatgttatataacttccgactacatacaacacgatattcttgttatgttaatacatcactatgaaacaaatgttggagaaatgccgatagatgagcgtcgtatgatcgtattcgagtttatcaaaacatattctacacgtccggcagattcgataacttatttgatgaataggtttaaaaatataaatatttatacccgctatgaaggaaagacattattacacgtagcatgtgaatataataatacacacgtaatagattatcttatacgtatcaacggagatataaatgcgttaaccgacaataacaaacacgctacacaactcattatagataacaaagaaaattccccatataccattaattgtttactgtatatacttagatatattgtagataagaatgtgataagatcgttggtggatcaacttccatctctacctatctttcgtcgcttatcatactagtcatatcctaaatgttgatcatattccaccaaatgattgtgaaagagattgagattaaatcgtctaacaaacaattagtttttatgacattaacatataataaataaattaatcattattgacttaacgatgacgaaagttatcatcatcttaggattcttaattattaatacaaattcattgtctatgaaatgtgaacaaggtgtctcatattataattcacaagaattaaagtgttgtaaactatgtaagccaggaacatattcagatcatcgatgtgataaatacagcgataccatttgtggacattgtccgagtgacacattcacgtcaatatataatcgttctccttggtgtcatagttgtagaggtccatgtggtactaatcgagtagaggtcacaccttgtacacctaccacaaatagaatctgtcattgtgactcgaatagttattgtctccttaaagcttctgatggtaactgtgttacatgtgctcctaaaacaaaatgtggtcgtgggtatggaaagaaaggagaagatgaaatgggtaataccatttgtaagaaatgtcggaagggtacttattcagatattgtatctgactctgatcaatgtaaaccaatgacaagataagacttactcgcatctactggatagacataaaatatcctcctcgtaataatgaaatataatatacactaattattaatatcaataacaatcgagtattaatatataggtcatttttaaatcccttttgggttccgtcccaaacggcgtttcggtctgcgtcgccgccatggccatgccgagcctctccgcgtgctcctccatcgaggacgacttcaactatggcagctcggtggcgtctgccagcgtgcacatacgaatggcatttctaagaaaagtctacggtatcctttgtctacaatttcttttaacaacggcaacaactgcagtatttttatactttgactgcatgcggacatttatacaagggagtcctgttctaatattggcatcaatgttcggatctataggcttgattttcgcattgactttacacagacataaacatcccctgaatctgtacctgctttgtggatttacactgtcggaatctctaacgctggcctctgttgttactttctatgatgtgcatgtcgttatgcaagctttcatgctgactactgcagcgtttcttgctctgactacatatactctacaatcaaagagagatttcagtaaacttggagcaggattgtttgctgctttgtggattttaattttgtcaggactcttggggatatttgtgcaaaatgagacagtgaagctggtcctgtctgcttttggggcccttgtattctgtggattcattatctatgacacgcactcactaatacataagctctcgcctgaagagtatgtgttagcctctatcaatctctacttggatatcatcaatctgttcttgcatctgttgcagcttttggaagtatctaataagaaataaagtttaaaatagaattaataaaaacatataggtcattttttaaacatggattggaaaccaaggtagttagttaatacacacaagatatatttttttcacatcatccacccatgggtaacaccaaggttgttagttaataatatacaagatattttttctcactctgatccatgtaaaccaaggacgagataagacactctcattcctcatctacaacccattaaaaaaatggaaattaaagccctctattagcatagacggctacaggtctaccttcacaatggcctttccttgtgccaagttcagtccctgtcattgccacgctactaaggactccctgaataccgtggccgacgtcagacattgtctgactgaatacatcctgtgggtttctcatagatggacccatagagaaactgcagggtctctctacaggcttctcatctctttcagaactgatgcaacggagctctttggtggtgagttgaaggattcacttccgtgggacaattgcgtggagatcattaaatgtttcatcagaaatgactccatgaaaaccgccgaagaacttcgtgcaatcattggactttgtactcaatcagctatcgtctctggaagagtcttcaacgataagtatatcgacatactacttatgctgcgaaagattctgaacgagaacgactatctcaccctcttggatcatatccgcactgctaaatactaaatctccactacactttttatcatcttatgaggaatgattgccttcgtgaaataggaataattagcaccagaatagctatggattattgtggtagagagtgcactattctatgtcgtctactggatgaagatgtgacgtacaaaaaaataaaactagaaattgaaacgtgtcacaacttatcaaaacatatagatagacgaggaaacaatgcgctacattgttacgtctccaataaatgcgatacagacattaagattgttctctcgcggagtcgagagactttgtagaaacaacgaaggattaactccgctaggagtatacagtaagcatagatacgtaaaatctcagattgtgcatctactgatatccagctattcaaattcctctaacgaactcaagtcgaatataaatgatttcgatctgtattcggataatatcgacttacgtctgctaaaatacctaattgtggataaacggatacgtccgtccaagaatacgaattatgcaatcaatggtctcggattggtggatatatacgtaacgagagaccagaagtattgctatggcttcttaaatcagaatgttacagcaccggttacgtatttcgtacctgtatgtacgacagtgatatgtgtaagaactctcttcattactatatatcgtctcatagagaatctcaatctctatccaaggatgtaattaaatgtttgatcgataacaatgtttccatccatggcagagacgaaggaggatctttacccatccaatactactggtctttctcaaccatagatatagagattgttaaattattattaataaaggatgtggacacgtgtagagtatacgacgtcagccctatattagaggcgtattatctaaacaagcgatttagagtaaccccatataatgtagacatggaaatcgttaatcttcttattgagagacgtcatactcttgtcgacgtaatgcgtagtattacttcgtacgattccagagaatataaccactacatcatcgataacattctaaagagatttagacaacaggatgtacaagccatgttgataaactacttacattacggcgatatggtcgttcgatgcatgttagataacggacaacaactatcctctgcacgactactttgttaataataatctcgtcgatgtaaacgtcgtaaggtttatcgtggaaaatatggacacgcggctgtaaatcacgtatcgaacaatggccgtctatgtatgtacggtctgatattatcgagatttaataattgcgggtatcactgttatgaaaccatactgatagatgtatttgatatactaagcaagtacatggatgatatagatatgatcgataactctactatattacgcggtcgatgtcaataatatacaatttgcaaagcggttattggaatatggagcgagtgtcacgctcgataatcaatacggccatccagaaaagcagttaccaaagagaaaacaaaacgaagctagttgatttattactgagttaccatcccactctagagactatgattgacgcatttaatagagatatacgctatctatatcctgaaccattattcgcctgtatcagatacgccttaatcctagatgatgattttccttctaaagtaaagtatgatatcgccggtcgtcataaggaactaaagcgctatagagtagacattaatagaatgaagaatgtctacatatcaggcgtctccatgtttgatatattatttaaacgaagcaaacgccacaaattgagatacgcaaagaatccgacatcaaatggtacaaaaaagaactaacgtccatcattacagaaactgtaaagaacaatgagaggatcgactccatagtggacaacattaatacagacgataacttgatttcgaaattacccatggagatactttattactccattaaataatttatcatggagcgataatgtcctgtttcatttgtttccatgacatattacaaaatcgattccgtccaagatgataaaaacatttaccggcatcataaacacggagtttattttatatgtctcgcataaacattactaaaaaaatatattgttcggttttctttcacatctttaattatgaaaaagtaaatcattatgagatggacgagattgtacgcatcgttcgcgacagtatgtggtacatacctaacgtatttatggacgacggtaagaatgaaggtcacgtttctgtcaacaatgtctgtcatatgtattttacgttctttgatgtggatacatcgtctcatctgtttaagctagttattaaacactgcgatctgaataaacgaggtaactctccattacattgctatacgatgaatacacgatttaatccatctgtattaaagatattgttacaccacggcatgcgtaactttgatagcaaggatgaccactatcaatcgataacaagatctttgatatactaacggacaccattgatgactttagtaaatcatccgatctattgctgtgttatcttagatataaattcaatgggagcttaaactattacgttctgtacaaaggatccgaccctaattgcgccgacgaggatgaactcacttctcttcattactactgtaaacacatatccacgttctacgaaagcaattattacaagttaagtcacactaagatgcgagccgagaagcgattcatctacgcgataatagattatggagcaaacattaacgcggttacacacttaccttcaacagtataccaaacatagtcctcgtgtggtgtatgctcttttatctcgaggagccgatacgaggatacgtaataatcttgattgtacacccatcatggaacgattgtgcaacaggtcatattctcataatgttactcaattggcacgaacaaaaggaagaaggacaacatctactttatctattcataaaacataatcaaggatacactctcaatatactacggtatctattagataggttcgacattcagaaagacgaatactataataccgcctttcaaaattgtaacaacaatgttgcctcatacatcggatacgacatcaaccttccgactaaagacggtattcgacttggtgtttgaaaacagaaacatcatatacaaggcggatgttgtgaatgacatcatccaccacagactgaaagtatctctacctatgattaaatcgttgttctacaagatgtctctccctacgacgattactacgtaaaaaagatactagcctactgcctattaagggacgagtcattcgcggaactacatagtaaattctgtttaaacgaggactataaaagtgtatttatgaaaaatatatcattcgataagatagattccatcatcgtgacataagtcgcctcaaagagattcgaatctccgacaccgacctgtatacggtatcacagctatcttaaagccatacattcagacagtcacatttcatttcccatgtacgacgatctcatagaacagtgccatctatcgatggagcgtaaaagtaaactcgtcgacaaagcactcaataaattagagtctaccatcggtcaatctagactatcgtatttgcctccggaaattatgcgcaatatcatctaaacagtatgttgtacggaaagaaccattacaaatattatccatgatagaaagaaaatatctatatgattggagaagtaggaaacaggaacaagacaacgattactacattattaaatcatgaagtccgtattatactcgtatatattgtttctctcatgtataataataaacggaagagatatagcaccgcatgcaccatccgatggaaagtgtaaagacaacgaatacaaacgccataatttgtgtccgggaacatacgcttccagattatgcgatagcaagactaacacacgatgtacgccgtgtggttcgggtaccttcacatctcgcaataatcatttacccgcttgtctaagttgtaacggaagacgcgatcgtgtaacacgactcacaatagaatctgtgaatgctctcccggatattattgtcttctcaaaggatcatccggatgcaaggcatgtgtttcccaaacaaaatgtggaataggatacggagtatccggagacgtcatctgttctccgtgtggtctcggaacatattctcacaccgtctcttccgcagataaatgcgaacccgtacccagtaatacgtttaactatatcgatgtggaaattaatctgtatcccgtcaacgacacgtcgtgtactcggacgaccactaccggtctcagcgaatccatctcaacgtcggaactaactattactatgaatcataaagactgtaatcccgtatttcgtgatggatacttctccgttcttaataaggtagcaacttcaggattctttacaggagaaaggtgtgcactctgaatttcgagattaaatgcaataacaaagattcttcctccaaacagttaacgaaagcaaagaatgatactatcatgccgcattcggagacagtaactctagtgggcgacatctatatactatatagtaataccaatactcaagactacgaaactgatacaatctcttatcatgtgggtaatgttctcgatgtcgatagccatatgcccggtagttgcgatatacataaactgatcactaattccaaacccacccactttttatagtaagtttttcacccataaataataaatacaataattaatttctcgtaaaagtagaaaatatattctaatttattgcgcggtaaggaagtagaatcataaagaacagtactcaatcaatagcaattatgaaacaatatatcgtcctggcatgcatgtgcctggcggcagctgctatgcctgccagtcttcagcaatcatcctcatcctcctcctcgtgtacggaagaagaaaacaaacatcatatgggaatcgatgttattatcaaagtcacaaagcaagaccaaacaccgaccaatgataagatttgccaatccgtaacggaaattacagagtccgagtcagatccagatcccgaggtggaatcagaagatgattccacatcagtcgaggatgtagatcctcctaccacttattactccatcatcggtggaggtctgagaatgaactttggattcaccaaatgtcctcagattaaatccatctcagaatccgctgatggaaacacagtgaatgctagattgtccagcgtgtccccaggacaaggtaaggactctcccgcgatcactcgtgaagaagctcttgctatgatcaaagactgtgaggtgtctatcgacatcagatgtagcgaagaagagaaagacagcgacatcaagacccatccagtactcgggtctaacatctctcataagaaagtgagttacgaagatatcatcggttcaacgatcgtcgatacaaaatgtgtcaagaatctagagtttagcgttcgtatcggagacatgtgcaaggaatcatctgaacttgaggtcaaggatggattcaagtatgtcgacggatcggcatctgaaggtgcaaccgatgatacttcactcatcgattcaacaaaactcaaagcgtgtgtctgaatcgataactctattcatctgaaattggatgagtagggttaatcgaacgattcaggcacaccacgaattaaaaaagtgtaccggacactatattccggtttgcaaaacaaaaatgttcttaactacattcacaaaaagttacctctcgcgacttcttctttttctgtctcaatagtgtgatacgattatgacactattcctattcctattcctattcctatttcctttcagggtatcacaaaaatattaaacctctttctgatggtctcataaaaaaagttttacaaaaatatttttattctctttctctctttgatggtctcataaaaaaagttttacaaaaatatttttattctctttctctctttgatggtctcataaaaaaagttttacaaaaatatttttattctctttctctctttgatggtctcataaaaaaagttttacaaaaatatttttattctctttctctctttgatggtctcataaaaaaagttttacaaaaatatttttattctctttctctctttgatggtctcataaaaaaagttttacaaaaatatttttattctctttctctctttgatggtctcataaaaaaagttttacaaaaatatttttattctctttctctctttgatggtctcataaaaaaagttttacaaaaatatttttattctctttctctctttgatggtctcataaaaaaagttttacaaaaatatttttattctctttctctctttgatggtctcataaaaaaagttttacaaaaatatttttattctctttctctctttgatggtctcataaaaaaagttttacaaaaatatttttattctctttctctctttgatggtctcataaaaaaagttttacaaaaatatttttattctctttctctctttgatggtctcataaaaaaagttttacaaaaatatttttattctctttctctctttgatggtctcataaaaaaagttttacaaaaat

SEQ ID NO: 61 - DNA, 188768 bp, Vaccinia virus
  LIVP 8.1.1 strain
atcaaagagagaaagagaataaaaatatttttgtaaaacttttttatgagaccatcaaagagagaaagagaataaaaatatttttgtaaaactttttttatgagaccatcaaagagagaaagagaataaaaatatttttgtaaaactttttttatgagaccatcaaagagagaaagagaataaaaatatttttgtaaaactttttttatgagaccatcaaagagagaaagagaataaaaatatttttgtaaaactttttttatgagaccatcaaagagagaaagagaataaaaatatttttgtaaaactttttttatgagaccatcaaagagagaaagagaataaaaatatttttgtaaaactttttttatgagaccatcaaagagagaaagagaataaaaatatttttgtaaaactttttttatgagaccatcaaagagagaaagagaataaaaatatttttgtaaaactttttttatgagaccatcaaagagagaaagagaataaaaatatttttgtaaaactttttttatgagaccatcaaagagagaaagagaataaaaatatttttgtaaaactttttttatgagaccatcaaagagagaaagagaataaaaatatttttgtaaaactttttttatgagaccatcaaagagagaaagagaataaaaatatttttgtaaaactttttttatgagaccatcaaagagagaaagagaataaaaatatttttgtaaaactttttttatgagaccatcaaagagagaaagagaataaaaatatttttgtaaaactttttttatgagaccatcaaagagagaaagagaataaaaatatttttgtaaaactttttttatgagaccatcaaagagagaaagagaataaaaatatttttgtaaaactttttttatgagaccatcaaagagagaaagagaataaaaatatttttgtaaaactttttttatgagaccatcaaagagagaaagagaataaaaatatttttgtaaaactttttttatgagaccatcagaaagaggtttaatatttttgtgatactctgaaaggaaataggaataggaataggaatagtgtcataatcgtatcacactattgagacagaaaaagaagaagtcgcgagaggtaactttttgtgaatgtagttaagaacatttttgttttgcaaaccggaatatagtgtccggtacacttttttaattcgtggtgtgcctgaatcgttcgattaaccctactcatccaatttcagatgaatagagttatcgattcagacacacgctttgagttttgttgaatcgatgagtgaagtatcatcggttgcaccttcagatgccgatccgtcgacatacttgaatccatccttgacctcaagttcagatgattccttgcacatgtctccgatacgaacgctaaactctagattcttgacgcattttgtatcgacgatcgttgaaccgatgatatcttcgtaactcactttcttatgagagatgttagacccgagtactggatgggtcttgatgtcgctgtctttctcttcttcgctacatctgatgtcgatagacacttcacagtctttgatcatagcaagagcttcttcatgagtgatcgcgggagagtccttaccttgtcctggggacacgctggacaatctagcattcactgtgtttccatcagcggattctgagatggatttaatctgaggacatttggtgaatccaaagttcattctcagacctccaccgatgatggagtaataagtggtaggaggatctacatcctcgactgatgtggaatcatcttctgattccacctcgggatctggatctgactcggactctgtaatttccgttacggattggcaaatcttatcattggtcggtgtttggtcttgctttgtgactttgataataacatcgattcccatatgatgtttgttttcttcttccgtacacgaggaggaggatgaggatgattgctgaagactggcaggcatagcagctgccgccaggcacatgcatgccaggacgatatattgtttcataattgctattgattgagtactgttctttatgattctacttccttaccgtgcaataaattagaatatattttctacttttacgagaaattaattattgtatttattatttatgggtgaaaaacttactataaaaagtgggtgggtttggaattagtgatcagtttatgtatatcgcaactaccgggcatatggctatcgacatcgagaacattacccacatgataagagattgtatcagtttcgtagtcttgagtattggtattactatatagtatatagatgtcgcccactagagttactgtctccgaatgcggcatgatagtatcattctttgctttcgttaactgtttggaggaagaatctttgttattgcatttaatctcgaaattcagagtgcacacctttctcctgtaaagaaacctgaagtcgctaccttattaagaacggagaagtatccatcacgaaatacgggattacagtctttatgattcatagtaatagttagttccgacgttgagatggattcgctgagaccggtagtggtcgtccgagtacacgacgtgtcgttaactggatacaggttaatttccacatcgatatagttaaacgtatttctgggtacgggttcgcatttatctgcggaagagacggtgtgagaatatgttccgagaccacacggagaacagatgacgtctccggatactccgtatcctattccacattttgtttgggaaacacatgccttgcatccggatgatcctttgagaagacaataatatccgggagagcattcacagattctattgtgagtcgtgttacacgatcgcgtcttccgttacaacttagacaagcgggtaaatgattattgcgagatgtgaaggtacccgaaccacacggcgtacatcgtgtgttagtcttgctatcgcataatctggaagcgtatgttcccggacacaaattatggcgtttgtattcgttgtctttacactttccatcggatggtgcatgcggtgctatatctcttccgtttattattatacatgagagaaacaatatatacgagtataatacggacttcatgatttaataatgtagtaatcgttgtcttgttcctgtttcctacttctccaatcatatagatattttctttctatcatggataatatttgtaatggttctttccgtacaacatactgtttagatgatattgcgcataatttccggaggcaaatacgatagtctagattgaccgatggtagactctaatttattgagtgctttgtcgacgagtttacttttacgctccatcgatagatggcactgttctatgagatcgtcgtacatgggaaatgaaatgtgactgtctgaatgtatggctttaagatagctgtgataccgtatacaggtcggtgtcggagattcgaatctctttgaggcgacttatgtcacgatgatggaatctatcttatcgaatgatatatttttcataaatacacttttatagtcctcgtttaaacagaatttactatgtagttccgcgaatgactcgtcccttaataggcagtaggctagtatcttttttacgtagtaatcgtcgtagggagagacatcttgtagaacaacgatttaatcataggtagagatactttcagtctgtggtggatgatgtcattcacaacatccgccttgtatatgatgtttctgttttcaaacaccaagtcgaataccgtctttagtcggaaggttgatgtcgtatccgatgtatgaggcaacattgttgttacaattttgaaaggcggtattatagtattcgtctttctgaatgtcgaacctatctaatagataccgtagtatattgagagtgtatccttgattatgttttatgaatagataaagtagatgttgtccttcttccttttgttcgtgccaattgagtaacattatgagaatatgacctgttgcacaatcgttccatgatgggtgtacaatcaagattattacgtatcctcgagataaaagagcatacaccacacgaggactatgtttggtatactgttgaaggtaagtgtgtaaccgcgttaatgtttgctccataatctattatcgcgtagatgaatcgcttctcggctcgcatcttagtgtgacttaacttgtaataattgctttcgtagaacgtggatatgtgtttacagtagtaatgaagagaagtgagttcatcctcgtcggcgcaattagggtcggatcctttgtacagaacgtaatagtttaagctcccattgaatttatatctaagataacacagcaatagatcggatgatttactaaagtcatcaatggtgtccgttagtatatcaaagatcttgttatcgattgatagtggtcatccttgctatcaaagttacgcatgccgtggtgtaacaatatctttaatacagatggattaaatcgtgtattcatcgtatagcaatgtaatggagagttacctcgtttattcagatcgcagtgtttaataactagcttaaacagatgagacgatgtatccacatcaaagaacgtaaaatacatatgacagacattgttgacagaaacgtgaccttcattcttaccgtcgtccataaatacgttaggtatgtaccacatactgtcgcgaacgatgcgtacaatctcgtccatctcataatgatttactttttcataattaaagatgtgaaagaaaaccgaacaatatatttttttagtaatgtttatgcgagacatataaaataaactccgtgtttatgatgccggtaaatgtttttatcatcttggacggaatcgattttgtaatatgtcatggaaacaaatgaaacaggacattatcgctccatgataaattatttaatggagtaataaagtatctccatgggtaatttcgaaatcaagttatcgtctgtattaatgttgtccactatggagtcgatcctctcattgttctttacagtttctgtaatgatggacgttagttcttttttgtaccatttgatgtcggattctttgcgtatctcaatttgtggcgtttgcttcgtttaaataatatatcaaacatggagacgcctgatatgtagacattcttcattctattaatgtctactctatagcgctttagttccttatgacgaccggcgatatcatactttactttagaaggaaaatcatcatctaggattaaggcgtatctgatacaggcgaataatggttcaggatatagatagcgtatatctctattaaatgcgtcaatcatagtctctagagtgggatggtaactcagtaataaatcaactagcttcgttttgttttctctttggtaactgcttttctggatggccgtattgattatcgagcgtgacactcgctccatattccaataaccgctttgcaaattgtatattattgacatcgaccgcgtaatatagtagagttatcgatcatatctatatcatccatgtacttgcttagtatatcaaatacatctatcagtatggtttcataacagtgatacccgcaattattaaatctcgataatatcagaccgtacatacatagacggccattgttcgatacgtgatttacagccgcgtgtccatattttccacgataaaccttacgacgtttacatcgacgagattattattaacaaagtagtcgtgcagaggatagttgttgtccgttatctaacatgcatcgaacgaccatatcgccgtaatgtaagtagtttatcaacatggcttgtacatcctgttgtctaaatctctttagaatgttatcgatgatgtagtggttatattctctggaatcgtacgaagtaatactacgcattacgtcgacaagagtatgacgtctctcaataagaagattaacgatttccatgtctacattatatggggttactctaaatcgcttgtttagataatacgcctctaatatagggctgacgtcgtatactctacacgtgtccacatcctttattaataataatttaacaatctctatatctatggttgagaaagaccagtagtattggatgggtaaagatcctccttcgtctctgccatggatggaaacattgttatcgatcaaacatttaattacatccttggatagagattgagattctctatgagacgatatatagtaatgaagagagttcttacacatatcactgtcgtacatacaggtacgaaatacgtaaccggtgctgtaacattctgatttaagaagccatagcaatacttctggtctcggattaggcgtcgttacgtatatatccaccaatccgagaccattgattgcataattcgtattcttggacggacgtatccgtttatccacaattaggtattttagcagacgtaagtcgatattatccgaatacagatcgaaatcatttatattcgacttgagttcgttagaggaatttgaatagctggatatcagtagatgcacaatctgagattttacgtatctatgcttactgtatgctcctagcggagttaatccttcgttgtttctacaaagtctctcgactccgcgagagagtaacagccgaacaatcttaatgtctgtatcgcatttattgaagacgtaacaatgtagcgcattgtttcctcgtctatctatatgttttgataagttgtgacacgtttcaatctctggttttatttttttgtacgtcacatcttcatccagtagacgacatagaatagtgcactctctaccacaataatccatagctattctggtgctaattattcctatttcacgaaggcaatcattcctcataagatgataaaaagtgtagtggagatttagtatttagcagtgcggatatgatccaagagggtgagatagtcgttctcgttcagaatctttcgcagcataagtagtatgtcgatatacttatcgttgaagactctttataaaagtctatttgtttatatttattgcggatagcagtatttccctataaaaagtatacgtcctgtggtgtctttaatcatgtacatgaatggatggtttatgtagaccttcgtacgatataccatcgaaaagttaatcgtaaatactcctgtaacggccgatgcttctgtatactcctcattaacatctataaacgtcgtatgtagaaatttttctacagtgatagtttcattacacatcttgctaaaatctgcataatatccgaatatattagtaagtcctaaattttctaaaatcggtaccagattatacggttctgtcatttccactttaaactttggcatatacaagtctatacttttagtagataacataccacaccattttttaaatttttcatctgttatatttttttctatgttatatataccttctatgtcgtccggtagtataattaccatactagagtttccctcgtatggaatatcgataatagagaatcctccgaataattcattaatatgtacatattgcaagttattctcggtacccaccatcatatcaacgctggtaactatattcttagaaatataaaacttgtctgtatatgtaagatgtttagaaaatggatatttccacattgctttaaaatggacggcgctaacaactgtcatacgagtattaatggatagcggactagtcaataaggaattaattttaccatttgtcattgtcttaacccattcgttgattagttcctttgtttggttagcattattaaagtttacagtttgaaaatcgtcttttattttttgtaggaaggaggcgtggaactcgatactatcgctaccgtatattttatttgcggtagctagtgtcgcacaatacggaatatctacctccatgtcatcattattgtcatcgggtgtattctcattcatattctctatatattttgatagttgttcagctgtagaaccagctgctccatgatttagaatagataaagtagataaaatggaaactggagaaatcaaaacattttcatcagggtgttttaagattagttctttaaagatatccatggtatagacctaacgataacgatatatatcataaataaataatgttaaatttcaatttatgtttgtaccccgtattcatacttaacaaattggtattgcgtacacaatcaatcatattacataccattaataatgcaagcataaaaaattgttagtagatgtttctaaatataggttccgtaagcaaagaatataagaatgaagcggtaatgataaaatcaatcgttatctaaaatgatcatactcatttattttattctattatattaacacatacatttttaacagcaacacattcaatattgtattgttatttttatattatttacacaattaacaatatattattagtttatattactgaattaataatataaaattcccaatcttgtcataaacacagaatccatcaaaaatgttgataaattatctgatgttgttgttcgctgctatgataatcagatcattcgccgatagtggtaacgctatcgaaacgacattgccagaaattacaaacgctacaacagatattccagctatcagattatgcggtccagagggagatggatattgtttacacggtgactgtatccacgctagagatatcgacggtatgtattgtagatgctctcatggttatacaggcattagatgtcagcatgtagtattagtagactatcaacgttcagaaaacccaaacactacaacgtcatatatcccatctcccggtattatgcttgtattagtaggcattattatgtgttgtctattatctgtttataggttcactcgacgaactaaactacctatacaagatatggttgtgccataatttttataaatttttttatgagtatttttacaaaaatgtataaagtgtatgtcttatgtatatttataaaaatgctaagtatgcgatgtatctatgttatttgtatttatctaaacaatacctctacctctagatattatacaaaaattttttatttcggcatattaaagtaaaatctagttaccttgaaaatgaatacagtgggtggttccgtatcaccagtaagaacataatagtcaaatacagtatccgattgagattttgcatacaatactagtctagaaagaaatttgtaatcatcttctgtgacgggagtccatatatctgtatcatcgtctagtttatcagtgtcccatgctatattcctgttatcatcattagttaatgaaaataactctcgtgcttcagaaaagtcaaatattgtatccatacatacatctccaaaactatcgcttatacgtttatctttaacgatacctatacctagatggttatttactaacagacattttccagatctattgactataactcctatagtttccacatcaaccaagtaatgatcatctattgttatataacaataacataactcttttccatttttatcagtatgtatatctatatcaacgtcgtcgttgtagtgaatagtagtcattgatctattatatgaaacggatatgtctagaacggcaattgttttacgtccagttaacactttcgttgatttaaagtctagagtctttgcaaacataatatccttatccgactttatatttcctgtagggtggtataattttattttgcctccacatatcggtgtttccaaatatattactagacaatattccatatagttattagttaagggtacccaattagaacacgtacgcttattatcatcatttggatcgtatttcataaaagttattgtgttatcgatgtcaacacattctacattttttaatcgtctatatagtatttttctgatattttctataatatcagaattgtcttccatcggaagttgtatactatcggaatcagttacatgtttaaataattctctgatgtcattccttatacaatcaaattcattattaaacagtttaatagtctgtagacctttatcgtcgtaaatatccattgtcttattagttacgcttatttttatgtgtttttacgttgctttattatattttataagaatgattgtttgacgaatcacgagaactattaagacacattattaggtatatattataaaaaagtttttgattacgatgttataagaggaaagaggacacattaacatcatacatcaattaactacattcttataacatcgtaatcaaaagaattgcaattttgatgtataacaactgtcaatgggttatggaattgtatattacatattatacggtatgttggtaacgacaaataccggtcggtaattgtctgccggtgtaatagaattatatatatctatctattacaccggccttgtatacataataataagttgtggtagtatgatctccatatttataatttaggactttgtattcagtatttttggaatcataaaaaataaaaaaaagttttactaatttaaaatttaaaaagtatttacatttttttcactgtttagtcgcggatatggaattcgatcctgccaaaatcaatacatcatctatagatcatgtaacaatattacaatacatagatgaaccaaatgatataagactaacagtatgcattatccgaaatattatatcaatatcacaaaaataaatacacatttggctaatcaatttcgggcttggaaaaaacgtatcgccggaagggactatatgactaacttatctagagatacaggaatacaacaatcaaaacttactgaaactatacgtaactgtcaaaaaaatagaaacatatatggtctatatatacactacaatttagttattaattggataaccgatgtgattatcaatcaatattaagagggttggtaaattggtacatagctaataatacctatacacccaataatacaacaaccatttctgagttggatatcatcaaaatactaaataaatacgaggacgtgtatagagtaagtaaagaaaaagaatgtggaatttgctatgaagttgtttactcaaaacgatagatactttggtttattggattcgtgtactcatatattttgcataacatgcatcaatatatggcatagaacacgaagagaaaccggtgcgtcggataattgtcctatatgccgtacccgttttagaaacataacaatgagcaagttctataagctagttaactaataaataaaaagtttaatttgttgacgacgtatgtcgttattttttctcgtataaaagattaatttgattctaatataatctttagtattggataaatatcaattcaaattaattccattagattatatcataaataaaaatagtagcacgcactacttcagccaaatattcttttttgaaacgccatctatcgtagtgaggacacaagtgaacctataattatcaaatttattagtatcagtcacatgaaggactttacgtagagtgacgattccactatctgtggtacgaacggtttcatcttctttgatgccatcacccagatgttctataaacttggtatcctcgtccgatctcatatcctttgccaaccaatacatgtagctaaaattaggcataaatttcacacatcctgaacaatgaaattctccagaagatgttacaatgtctagatttggacatttggtttcaaccgcgttaacatatgagtgaacacacccatacatgaaagcgatgagaaataggattctcatcttgccaaaatatcactagaaaaaatttatttatcagttttaaaggtataaaaaatacttattgttgctcgaatattttgtatttgatggtatacggaagattagaaatgtaggtattatcatcaactgattctatggttttatgtattctatcatgtttcactattgcgttggaaataatatcatacgcttccacatatattttattttgttttaactcataatactcacgtaattctggattattggcatatctatgaataattttagctccatgatcagtaaatattaatgagaacatagtattaccacctaccattatttttttcatctcattcaattcttaattgcaaagatctatataatcattatagcgttgacttatggactctggaatcttagacgatgtacagtcatctataatcatggcatatttaatacattgttttatagcatagtcgttatctacgatgttagatatttctctcaatgaatcaatcacacaatctaatgtaggtttatgacataatagcattttcagcagttcaatgtttttagattcgttgatggcaatggctatacatgtatatccgttatttgatctaatgttgacatctgaaccggattctagcagtaaagatactagagattgtttattatatctaacagccttgtgaagaagtgtttctcctcgtttgtcaatcatgttaatgtctttaagataaggtaggcaaatgtttatagtactaagaattgggcaagcataagacatgtcacaaagacccttttttgtatgtataagtgtaaaaattataacatccatagttggatttacataggtgtccaatcgggatctctccatcatcgagataattgatggcatctcccttccttttttagtagatatttcatcgtgtaagaatcaatattaatatttctaaagtatccgtgtatagcctctttatttaccacagctccatattccactagagggatatcgccgaatgtcatatactcaattagtatatgttggaggacatccgagttcattgttttcaatatcaaagagatggtttccttatcatttctccatagtggtacaatactacacattattccgtgcggctttccattttccaaaaacaatttgaccaaatctaaatctacatctttattgtatctataatcactatttagataatcagccataattcctcgagtgcaacatgttagatcgtctatatatgaataagcagtgttatctattcctttcattaacaatttaacgatgtctatatctatatgagatgacttaatataatattgaagagctgtacaatagtttttatctataaaagacggcttgattccgtgattaattagacatttaacaacttccggacgcacatatgctctcgtatccgactctgaatacagatgagagatgatatacagatgcaatacggtaccgcaatttcgtagttgataatcatcatacgcgtatcagtactcgtcctcataaagaacactgcagccattttctatgaacaaatcaataattttagaaacaggatcattgtcattacataattttctataactgaacgatggttttcacatttaacactcaagtcaaatccatgttctaccaacacctttatcaagtcaacgtctacatttttggatttcatatagctgaatatattaaagttatttatgttgctaaatccagtggcttctagtagagccatcgctatatccttattaactttaacatgtctactatttgtgtattcttctaatggggtaagctgtctccaatttttgcgtaatggattagtgccactgtctagtagtagtttgacgacctcgacattattacaatgctcattaaaaaggtatgcgtgtaaagcattattcttgaattggttcctggtatcattaggatctctgtctttcaacatctgtttaagttcatcaagagccacctcctcattttccaaatagtcaaacattttgactgaatgagctactgtgaactctatacacccacacaactaatgtcattaaatatcatgtcaaaaacttgtacaattattaataaaaataatttagtgtttaaattttaccagttccagattttacacctccgttaatacctccattaaccccactggacgatcctcctccccacattccaccgccaccagatgtataagttttagatcctttattactaccatcatgtccatggataaagacactccacatgccgccactaccccctttagaagacatattaataagacttaaggacaagtttaacaataaaattaatcacgagtaccctactaccaacctacactattatatgattatagtttctatttttacagtaccttgactaaagtttctagtcacaagagcaatactaccaacctacactattatatgattatagtttctatttttataggaacgcgtacgagaaaatcaaatgtctaatttctaacggtagtgttgataaacgattgttatccgcggatacctcctctatcatgtcgtctattttcttactttgttctattaacttattagcattatatattatttgattataaaacttatattgcttattagcccaatctgtaaatatcggattattaacatatcgtttctttgtaggtttatttaacatgtacatcactgtaagcatgtccttaccatttattttaatttgacgcatatccgcaatttctttttcgcagtcggttataaattctatatatgatggatacatgctacatgtgtacttataatcgactaatatgaagtacttgatacatattttcagtaacgatttattattaccacctatgaataagtacctgtgatcgtctaggtaatcaactgttttcttaatacattcgatggttggtaatttactcagaataatttccaatatcttaatatataattctgctatttctgggatatatttatctgccagtataacacaaatagtaatacatgtaaacccatattttgttattatattaatgtctgcgccattatctattaaccattctactaggctgacactatgcgactcaatacaatgataaagtatactacatccatgtttatctattttgtttatatcatcaatatacggcttacaaagttttagtatcgataacacatccaactcacgcatagagaaggtagggaataatggcataatatttattaggttatcatcattgtcattatctacaactaagtttccattttttaaaatatactcgacaactttaggatctctattgccaaatttttgaaaatatttatttatatgcttaaatctatataatgtagctccttcatcaatcatacatttaataacattgatgtatactgtatgataagatacatattctaacaatagatcttgtatagaatctgtatatcttttaagaattgtggatattaggatattattacataaactattacacaattctaaaatataaaacgtatcacggtcgaataatagttgatcaactatataattatcgattttgtgatttttcttcctaaactgtttacgtaaatagttagatagaatattcattagttcatgaccactatagttactatcgaataacgcgtcaaatatttcccgtttaatatcgcatttgtcaagataataatagagtgtggtatgttcacgataagtataataacgcatctctttttcgtgtgaaattaaatagtttattacgtccaaagatgtagcataaccatcttgtgacctagtaataatataataatagagaactgttttacccattctatcatcataatcagtggtgtagtcgtaatcgtaatcgtctaattcatcatcccaattataatattcaccagcacgtctaatctgttctattttgatcttgtatccatactgtatgttgctacatgtaggtattcctttatccaataatagtttaaacacatctacattgggatttgatgttgtagcgtatttttctacaatattaataccatttttgatactatttatttctatacctttcgaaattagtaatttcaataagtctatattgatgttatcagaacatagatattcgaatatatcaaaatcattgatatttttatagtcgactgacgacaataacaaaatcacaacatcgtttttgatattattatttttcttggtaacgtatgcctttaatggagtttcaccatcatactcatataatggatttgcaccactttctatcaatgattgtgcactgctggcatcgatgttaaatgttttacaactatcatagagtatcttatcgttaaccatgattggttgttgatgctatcgcattttttggtttctttcatttcagttatgtatggatttagcacgtttgggaagcatgagctcatatgatttcagtactgtagtgtcagtactattagtttcgatcagatcaatgtctagatctatagaatcaaaacacgataggtcagaagataatgaatatctgtaggcttcttgttgtactgtaacttctcgttttgttagatggttgcatcgtgctttaacatcaatggtacaaattttatcctcgctttgtgtatcatattcgtccctactataaaattgtatattcagattatcatgagatgtgtatacgctaacggtatcaataaacggagcacaccatttagtcataaccgtaatccaaaaatttttaaagtatatcttaacgaaagaagttgtgtcattgtctacggtgtatggtactagatcctcataagtgtatatatctagagtaatgtttaatttattaaatggttgataatatggatcctcatgacaatttcctaagacgaaaataagacataaacacgcaataaatctaatcgaagacatggttactccttaaaaaaatacgaataatcaccttggctatttagtaagtgtcatttaacactatactcatattaatccatggactcataatctctatacgggattaacggatgttctatatacggggatgagtagttctcttctttaactttatactttttactaatcatatttagactgatgtatgggtaatagtgtttgaagagctcgttctcatcatcagaataaatcaatatctctgtttttttgttatacagatgtattacagcctcatatattacgtaatagaacgtgtcatctaccttattaactttcaccgcatagttgtttgcaaatacggttaatcctttgacctcgtcgatttccgaccaatctgggcgtataatgaatctaaactttaatttcttgtaatcattcgaaataatttttagtttgcatccgtagttatcccctttatgtaactgtaaatttctcaacgcgatatctccattaataatgatgtcgaattcgtgctgtatacccatactgaatggatgaacgaataccgacggcgttaatagtaatttactttttcatctttacatattgggtactagttttactatcataagtttataaattccacaagctactatggaataagccaaccatcttagtataccacacatgtcttaaagtttattaattaattacatgttgttttatatatatcgctacgaatttaaagagaaattagtttaggaaaaaaaattatctatctacatcatcacgtctctgtattctacgatagagtgctactttaagatgcgacagatctgtgtcatcaaatatatactccattaaaatgattattccggcagcgaacttgatattggatatatcacaacctttgttaatatctacgacaatagacagcagtcccatggttccataaacagtgagtttatctttctttgaagagatattttgtagagatcttataaaactgtcgaatgacatcgcatttatatctttagctaaatcgtatatgttaccatcgtaatatctaaccgcgtctatcttaaacgtttccatcgctttaaagacgtttccgatagatggtctcatttcatcagtcatactgagccaacaaatataatcgtgtataacatctttgatagaatcagactctaaagaaaacgaatcggctttattatacgcattcatgataaacttaatgaaaaatgtttttcgttgtttaagttggatgaatagtatgtcttaataattgttattatttcattaattaatatttagtaacgagtacactctataaaaacgagaatgacataactaatcataactagttatcaaagtgtctaggacgcgtaattttcatatggtatagatcctgtaagcattgtctgtattctggagctattttctctatcgcattagtgagttcagaatatgttataaatttaaatcgaataacgaacataactttagtaaagtcgtctatattaactcttttattttctagccatcgtaataccatgtttaagatagtatattctctagttactacgatctcatcgttgtctagaatatcacatactgaatctacatccaattttagaaattggtctgtgttacatatctcttctatattattgttgatgtattgtcgtagaaaactattacgtagaccattttctttataaaacgaatatatagtactccaattatctttaccgatatatttgcacacataatccattctctcaatcactacatctttaagattttcgttgttaagatatttggctaaactatataattctattagatcatcaacagaatcagtatatatttttctagatccaaagacgaactctttggcgtcctctataatattcccagaaaagatattttcgtgttttagtttatcgagatctgatctgttcatatacgccatgattgtacggtacgttatgataaccgcataaaataaaaatccattttcatttttaaccaatactattcataattgagattgatgtaatactttgttactttgaacgtaaagacagtacacggatccgtatctccaacaagcacgtagtaatcaaatttggtgttgttaaacttcgcaatattcatcaatttagatagaaacttatactcatcatctgttttaggaatccatgtattattaccactttccaacttatcattatcccaggctatgtttcgtccatcatcgttgcgcagagtgaataattcttttgtattcggtagttcaaatatatgatccatgcatagatcggcaaagctattgtagatgtgatttttcctaaatctaatataaaactcgtttactagcaaacactttcctgatttatcgaccaagacacatatggtttctaaatctatcaagtggtggggatccatagttatgacgcagtaacatatattattacattcttgactgtcgctaatatctaaatatttattgttatcgtattggattctgcatatagatggcttgtatgtcaaagatatagaacacataaccaatttatagtcgcgctttacattctcgaatctaaagttaagagatttagaaaacattatatcctcggatgatgttatcactgtttctggagtaggatatattaaagtctttacagatttcgtccgattcaaataaatcactaaataatatcccacattatcatctgttagagtagtatcattaaatctattatattttatgaaagatatatcactgctcacctctatatttcgtacatttttaaactgtttgtataatatctctctgatacaatcagatatatctattgtgtcggtagacgataccgttacatttgaattaatggtgttccattttacaacttttaacaagttgaccaattcatttctaatagtatcaaactctccatgattaaatattttaatagtatccattttatatcactacggacacaaagtagctgacataaaccattgtataatttttatgttttatgtttattagcgtacacattttggaagttccggcttccatgtatttcctggagagcaagtagatgatgaggaaccagatagtttatatccgtacttgcacttaaagtctacattgtcgttgtatgagtatgatcttttaaacccgctagacaagtatccgtttgatattgtaggatgtggacatttaacaatctgacacgtgggtggatcggaccattctcctcctgaacacaggacactagagttaccaatcaacgaatatccactattgcaactataagttacaacgctcccatcggtataaaaatcctcgtatccgttatgtcttccgttggatatagatggaggggattggcatttaacagattcacaaataggtgcctcgggattccataccatagatccagtagatcctaattcacaatacgatttagattcaccgatcaactgatatccgctattacaagagtacgttatactagagccaaagtctactccaccaatatcaagttggccattatcgatatctcgaggcgatgggcatctccgtttaatacattgattaaagagtgtccatccagtacctgtacatttagcatatataggtcccattttttgctttctgtatccaggtagacatagatattctatagtgtctcctatgttgtaattagcattagcatcagtctccacactattcttaaatttcatattaatgggtcgtgacggaatagtacagcatgatagaacgcatcctattcccaacaatgtcaggaacgtcacgctctccaccttcatatttatttatccgtaaaaatgttatcctggacatcgtacaaataataaaaagcccatatatgttcgctattgtagaaattgtttttcacagttgctcaaaaacgatggcagtgacttatgagttacgttacactttggagtctcatctttagtaaacatatcataatattcgatattacgagttgacatatcgaacaaattccaagtatttgattttggataatattcgtattttgcatctgctataattaagatataatcaccgcaagaacacacgaacatctttcctacatggttaaagtacatgtacaattctatccatttgtcttccttaactatatatttgtatagataattacgagtctcgtgagtaattccagtaattacatagatgtcgccgtcgtactctacagcataaactatactatgatgtctaggcatgggagacttttttatccaacgatttttagtgaaacattccacatcgtttaatactacatatttctcatacgtggtataaactccacccattacatatatatcatcgtttacgaataccgacgcgcctgaatatctaggagtaattaagtttggaagtcttatccatttcgaagtgccgtgtttcaaatattctgccacacccgttgaaatagaaaattctaatcctcctattacatataactttccatcgttaacacaagtactaacttctgattttaacgacgacatattagtaaccgttttccattttttcgttttaagatctacccgcgatacggaataaacatgtctattgttaatcatgccgccaataatgtatagacaattatgtaaaacatttgcattatagaattgtctatctgtattaccgactatcgtccaatattctgttctaggagagtaatgggttattgtggatatataatcagagtttttaatgactactatattatgttttataccatttcgtgtcactggctttgtagatttggatatagttaatcccaacaatgatatagcattgcgcatagtattagtcataaacttgggatgtaaaatgttgatgatatctacatcgtttggatttttatgtatccactttaataatatcatagctgtaacatcctcatgatttacgttaacgtcttcgtgggataagatagttgtcagttcatcctttgataattttccaaattctggatcggatgtcaccgcagtaatattgttgattatttctgacatcgacgcattatatagttttttaattccatatcttttagaaaagttaaacatccttatacaatttgtgaaattaatattatgaatcatagtttttacacatagatctactacaggcggaacatcaattattatggcagcaactagtatcatttctacattgtttatggtgatgtttatcttcttccagcgcatatagtctaatagcgattcaaacgcgtgatagtttataccattcaatataatcgcttcatcctttagatggtgatcctgaatgcgtttaaaaaaattatacggagacgccgtaataatttccttattcacttgtataatttccccattgatagaaaatatcacgctttccattcttaaagtactataagtaattatagtataatgtaaacgtttatatattcaatatttttataaaaatcattttgacattaattcctttttaaatttccgtctatcatctatagaaacgtattctatgaatttataaaatgcttttacgtgtcctatcgtaggcgatagaaccgctaaaaagcctatcgaatttctacaaaagaatctgttatatggtatagggagagtataaaacattaaatgtccgtacttattaaagtattcagtagccaatcctaactctttcgaatacttattaatggctcttgttctgtacgaatctatttttttgaacaacggacctagtggtatatcttgttctatgtatctaaaataatgtctgactagatccgttagtttaatatccgcagtcatcttgtctagaatggcaaatctaactgcgggtttaggctttagtttagtttctatatctacatctatgtctttatctaacaccaaaaatataatagctaatattttattacaatcatccggatattcttctacgatctcactaactaatgtttctttggttatactagtatagtcactatcggacaaataaagaaaatcagatgatcgatgaataatacatttaaattcatcatctgtaagatttttgagatgtctcattagaatattattagggttagtactcattatcattcggcagctattacttattttattatttttcaccatatagatcaatcattagatcatcaaaatatgtttcaatcatcctaaagagtatggtaaatgactcttcccatctaatttctgaacgttcaccaatgtctctagccactttggcactaatagcgatcattcgcttagcgtcttctatattattaactggttgattcaatctatctagcaatggaccgtcggacagcgtcattctcatgttcttaatcaatgtacatacatcgccgtcatctaccaattcatccaacaacataagctttttaaaatcatcattataataggtttgatcgttgtcatttctccaaagaatatatctaataagtagagtcctcatgcttagttaacaactattttttatgttaaatcaattagtacaccgctatgtttaatacttattcatattttagtttttaggattgagaatcaatacaaaaattaatgcatcattaattttagaaatacttagtttccacgtagtcaatgaaacatttgaactcatcgtacaggacgttctcgtacaggacgtaactataaaccggtttatatttgttcaagatagatacaaatccgataactttttttacgaattctacgggatccactttaaaagtgtcataccgggttctttttatttttttaaacagatcaatggtgtgatgttgattaggtcttttacgaatttgatatagaatagcgtttacatattctccataatggtcaatcgccatttgttcgtatgtcataaattctttaattatatgacactgtgtattgtttagttcatccttgttcattgttaggaatctatccaaaatggcaattatactagaactataggtgcgttgtatacacatattgatgtgtctgtttatacaatcaatgctactaccttcgggtaaaattgtagcatcatataccatttctagtactttaggttcattattatccattgcagaggacgtcatgatcgaatcataaaaaaatatattatttttatgttattttgttaaaaataatcatcgaatacttcgtaagatactccttcatgaacataatcagttacaaaacgtttatatgaagtaaagtatctacgatttttacaaaagtccggatgcataagtacaaagtacgcgataaacggaataataatagatttatctagtctatctttttctatagctttcatagttagatacatggtctcagaagtaggattatgtaacatcagcttcgataaaatgactgggttatttagtcttacacattcgctcatacatgtatgaccgttaactacagagtctacactaaaatgattgaacaatagatagtctaccattgtttcgtattcagatagtacagcgtagtacatggcatcttcacaaattatatcattgtctaatagatatttgacgcatcttatggatcccacttcaacagccatcttaaaatcggtagaatcatattgctttcctttatcattaataatttctagaacatcatctctatcataaaagatacaaatattaactgtttgatccgtaataacattgctagtcgatagcaatttgttaataagatgcgctgggctcaatgtcttaataagaagtgtaagaggactatctccgaatttgttttgtttattaacatccgttgatggaagtaaaagatctataatgtctacattcttgactgttttagagcatacaatatggagaggtgtatttccatcatgatctggttttgagggactaattcctagtttcatcatccatgagattgtagaagcttttggattgtctgacataagatgtctatgaatatgatttttgccaaatttatccactatcctggcttcgaatccgatggacattatttttttaaacactctttctgaaggatctgtacacgccaacaacggaccacatccttcttcatcaaccgagttgttaatcttggctccatactgtaccaataaatttattctctctatgacttcatcatctgttcccgagagataatatagaggcgttttatgctgtttatcacacgcgtttggatctgcgccgtgcgtcagcagcatcgcgactattctattattattaattttagaagctatatgcaatggataatttccatcatcatccgtctcatttggagagtatcctctatgaagaagttcttcgacaaatcgttcatctagtcctttaattccacaatacgcatgtagaatgtgataattatttccagaaggttcgatagcttgtagcatattcctaaatacatctaaatttttactattatatttggcataaagagatagataatactcggccgacataatgttgtccattgtagtataaaaattaatatttctatttctgtatatttgcaacaatttactctctataacaaatatcataacttagttcttttatgtcaagaaggcactggtttagttcatctataaatgtcacgccataactaccacgcatgccatactcagaattatgataaagatatttatccttggggtgtaggtaatggggattaatctttgttggatcagtctctaagttaacacatgtcacacatgatccatttatagttatatcacacgatgatgatttatgaattgattccggaagatcgctatcgtattttgtggttccacaattcatttccatacatgttattgtcacactaatattatgatgaactttatctagccgctgagtggtaaacaacagaacagatagtttattatctttaccaacaccctcagccgctgccacaaatctctgatccgtatccatgatggtcatgtttatttctagtccgtatccagtcaacactatgttagcatttctgtcgatatagctttcactcatatgacactcaccaataatagtagaattaatgtcgtaatttacaccaatagtgagttcggcggcaaagtaccaataccggtaatcttgtcgaggaggacatatagtattcttgtattctaccgaatacccgagagatgcgatacaaaagagcaagactaatttgtaaaccatcttactcaaaatatgtaacaatagtacgatgcaatgagtaagacaataggaaatctatcttatatacacataattattctatcaattttaccaattagttagtgtaatgttaacaaaaatgtgggagaatctaattagtttttctttacacaattgacgtacatgagtctgagttccttgtttttgctaattatttcatccaatttattattcttgacgatatcgagatcttttgtataggagtcaaacttgtattcaacatgcttttctataatcattttagctatttcggcatcatccaatagtacattttccagattagcagaatagatattaatgtcgtatttgaacagagcctgtaacatctcaatgtctttattatctatagccaatttaatgtccggaatgaagagaagggaattattggtgtttgtcgacgtcatatagtcgagcaagagaatcatcatatccacgtgtccattttttatagtgatgtgaatacaactaaggagaatagccagatcaaaagtagatggtatctctgaaagaaagtaggaaacaatacttacatcattaagcatgacggcatgataaaatgaagttttccatccagttttcccatagaacatcagtctccaatttttcttaacaaacagttttaccgtttgcatgttaccactatcaaccgcataatacaatgcggtgtttcccttgtcatcaaattgtgaatcatccagtccactgaatagcaaaatctttactattttggtatcttccaatgtggctgcctgatgtaatggaaattcattctctagaagatttttcaatgctccagcgttcaacaacgtacatactagacgcacgttattatcagctattgcataatacaaggcactatgtccatggacatccgccttaaatgtatctttactagagagaaagcttttcagctgcttagacttccaagtattaattcgtgacagatccatgtctgaaacgagacgctaattagtgtatattttttcattttttataattttgtcatattgcaccagaattaataatatctttaatagatctgattagtagatacatggctatcgcaaaacaacatatacacatttaataaaaataatatttattaagaaaattcagatttcacgtacccatcaatataaataaaataatgattccttacaccgtacccatattaaggagattccaccttacccataaacaatataaatccagtaatatcatgtctgatgatgaacacaaatggtgtattaaattccagtttttcaggagatgatctcgccgtagctaccataatagtagatgcctctgctacagttccttgttcgtcgacatctatctttgcattctgaaacattttataaatatataatgggtccctagtcatatgtttaaacgacgcattatctggattaaacatactaggagccatcatttcggctatcgacttaatatccctcttattttcgatagaaaatttagggagtttaagattgtacactttattccctaattgagacgaccaatagtctaattttgcagccgtgatagaatctgtgaaatgggtcatattatcacctattgccaggtacatactaatattagcatccttatacggaaggcgtaccatgtcatattctttgtcatcgattgtgattgtatttccttgcaatttagtaactacgttcatcatgggaaccgttttcgtaccgtacttattagtaaaactagcattgcgtgttttagtgatatcaaacggatattgccatatacctttaaaatatatagtattaatgattgcccatagagtattattgtcgagcatattagaatctactacattagacataccggatctacgttctactatagaattaattttattaaccgcatctcgtctaaagtttaatctatataggccgaatctatgatattgttgataatacgacggtttaatgcacacagtattatctacgaaactttgataagttagatcagtgtacgtatatttagatgttttcagcttagctaatcctgatattaattctgtaaatgctggacccagatctctttttctcaaatccatagtcttcaataattctattctagtattacctgatgcaggcaatagcgacataaacatagaaaacgaataaccaaacggtgagaagacaatattatcatcttgaatatttttatacgctactataccggcattggtaaatccttgtagacgataggcggacgctgaacacgctaacgatagtatcaataacgcaatcatgattttatggtattaataattaaccttatttttatgttcggtataaaaaaattattgatgtctacacatccttttgtaattgacatctatatatccttttgtataatcaactctaatcactttaacttttacagttttccctaccagtttatccctatattcaacatatctatccatatgcatcttaacactctctgccaagatagcttcagagtgaggatagtcaaaaagataaatatatagagcataatcattctcgtatactctgccctttattacatcacccgcattgggcaacgaataacaaaatgcaagcatcttgttaacgggctcgtaaattgggataaaaattatgtttttattgtcttatatctattttattcaagagaatattcaggaatttctttttccggttgtatctcgtcgcagtatatatcatttgtacattgtttcatattttttaatagtttacaccttttagtaggactagtatcgtacaattcatagctgtattttgaattccaatcacgcataaaaatatcttccaattgttgacgaagacctaatccatcatccggtgtaatattaatagatgctccacatgtatccgtaaagtaatttcctgtccaatttgaggtacctatataggccgttttatcggttaccatatatttggcatggtttaccctagaatacggaatgggaggatcagcatctggtacaataaatagctttacttctatatttatgtttttagattttagcatagcgatagatcttaaaaagtttctcatgataaacgaagatcgttgccagcaactaatcaatagcttaacggatacttgtctgtctatagcggatcttcttaattcatcttctatataaggccaaaacaaaattttacccgccttcgaataaataatagggataaagttcataacagatacataaacgaatttactcgcatttctaatacatgacaataaagcggttaaatcattggttctttccatagtacatagttgttgcggtgcagaagcaataaatacagagtgtggaacgccgcttacgttaatactaagaggatgatctgtattataatacgacggataaaagtttttccaattatatggtagattgttaactccaagataccagtatacctcaaaaatttgagtgagatccgctgccaagttcctattattgaagatcgcaatacccaattccttgacctgagttagtgatctccaatccatgttagcgcttcctaaataaatatgtgtattatcagatatccaaaattttgtatgaagaactcctcctaggatatttgtaatatctatgtatcgtacttcaactccggccatttgtagtctttcaacatcctttaatggtttgttagatttattaacggctactctaactcgtactcctcttttgggtaattgtacaatctcgtttaatattatcgtgccgaaattcgtacccacttcatccgataaactccaataaaaagatgatatatctagtgtttttgtggtattggatagaatttccctccacatgttaaatgtagacaaatatactttatcaaattgcatacctataggaatagtttctgtaatcactgcgattgtattatccggattcattttatttgttaaaagaataatcctatatcacttcactctattaaaaatccaagtttctatttctttcatgactgattttttaacttcatccgtttccttatgaagatgatgtttggcaccttcataaatttttatttctctattacaatttgcatgttgcatgaaataatatgcacctaaaacatcgctaatcttattgtttgttccctggagtatgagagtcgggggggtgttaatcttggaaattatttttctaaccttgttggtagccttcaagacctgactagcaaatccagccttaattttttcatgattgactaatgggtcgtattggtatttataaactttatccatatctctagatactgattctggacatagctttccgactggcgcatttggtgtgatggttcccataagtttggcagctagcagattcagtcttgaaacagcatctgcattaactagaggagacattagaatcattgctgtaaacaagtttggattatcgtaagaggctagctcccatggaatgacccaataagtagatttaatagttaccacgtgctgtaccaaagtcatcaatcatcattttttcaccattacttcttccatgtccaatatgatcatgtgagaatactaaaattcctaacgatgatatgttttcagctagttcgtcataacgtccagaatgtttaccagctccatgacttatgaatactaatgccttaggatatgtaataggtttccaatatttacaatatatgtaatcattgtccagattgaacatacagtttgcactcatgattcacgttatataactatcaatattaacagttcgtttgatgatcatattatttttatgttttattgataattgtaaaaacatacaattaaatcaatatagaggaaggagacggctactgtcttttgtgagatagtcatggcgactaaattagattatgaggatgctgttttttactttgtggatgatgataaaatatgtagtcgcgactccatcatcgatctaatagatgaatatattacgtggagaaatcatgttatagtgtttaacaaagatattaccagttgtggaagactgtacaaggaattgatgaagttcgatgatgtcgctatacggtactatggtattgataaaattaatgagattgtcgaagctatgagcgaaggagaccactacatcaattttacaaaagtccatgatcaggaaagtttattcgctaccataggaatatgtgctaaaatcactgaacattggggatacaaaaagatttcagaatctagattccaatcattgggaaacattacagatttgatgaccgacgataatataaacatcttgatactttttctagaaaaaaaattgaattgatgatataggggtcttcataacgcataattattacgttagcattctatatccgtgttaaaaaaaattatcctatcatgtatttgagagttttatatgtagcaaacatgatagctgtgatgccaataagctttagatattcacgcgtgctagtgttagggatggtattatctggtggtgaaatgtccgttatataatctacaaaacaatcatcgcatatagtatgcgatagtagagtaaacatttttatagtttttactggattcatacatcgtctacccaattcggttataaatgaaattgtcgccaatcttacacccaaccccttgttatccattagcatagtattaacttcgttatttatgtcataaactgtaaatgattttgtagatgccatatcatacatgatattcatgtccctattataatcattactaactttatcacaatatatgttgataatatctatatatgatctagtctttgtgggcaactgtctatacaagtcgtctaaacgttgtttactcatatagtatcgaacagccatcattacatggtcccgttccgttgatagataatcgagtatgttagtggacttgtcaaatctatataccatattttctggaagtggatatacatagtcgtgatcaacattattgctagcctcatcttctatatcctgtactataccattatctatatcatctacataatctatgatattattacacataaacatcgacaacatactattgtttattatctaagtcctgttgatccaaacccttgatctcctctatttgtactatctagagattgtacttcttccagttctggataatatatacgttgatagattagctgagctattctatctccagtatttacattaaacgtacattttccattattaataagaatgactcctatgtttcccctataatcttcgtctattacaccacctcctatatcaatgccttttagtgacagaccagacctaggagctattctaccatagcaaatcttaggcatggacatactaatatctgtcttaattaactgtctttctcctggagggatagtataatcgtaagcgctatacaaatcatatccggcagcacccggcgattgcctagtaggagatttagctctgttagtttccttaacaaatctaactggtgagttaatattcatgttgaacataaaactaatattttatttcaaaattatttaccatcccatatattccatgaataagtgtgatgattgtacacttctatagtatctatatacgattcacgataaaatcctcctatcaatagcagtttattatccactatgatcaattctggattatccctcggataaataggatcatctatcagagtccatgtattgctggattcacaataaaattccgcatttctaccaaccaagaataaccttctaccgaacactaacgcgcatgatttataatgaggataataagtggatggtccaaactgccactgatcatgattgggtagcaaatattctgtagttgtatcagtttcagaatgtcctcccattacgtatataacattgtttatggatgccactgctggattacatctaggtttcagaagactcggcatattaacccaagcagcatccccgtggaaccaacgctcaacagatgtgggatttggtagacctcctactacgtataatttattgttagcgggtatcccgctagcatacagtctggggctattcatcggaggaattggaatccaattgtttgatatataatttaccgctatagcattgttatgtatttcattgttcatccatccaccgatgagatatactacttctccaacatgagtacttgtacacatatggaatatatctataatttgatccatgttcataggatactctatgaatggatacttgtatgatttgcgtggttgtttatcacaatgaaatattttggtacagtctagtatccattttacattatttatacctctgggagaaagataatttgacctgattacatttttgataaggagtagcagatttcctaatttatttcttcgctttatataccacttaatgacaaaatcaactacataatcctcatctggaacatttagttcatcgctttctagaataagtttcatagatagataatcaaaattgtctatgatgtcatcttccagttccaaaaagtgtttggcaataaagtttttagtatgacataagagattggatagtccgtattctatacccatcatgtaacactcgacacaatattcctttctaaaatctcgtaagataaagtttatacaagtgtagatgataaattctacagaggttaatatagaagcacgtaataaattgacgacgttatgactatctatatatacctttccagtatacgagtaaataactatagaagttaaactgtgaatgtcaaggtctagacaaaccctcgtaactggatctttatttttcgtgtatttttgacgtaaatgtgtgcgaaagtaaggagataactttttcaatatcgtagaattgactattatattgcctcctatggcatcaataattgttttgaatttcttagtcatagacaatgctaatatattcttacagtacacagtattgacaaatatcggcatttatgtttctttaaaagtcaacatctagagaaaaatgattatctttttgagacataactcccattttttggtattcacccacacgtttttcgaaaaaattagtttttccttccaatgatatattttccatgaaatcaaacggattggtaacattataaatttttttaaatcccaattcagaaatcaatctatccgcgacgaattctatatatgttttcatcatttcacaattcattcctataagtttaactggaagagccgcagtaagaaattcttgttcaatggatactgcatctgttataatagatctaacggtttcttcactcggtggatgcaataaatgtttaaacatcaaacatgcgaaatcgcagtgcagaccctcgtctctactaattagttcgttggaaaacgtgagtccgggcattaggccacgctttttaagccaaaatatggaagcgaatgatccggaaaagaagattccttctactgcagcaaaggcaataagtctctctccataaccggcgctgtcatgtatccacttttgagcccaatcggccttcttttttacacaaggcatcgtttctatggcattaaagagatagtttttttcattactatctttaacataagtatcgatcaaaagactatacatttccgaatgaatgttttcaatggccatctgaaatccgtagaaacatctagcctcggtaatctgtacttctgtacaaaatcgttccgccaaattttcattcactattccgtcactggctgcaaaaaacgccaatacatgttttataaaatatttttcgtctggtgttagtttattccaatcattgatatctttagatatatctacttcttccactgtccaaaatgatgcctctgcctttttatacatgttccagatgtcataatattggattgggaaaataacaaatctatttggatttggtgcaaggatgggttccataactaaattaacaatatcaataaattttttttcagttatctatatgcctgtacttggattttttgtacatcgatatcgccgcaatcactacaataattacaagtattattgatagcattgttattagtactatcataattaaattatctacattcatgggtgctgaataatcgttattatcatcattatcattttgtaattgtgacatcatactagataaatcgtttgcgagattgttgtgggaagcgggcatggaggatgcattatcattattatttaacgccttccatttggattcacaaatgttacgcacattcaacattttatggaaactataattttgtgaaaacaaataacaagaaaactcgtcatcgttcaaatttttaacgatagtaaaccgattaaacgtcgagctaatttctaacgctagcgactctgttggatatgggtttccagatatatatcttttcagttcccctacgtatctataatcatctgtaggaaatggaagatatttccatttatctactgttcctaatatcatatgtggtggtgtagtagaaccattaagcgcgaaagatgttatttcgcatcgtattttaacttcgcaataatttctggttagataacgcactctaccagtcaagtcaatgatattagcctttacagatatattcatagtagtcgtaacgatgactccatcttttagatgcgatactcctttgtatgtaccagaatcttcgtacctcaaactcgatatatttaaacaagttaatgagatattaacgcgttttatgaatgatgatatataaccagaagttttatcctcggtggctagcgctataaccttatcattataataccaactagtgtgattaatatgtgacacgtcagtgtgggtacaaatatgtacattatcgtctacgtcgtattcgatacatccgcatacagccaacaaatataaaatgacaaatactctaacgccgttcgtacccatcttgatgcggtttaataaatgttttgatttcaatttattgtaaaaaaagattcggttttatactgttcgatattctcattgcttatattttcatctatcatctccacacagtcaaatccgtggttagcatgcacctcatcaaccggtaaaagactatcggactcttctatcattataactctagaatatttaatttggtcattattaatcaagtcaattatcttatttttaacaaacgtgagtattttactcattttttataaaaacttttagaaatatacagactctatcgtgtgtctatatcttctttttatatccaatgtatttatgtctgatttttcttcatttatcatatataatggtccaaattctacacgtgcttcggattcatccagatcattaaggttcttataattgtaacatccttctcttccctcttctacatcttccttcttattcttattcttagcgtcacagaatctaccacagcaggatcccatgacgagcgtcatattaaactaatccattttcaattataatatatgattagtaatgaccattaaaataaaaaatattcttcataaccggcaagaaagtgaaaagttcacattgaaactatgtcagtagtatacatcatgaaatgatgatatatatatactctattttggtggaggattatatgatataattcgtggataatcatttttaagacacatttctttattcgtaaatcttttcacgttaaatgagtgtccatattttgcaatttcttcatatgatggcggtgtacgtggacgaggctgctcctgttcttgttgtggtcgccgactgtcgtgtctgcgtttagatccctccattatcgcgattgcgtagatggagtactattttataccttgtaattaaatttttttattaattaaacgtataaaaacgttccgtatctgtatttaagagccagatttcgtctaatagaacaaatagctacagtaaaaataactagaataattgctacacccactagaaaccacggatcgtaatacggcaatcggttttcgataataggtggaacgtatattttatttaaggacttaacaattgtctgtaaaccacaatttgcttccgcggatcctgtattaactatctgtaaaagcatatgttgaccgggcggagccgaacattctccgatatctaatttctgtatatctataatattattaacctccgcatacgcattacagttcttttctagcttggataccgcactaggtacatcgtctagatctattcctatttcctcagcgatagctcttctatccttttccggaagcaatgaaatcacttcaataaatgattcaaccatgagtgtgaaactaagtcgagaattactcatgcatttgttagttattcggagcgcgcaatttttaaactgtcctataacctctcctatatgaatagcacaagtgacattagtagggatagaatgttgagctaatttttgtaaataactatctataaaaagattatacaaagttttaaactctttagtttccgccatttatccagtctgagaaaatgtctctcataataaatttttccaagaaactaattgggtgaagaatggaaacctttaatctatatttatcacagtctgttttggtacacatgatgaattcttccaatgccgtactaaattcgatatctttttcgatttctggatatgtttttaataaagtatgaacaaagaaatggaaatcgtaataccagttatgtttaactttgaaattgttttttattttcttgttaatgattccagccacttgggaaaagtcaaagtcgtttaatgccgatttaatacgttcattaaaaacaaactttttatcctttagatgaattattattggttcattggaatcaaaaagtaagatattatcgggtttaagatctgcgtgtaaaaagttgtcgcaacagggtagttcgtagattttaatgtataacagagccatctgtaaaaagataaactttatgtattgtaccaaagatttaaatcctaatttgatagctaactcggtatctactttatctgccgaatacagtgctaggggaaaaattataatgtttcctctttcatattcgtagttagttctcttttcatgttcgaaaaagtgaaacatgcggttaaaatagtttataacattaatattactgttaataactgccggataaaagtgggatagtaatttcacgaatttgatactgtcctttctctcgttaaacgcctttaaaaaaactttagaagaatatctcaatgagagttcctgaccatccatagtttgtatcaataatagcaacatatgaagaacacgtttatacagagtatgtaaaaatgttaatttatagtttaatcccatggcccacgcacacacgattaattttttttcatctccctttagattgttgtatagaaatttgggtactgtgaactccgccgtagtttccatgggactatataattttgtggcctcgaatacaaattttactacatagttatctatcttaaagactataccatatcctcctgtagatatgtgataaaaatcgtcgtttataggataaaatcgtttatccttttgttggaaaaaggatgaattaatgtaatcattctcttctatctttagtagtgtttccttattaaaattcttaaaataatttaacaatctaactgacggagcccaattttggtgtaaatctaattgggacattatattgttaaaatacaaacagtctcctaatataacagtatctgataatctatggggagacatccattgatattcaggggatgaatcattggcaacacccatttattgtacaaaaagccccaatttacaaacgaaagtccaggtttgatagagacaaacaattaactattttgtctctgtttttaacacctccacagtttttaatttctttagtaatgaaattattcacaatatcagtatcttctttatctaccagagattttactaacttgataaccttggctgtctcattcaatagggtagtaatatttgtatgtgtgatattgatatctttttgaattgtttcttttagaagtgattctttgatggtgccagcatacgaattacaataatgcagaaactcggttaacatgcaggaattatagtaagccaattccaattgttgcctgtgttgtattagagtgtcaatatgagcaatggtgtccttgcgtttctctgatagaatgcgagcagcgattttggcgttatcatttgacgatatttctggaatgacgaatcctgtttctactaactttttggtaggacaaagtgaaacaatcaagaagatagcttctcctcctatttgtggaagaaattgaactcctctagatgatctactgacgatagtatctccttgacagatattggaccgaattacagaagtacctggaatgtaaagccctgaaaccccctcattttttaagcagattgttgccgtaaatcctgcactatgcccaagatagagagctcctttggtgaatccatctctatgtttcagtttaaccaagaaacagtcagctggtctaaaatttccatctctatctaatacagcatctaacttgatgtcaggaactatgaccggtttaatgttatatgtaacattgagtaaatccttaagttcataatcatcactgtcatcagttatgtacgatccaaacaatgtttctaccggcatagtggatacgaagatgctatccatcagaatgtttccctgattagtattttctatatagctattcttctttaaacgattttccaaatcagtaactatgttcatttttttaggagtaggacgcctagccagtatggaagaggattttctagatcctctcttcaacatctttgatctcgatggaatgcaaaaccccatagtgaaacaaccaacgataaaaataatattgtttttcactttttataattttaccatctgactcatggattcattaatatctttataagagctactaacgtataattctttataactgaactgagatatatacaccggatctatggtttccataattgagtaaatgaatgctcggcaataactaatggcaaatgtatagaacaacgaaattatactagagttgttaaagttaatattttctatgagctgttccaataaattatttgttgtgactgcgttcaagtcataaatcatcttgatactatccagtaaaccgtttttaagttctggaatattatcatcccattgtaaagcccctaattcgactatcgaatatcctgctctgatagcagtttcaatatcgacggacgtcaatactgtaataaaggtggtagtattgtcatcatcgtgataaactacgggaatatggtcgttagtaggtacggtaactttacacaacgcgatatataactttccttttgtaccatttttaacgtagttgggacgtcctgcagggtattgttttgaagaaatgatatcgagaacagatttgatacgatatttgttggattcctgattattcactataatataatctagacagatagatgattcgataaatagagaaggtatatcgttggtaggataatacatccccattccagtattctcggatactctattgatgacactagttaagaacatgtcttctattctagaaaacgaaaacatcctacatggactcattaaaacttctaacgctcctgattgtgtctcgaatgcctcgtacaaggatttcaaggatgccatagattctttgaccaacgatttagaattgcgtttagcatctgatttttttattaaatcgaatggtcggctctctggtttgctaccccaatgataacaatagtcttgtaaagataaaccgcaagaaaatttatacgcatccatccaaataaccctagcaccatcggatgatattaatgtattattatagattttccatccacaattattgggccagtatactgttagcaacggtatatcgaatagattactcatgtaacctactagaatgatagttcgtgtactagtcataatatctttaatccaatctaaaaaatttaaaattagattttttacactgttaaagttaacaaaagtattacccgggtacgtggatatcatatatggcattggtccattatcagtaatagctccataaactgatacggcgatggtttttatatgtgtttgatctaacgaggaagaaattcgcgcccacaattcatctctagatatgtatttaatatcaaacggtaacacatcaatttcgggacgcgtatatgtttctaaatttttaatccaaatataatgatgacctatatgccctattatcatactgtcaactatagtacacctagggaacttacgatacatctgtttcctataatcgttaaattttacaaatctataacatgctaaaccttttgacgacagccattcattaatttctgatatggaatctgtattctcgataccgtatcgttctaaagccagtgctatatctccctgttcgtgggaacgctttcgtataatatcgatcaacggataatctgaagtttttggagaataatatgactcatgatctatttcgtccataaacaatctagacataggaattggaggcgatgatcttaattttgtgcaatgagtcgtcaatcctataacttctaatcttgtaatattcatcatcgacataatactatctatgttatcatcgtatattagtataccatgaccttcttcatttcgtgccaaaatgatatacagtcttaaatagttacgcaatatctcaatagtttcataattgttagctgttttcatcaaggtttgtatcctgtttaacatgatggcgttctataacgtctctattttctatttttaattttttaaatttttaacgatttactgtggctagatacccaatctctctcaaatatttttttagcctcgcttacaagctgtttatctatactattaaaactgacgaatccgtgattttggtaatgggttccgtcgaaatttgccgaagtgatatgaacatattcgtcgtcgactatcaacaattttgtattattctgaatagtgaaaaccttcacagatagatcattttgaacacacaacgcatctagacttttggcggttgccatagaatatacgtcgttcttatcccaattaccaactagaagtctgatcttaactcctctattaatggctgcttctataatggagttgtaaatgtcgggccaatagtagctattaccgtcgacacgtgtagtgggaactatggccaaatgttcaatatctatactagtcttagctgacctgagtttatcaataactacatcggtatctagatctctagaatatcccaataggtgttccggagaatcagtaaagaacactccacctataggattcttaatatgatacgcagtgctaactggcaaacaacaagccgcagagcataaattcaaccatgaattttttgcgctattaaaggctttaaaagtatcaaatcttctacgaagatctgtggccagcgggggataatcagaatatacacctaacgttttaatcgtatgtatagatcctccagtaaatgacgcgtttcctacataacatctttcatcatctgacacccaaaaacaaccgagtagtagtcccacattattttttttatctatattaacggttataaaatttatatccgggcagtgactttgtagctctcccagatttcttttccctcgttcatctagcaaaactattattttaatcccttttttagatgcctcttttagtttatcaaaaataagcgctcccctagtcgtactcagaggattacaacaaaaagatgctatgtatatatatttcttagctagagtgataatttcgttaaaacattcaaatgttgttaaatgatcggatctaaaatccatattttctggtagtgtttctaccagcctacattttgctcccgcaggtaccgatgcaaatggccacatttagttaacataaaaacttatacatcctgttctatcaacgattctagaatatcatcggctatatcgctaaaattttcatcaaagtcgacatcacaacctaactcagtcaatatattaagaagttccatgatgtcatcttcgtctatttctatatccgtatccattgtagattgttgaccgattatcgagtttaaatcattactaatactcaatccttcagaatacaatctgtatttcattgtaaatttataggcggtgtatttaagttggtagattttcaattatgtatcaatatagcaacagtagttcttgctcctccttgattctagcatcctcttcattattttcttctacgtacataaacatgtccaatacgttagacaacacaccgacgatggcggccgctacagacacgaatatgactagaccgatgaccatttaaaaacccctctctagctttcacttaaactgtatcgatcattcttttagcacatgtataatataaaaacattattctatttcgaatttaggcttccaaaaatttttcatccgtaaaccgataataatatatatagacttgttaatagtcggaataaatagattaatgcttaaactatcatcatctccacgattagagatacaatatttacattctttttgctgtttcgaaactttatcaatacacgttaatacaaacccaggaaggagatattgaaactgaggctgttgaaaatgaaacggtgaatacaataattcagataatgtaaaatcatgattccgtattctgatgatattagaactgctaatggatgtcgatggtatgtatctaggagtatctattttaacaaagcatcgatttgctaatatacaattatcattttgattaattgttattttattcatattcttaaaaggtttcatatttatcaattcttctacattaaaaatttccatttttaatttatgtagccccgcaatactcctcattacgtttcattttttgtctataatatccattttgttcatctcggtacatagattatccaattgagaagcgcatttagtagttttgtacattttaagtttattgacgaatcgtcgaaaactagttatagttaacattttattatttgataccctgatattaatacccctgccgttactattatttataactgatgtaacccacgtaacattagaattaattatcgatagtaatgcatcaacgcttccaaaattgtctattataaactcaccgataatttttttattgcatgttttcatattcattaggattatcaaatctttaatcttattacgattgtatgcgttgatattacaagacgtcattctaaaagacggaggatttccatcaaatgccagacaatcacgtacaaagtacatggaaataggttttgttctattgcgcatcatagatttatatagaacacccgtagaaatactaatttgttttactctataaaatactaatgcatctatttcatcgttttgtataacgtctttccaagtgtcaaattccaaatttttttcattgatagtaccaaattcttctatctctttaactacttgcatagataggtaattacagtgatgcctacatgccgttttttgaaactgaatagatgcgtctagaagcgatgctacgctagtcacaatcaccactttcatatttagaatatatatatgtaaaaatatagtagaatttcattttgttttttctatgctataaatgaattctcattttgcatctgctcatactccgttttatatcaataccaaagaaggaagatatctggttctaaaagccgttaaagtatgcgatgttagaactgtagaatgcgaaggaagtaaagcttcctgcgtactcaaagtagataaaccctcatcacccgcgtgtgagagaagaccttcgtccccgtccagatgcgagagaatgaataaccctggaaaacaagttccgtttatgagaacggacatgctacaaaatatgttcgcggctaatcgcgataatgtagcttctagacttttgtcctaaaatacaattatatccttttcgatattaataaatccgtgtcgtccaggttttttatctctttcagtatgtgaatagataggtattttatctctattcatcatcgaatttaagagatccgataaacattgtttgtattctccagatgtcagcatctgatacaacaatatatgtgcacataaacctctggcacttatttcatgtaccttccccttatcactaaggagaatagtatttgagaaatatgtatacatgatattatcatgaattagatatacagaatttgtaacactctcgaaatcacacgatgtgtcggcgttaagatctaatatatcactcgataacacattttcatctagatacactagacattttttaaagctaaaatagtctttagtagtaacagtaactatgcgattattttcatcgatgatacatttcatcggcatattattacgcttaccatcaaagactataccatgtgtatatctaacgtattctagcatggttgccatacgcgcattaaacttttcaggatctttggatagatcttccaatctatctatttgagaaaacatttttatcatgttcaatagttgaaacgtcggatccactatatagatattatctataaagattttaggaactacgttcatggtatcctggcgaatattaaaactatcaatgatatgattatcgttttcatcttttatcaccatatagtttctaagatatgggattttacttaatataatattatttcccgtgataaattttattagaaaggccaaatctataagaaaagtcctagaattagtctgaagaatatctatatcgccgtatagtatatttggattaattagatatagagaatatgatccgtaacatatacaacttttattatggcgtctaagatattcttccatcaacttattaacatttttgactagggaagatacattatgacgtcccattacttttgccttgtctattactgcgacgttcatagaatttagcatatctcttgccaattcttccattgatgttacattataagaaattttagatgaaattacatttggagctttaatagtaagaactcctaatatgtccgtgtatgtggtcactaatacagattgtagttctataatcgtaaataatttacctatattatatgtttgagtctgtttagaaaagtagctaagtatacgatcttttatttctgatgcagatgtattaacatcggaaaaaaatctttttttattcttttttactaaagatacaaatatgtctttgttaaaaacagttattttctgaatatttctagcttgtaattttaacatatgatattcgttcacactaggtactctgcctaaataggtttctataatctttaatgtaatattaggaaaagtattctgatcaggattcctattcattttgaggatttaaaactctgattattgtctaatatggtctctacgcaaactttttcacagagcgatagagtttttgataactcgtttttcttaagaaatataaaactactgtttccagagctcgctctatcttttattttatctaattcgatacaaactcctgatactggttcagaaagtaattcattaattttcagtcctttatagaagatatttaatatagataatacaaaatcttcagtttttgatatcgatctgattgatcctagaactagatatattaataacgtgctcattaggcagtttatggcagcttgataattagatatagtatattccagttcatatttattagataccgcattgcccagattttgatattctatgaattcctctgaaaataaatccaaaataactagacattctattttttgtggattagtgtactctcttccctctatcatgttcactactggtgtccacgatgataaatatctagagggaatataatatagtccataggatgccaatctagcaatgtcgaataactgtaatttgattcttcgttcttcattatgaattgattcttgaggtataaacctaacacaaattatattattagacttttcgtatgtaatgtctttcatgttataagtttttaatcctggaatagaatctattttaatgaggcttttaaacgcagagttctccaacgagtcaaagcataatactctgttgtttttcttatatacgatgttacgattttcttctttgaatggaataggtttttgaattagtttataattacaacataatagataaggaagtgtgcaaatagtacgcggaaaaaacataatagctcccctgttttcatccatggttttaagtaaatgatcactggcttctttagtcaatggatattcgaacattaaccgtttcatcatcattggacagaatccatattttttaatgtaaagagtgatcaaatcattgtgtttattgtaccatcttgttgtaaatgtgtattcggttatcggatctgctcctttttctattaaagtatcgatgtcgatctcgtctaagaattcaactatatcgacatatttcatttgtatacacataaccattactaacgtagaatgtataggaagagatgtaacgggaacagggtttgttgattcgcaaactattctaatacataattcttctgttaatacgtcttgcacgtaatctattatagatgccaagatatctatataattattttgtaagatgatgttaactatgtgatctatataagtagtgtaataattcatgtatttcgatatatgttccaactctgtctttgtgatgtctagtttcgtaatatctatagcatcctcaaaaaatatattcgcatatattcccaagtcttcagttctatcttctaaaaaatcttcaacgtatggaatataataatctattttacctcttctgatatcattaatgatataatttttgacactatcttctgtcaattgattcttattcactatatctaagaaacggatagcgtccctaggacgaactactgccattaatatctctattatagcttctggacataattcatctattataccagaattaatgggaactattccgtatctatctaacatagttttaagaaagtcagaatctaagacctgatgttcatatattggttcatacatgaaatgatctctattgatgatagtgactatttcattctctgaaaattggtaactcattctatatatgctttccttgttgatgaaggatagaatatactcaatagaatttgtaccaacaaactgttctcttatgaatcgtatatcatcatctgaaataatcatgtaaggcatacatttaacaattagagacttgtctcctgttatcaatatactattcttgtgataatttatgtgtgaggcaaatttgtccacgttctttaattttgttatagtagatatcaaatccaatggagctacagttcttggcttaaacagatatagtttttctggaacaaattctacaacattattataaaggactttgggtagataagtgggatgaaatcctattttaattaatgcgatagccttgtcctcgtgcagatatccaaacgcttttgtgatagtatggcattcattgtctagaaacgctctacgaatatctgtgacagatatcatctttagagaatatactagtcgcgttaatagtactacaatttgtattttttaatctatctcaataaaaaaattaatatgtatgattcaatgtataactaaactactaactgttattgataactagaatcagaatctaatgatgacgtacccaagaagtttatctactgccaatttagctgcattatttttagcatctcgtttagattttccatctgccttatcgaatactcttccgtcgatatctacacaggcataaaatgtaggagagttactaggcccaactgattcaatacgaaaagaccaatctctcttagttatttggcagtactcattaataacggtgacagggttagcatctttccaatcaataatttttttagccggaataacatcatcaaaagacttatgatcctctctcattgatttttcgcgggatacatcatctattatgacgtcagccataacatcagcatccggcttatccgcctccgttgtcataaaccaacgaggaggaatatcgtcggagctgtacaccatagcactacgttgaagatcgtacagagctttattaacttctcgcttctccatattaagttgtctagttagttgtgcagcagtagctccttcgattccaatggttttaatagcctcacacacaatctctgcgttagaacgttcgtcgatatagattttagacatttttagagagaactaacacaaccagcaataaaactgaacctactttatcatttttttattcatcatcctctggtggttcgtcgttcctatcaaatgtagctctgattaacccgtcatctataggtgatgctggttctggagattctggaggagatggattattatctggaagaatctctgttatttccttgttttcatgtatcgattgcgttgtaacattaagattgcgaaatgctctaaatttgggaggcttaaagtgttgtttgcaatctctacacgcgtgtctaactagtggaggttcgtcagctgctctagtttgaatcatcatcggcgtagtattcctacttttacagttaggacacggtgtattgtatttctcgtcgagaacgttaaaataatcgttgtaactcacatcctttattttatctatattgtattctactcctttcttaatgcattttataccgaataagagatagcgaaggaattctttttcggtgccgctagtacccttaatcatatcacatagtgttttatattccaaatttgtggcaatagacggtttatttctatacgatagtttgtttctggaatcctttgagtattctataccaatattattctttgattcgaatttagtttcttcgatattagattttgtattacctatattcttgatgtagtactttgatgatttttccatggcccattctattaagtcttccaagttggcatcatccacatattgtgatagtaattctcggatatcagtagcggctaccgccattgatgtttgttcattggatgagtaactactaatgtatacattttccatttataacacttatgtattaactttgttcatttatattttttcattattatgttgatattaacaaaagtgaatatatatatatgttaataattgtattgtggttatacggctacaattttataatgagtgaaagtcagtgtccgatgatcaatgacgatagctttactctgaaaagaaagtatcaaatcgatagtgcggagtcaacaataaaaatggataagaagaggataaagtttcagaatagagccaaaatggtaaaagaaataaatcagacaataagagcagcacaaactcattacgagacattgaaactaggatacataaaatttaagagaatgattaggactactactctagaagatatagcaccatctattccaaataatcagaaaacttataaactattctcggacatttcagccatcggcaaagcatcacagaatccgagtaagatggtatatgctctgctgctttacatgtttcccaatttgtttggagatgatcatagattcattcgttatagaatgcatccaatgagtaaaatcaaacacaagatcttctctcctttcaaacttaatcttattagaatattagtggaagaaagattctataataatgaatgcagatctaataaatggaaaataattggaacacaagttgataaaatgttgatagctgaatctgataaatatacaatagatgcaaggtataacctaaaacccatgtatagaatcaagggagaatctgaagaagataccctcttcatcaaacagatggtagaacaatgtgtgacatcccaggaattggtggaaaaagtgttgaagatactgtttagagatttgttcaagagtggagaatacaaagcgtacagatacgatgatgatgtagaaaatggattcattggattggatacactaaaattaaacattgttcatgatatagttgaaccatgtatgcctgttcgtaggccagtggctaagatactgtgtaaagaaatggtaaataaatactttgagaatccgctacatattattggtaaaaatcttcaagagtgcattgactttgttagtgaataggcatttcatctttctccaatactaattcaaattgttaaattaataatggatagtataaatagttattagttataagatagtaaaaataattattagaataagagtgtagtatcatagataactctcttctataaaaatggattttattcgtagaaagtatcttatatacacagtagaaaataatatagattttttaaaggatgatacattaagtaaagtaaacaattttaccctcaatcatgtactagctctcaagtatctagttagcaattttcctcaacatgttattactaaggatgtattagctaataccaatttttttgttttcatacatatggtacgatgttgtaaagtgtacgaagcggttttacgacacgcatttgatgcacccacgttgtacgttaaagcattgactaagaattatttatcgtttagtaacgcaatacaatcgtacaaggaaaccgtgcataaactaacacaagatgaaaaatttttagaggttgccgaatacatggacgaattaggagaacttataggcgtaaattatgacttagttcttaatccattatttcacggaggggaacccatcaaagatatggaaatcatttttttaaaactgtttaagaaaacagacttcaaagttgttaaaaaattaagtgttataagattacttatttgggcatacctaagcaagaaagatacaggcatagagtttgcggataatgatagacaagatatatatactctatttcaacaaactggtagaatcgtccatagcaatctaacagaaacgtttagagattatatctttcccggagataagactagctattgggtgtggttaaacgaaagtatagctaatgatgcggatatcgttcttaatagacccgccattaccatgtatgataaaattcttagttatatatactctgagataaaacaaggacgcgttaataaaaacatgcttaagttagtttatatctttgagcctgaaaaagatatcagagaacttctgctagaaatcatatatgatattcctggagatatcctatctattattgatgcaaaaaacgacgattggaaaaaatattttattagtttttataaagctaattttattaacggtaatacatttattagtgatagaacgtttaacgaggacttattcagagttgttgttcaaatagatcccgaatatttcgataatgaacgaattatgtctttattctctacgagtgctgcggacattaaacgatttgatgagttagatattaataacagttatatatctaatataatttatgaggtgaacgatatcacattagatacaatggatgatatgaagaagtgtcaaatctttaacgaggatacgtcgtattatgttaaggaatacaatacatacctgtttttgcacgagtcggatcccatggtcatagagaacggaatactaaagaaactgtcatctataaaatccaagagtagacggctgaacttgtttagcaaaaacattttaaaatattatttagacggacaattggctcgtctaggtcttgtgttagatgattataaaggagacttgttagttaaaatgataaaccatcttaagtctgtggaggatgtatccgcattcgttcgattttctacagataaaaaccctagtattcttccatcgctaatcaaaactattttagctagttataatatttccatcatcgtcttatttcaaaggtttttgagagataatctatatcatgtagaagaattcttggataaaagcatccatctaaccaagacggataagaaatatatacttcaattgataagacacggtagatcatagaacagaccaaatatattattaataatttgtatatacatagatataattatcacacatttttgataaatgggaactgctgcaacaattcagactcccaccaaattaatgaataaagaaaatgcagaaatgattttggaaaaaattgttgatcatatagttatgtatattagtgacgaatcaagtgattcagaaaataatcctgaatatattgattttcgtaacagatacgaagactatagatctctcattataaaaagtgatcacgagtttgtaaagctatgtaaaaatcatgcggagaaaagttctccagaaacgcaacaaatgattatcaaacacatatacgaacaatatcttattccagtatctgaagtactattaaaacctataatgtccatgggtgacataattacatataacggatgtaaagacaatgaatggatgctagaacaactctctaccctaaactttaacaatctccgcacatggaactcatgtagcataggcaatgtaacgcgtctgttttatacattttttagttatctgatgaaagataaactaaatatataagtataatcccattctaatactttaacctgatgtattagcatcttattagaatattaacctaactaaaagacataacataaaaactcattacatagttgataaaaagcggtaggatataaatattatggctgccaccgttccgcgttttgacgacgtgtacaaaaatgcacaaagaagaattctagatcaagaaacattttttagtagaggtctaagtagaccgttaatgaaaaacacatatctatttgataattacgcgtatggatggataccagaaactgcaatttggagtagtagatacgcaaacttagatgcaagtgactattatcccatttcgttgggattacttaaaaagttcgagtttctcatgtctctatataaaggtcctattccagtatacgaagaaaaagtaaatactgaattcattgctaatggatctttctccggtagatacgtatcatatcttagaaagttttctgctcttccaacaaacgagtttattagttttttgttactgacttccattccaatctataatatcttgttctggtttaaaaatactcagtttgatattactaaacacacattattcagatacgtctatacagataatgccaaacacctggcgttggctaggtatatgtatcaaacaggagactataagcctttgtttagtcgtctcaaagagaattatatatttaccggtcccgttccaatatgtatcaaagatatagatcaccctaatcttagtagagcaagaagtccatccgattatgagacattagctaatattagtactatattgtactttaccaagtatgatccggtattaatgtttttattgttttacgtacctgggtattcaattactacaaaaattactccagccgtagaatatctaatggataaactgaatctaacaaagagcgacgtacaactgttgtaaattattttatgcttcgtaaaatgtaggttttgaaccaaacattctttcaaagaatgagatgcataaaactttattatccaatagattgactatttcggacgtcaatcgtttaaagtaaacttcgtaaaatattctttgatcactgccgagtttaaaacttctatcgataattgtctcatatgttttaatatttacaagttttttggtccatggtacattagccggacaaatatatgcaaaataatatcgttctccaagttctatagtttctggattatttttattatattcagtaaccaaatacatattagggttatctgcggatttataatttgagtgatgcattcgactcaacataaataattctagaggagacgatctactatcaaattcggatcgtaaatctgtttctaaagaacggagaatatctatacatacctgattagaattcatccgtccttcagacaacatctcagacagtctggtcttgtatgtcttaatcatattcttatgaaacttggaaacatctcttctagtttcactagtacctttattaattctctcaggtacagattttgaattcgacgatgccgagtatttcatcgttgtatatttcttcttcgattgcataatcagattcttatataccgcttcaaactctattttaaaattattaaacaatactctattattaatcagtcgttctaactctttcgctatttctatagacttatcgacatcttgactgtctatctctgtaaacacggagtcggtatctccatacacgctacgaaaacgaaatctgtaatctataggcaacgatgttttcacaatcggattaatatctctatcgtccatataaaatggattacttaatggattggcaaaccgtaacataccgttagataactctgctccatttagtaccgattctagatacaagatcattctacgtcctatggatgtgcaactcttagccgaagcgtatgagtatagagcactatttctaaatcccatcagaccatatactgagttggctactatcttgtacgtatattgcatggaatcatagatggccttttcagttgaactggtagcctgttttagcatctttttatatctggctctctctgccaaaaatgttcttaatagtctaggaatggttccttctatcgatctatcgaaaattgctatttcagagatgaggttcggtagtctaggttcacaatgaaccgtaatatatctaggaggtggatatttctgaagcaatagctgattatttatttcttcttccaatctattggtactaacaacgacaccgactaatgtttccggagatagatttccaaagatacacacattaggatacagactgttataatcaaagattaatacattattactaaacattttttgttttggagcaaataccttaccgccttcataaggaaacttttgttttgtttctgatctaactaagatagttttagtttccaacaatagctttaacagtggacccttgatgactgtactcgctctatattcgaataccatggattgaggaagcacatatgttgacgcacccgcgtctgtttttgtttctactccataatactcccacaaatactgacacaaacaagcatcatgaatacagtatctagccatatctaaagctatgtttagattataatccttatacatctgagctaaatcaacgtcatcctttccgaaagataatttatatgtatcattaggtaaagtaggacataatagtacgactttaaatccattttcccaaatatctttacgaattactttacatataatatcctcatcaacagtcacataattacctgtggttaaaacctttgcaaatgcagcggctttgcctttcgcgtctgtagtatcgtcaccgatgaacgtcatttctctaactcctctatttaatactttacccatgcaactgaacgcgttcttggatatagaatccaatttgtacgaatccaatttttcaaatttttgaatgaatgaatatagatcgaaaaatatagttccattattgttattaacgtgaaacgtagtattggccatgccgcctactcccttatgactagactgatttctctcataaatacagagatgtacagcttcctttttgtccggagatctaaagataatcttctctcctgttaataactctagacgattagtaatatatctcagatcaaagttatgtccgttaaaggtaacgacgtagtcgaacgttagttccaacaattgtttagctattcgtaacaaaactatttcagaacatagaactagttctcgttcgtaatccatttccattagtgactgtatcctcaaacatcctctatcgacggcttcttgtatttcctgttccgttaacatctcttcattaatgagcgtaaacaataatcgtttaccacttaaatcgatataacagtaacttgtatgcgagattgggttaataaatacagaaggaaacttcttatcgaagtgacactctatatctagaaataagtacgatcttgggatatcgaatctaggtatttttttagcgaaacagttacgtggatcgtcacaatgataacatccattgttaatctttgtcaaatattgctcgtccaacgagtaacatccgtctggagatatcccgttagaaatataaaaccaactaatattgagaaattcatccatggtggcattttgtatgctgcgtttctttggctcttctatcaaccacatatctgcgacggagcattttctatctttaatatctagattataacttattgtctcgtcaatgtctatagttctcatctttcccaacggcctcgcattaaatggaggaggagacaatgactgatatatttcgtccgtcactacgtaataaaagtaatgaggaaatcgtataaatacggtctcaccatttcgacatctggatttcagatataaaaatctgttttcaccgtgactttcaaaccaattaatgcaccgaacatccatttatagaatttagaaatatattttcatttaaatgaatcccaaacattggggaagagccgtatggaccattatttttatagtactttcgcaagcgggtttagacggcaacatagaagcgtgtaaacgaaaactatatactatagttagcactcttccatgtcctgcatgtagacggcacgcgactatcgctatagaggacaataatgtcatgtctagcgatgatctgaattatatttattattttttcatcagattatttaacaatttggcatctgatcccaaatacgcgatcgatgtgacaaaggttaaccctttataaacttaacccattataaaacttatgattagtcacaactgaaataaccgcgtgattattttttggtataattctacacggcatggtttctgtgactatgaattcaacccccgttacattagtgaaatctttaacaaacagcaagggttcgtcaaagacataaaactcattgtttacaatcgaaatagaccccctatcacacttaaaataaaaaatatccttatcctttaccaccaaataaaattctgattggtcaatgtgaatgtattcacttaacagttccacaaatttatttattaactccgaggcacatacatcgtcggtattttttatggcaaactttactcttccagcatccgtttctaaaaaaatattaacgagttccatttatatcatccaatattattgaaatgacgttgatggacagatgatacaaataagaaggtacggtacctttgtccaccatctcctccaattcatgctctattttgtcattaactttaatgtatgaaaacagtacgccacatgcttccatgacagtgtgtaacactttggatacaaaatgtttgacattagtataattgttcaagactgtcaatctataatagatagtagctataatatattctatgatggtattgaagaagatgacaaccttggcatattgatcatttaacacagacatggtatcaacagatagcttgaatgaaagagaatcagtaattggaataagcgtcttctcgatagagtgtccgtataccaacatgtctgatattttgatgtattccattaaattatttagttttttctttttattctcgttaaacagcatttctgtcaacggaccccaacatcgttgaccgattaagttttgattgatttttccgtgtaaggcgtatctagtcagatcgtatagcctatccaataatccatcatctgtgcgtagatcacatcgtacactttttaattctctatagaagagcgacagacatctggagcaattacagacagcaatttctttattctctacagatgtaagatacttgaagacattcctatgatgatgcagaattttggataacacggtattgatggtatctgttaccataattcctttgatggctgatagtgtcagagcacaagatttccaatctttgacaatttttagcaccattatctttgttttgatatctatatcagacagcatggtgcgtctgacaacacagggattaagacggaaagatgaaatgattctctcaacatcttcaatagataccttgctattttttctggcattatctatatgtgcgagaatatcctctagagaatcagtatcctttttgatgatagtggatctcaatgacatgggacgtttaaaccttcttattctatcaccagattgcatggtgatttgtcttctttcttttatcataatgtaatctctaaattcatcggcaaattgtctatatctaaaatcataatatgagatgtttacctctacaaatatctgttcgtccaatgttagagtatttacatcagttttgtattccaaattaaacatggcaacggatttaattttatattcctctattaagtcctcgtcgataataacagaatgtagataatcatttaatccatcgtacatggttggaagatgcttgttgacaaaatctttaattgtcttgatgaaggtgggactatatctaacatcttgattaataaaatttataacattgtccataggatactttgtaactagttttatacacatctcttcatcggtaagtttagacagaatatcgtgaacaggtggtatattatattcatcagatatacgaagaacaatgtccaaatctatattgtttaatatattatatagatgtagcgtagctcctacaggaatatctttaactaagtcaatgatttcatcaaccgttagatctattttaaagttaatcatataggcattgatttttaaaaggtatgtagccttgactacattctcattaattaaccattccaagtcactgtgtgtaagaagattatattctatcataagcttgactacatttggtcccgataccattaaagaattcttatgatataaggaaacagcttttaggtactcatctactctacaagaattttggagagccttaacgatatcagtgacgtttattatttcaggaggaaaaaacctaacattgagaatatcggaattaatagcttccagatacagtgattttggcaatagtccgtgtaatccataatccagtaacacgagctggtgcttgctagacaccttttcaatgtttaatttttttgaaataagctttgataaagccttcctcgcaaattccggatacatgaacatgtcggcgacatgattaagtattgttttttcattatttttatattttctcaacaagttctcaataccccaatagatgatagaatatcacccaatgcgtccatgttgtctatttccaacaggtcgctatatccaccaatagaagtttttccaaaaaagattctaggaacagttctaccaccagtaatttgttcaaaatagtcacgcaattcattttcgggtttaaattctttaatatcgacaatttcatacgctcctcttttgaaactaaacttatttagaatatccagtgcatttctacaaaaaggacatgtatacttgacaaaaattgtcactttgttattggccaacctttgttgtacaaattcctcggccattttaatatttaagtgatataaaactatctcgacttatttaactctttagtcgagatatatggacgcagatagctatatgatagccaactacagaaggcaaacgctataaaaaacataattacgacgagcatatttataaatatttttattcagcattacttgatatagtaatattaggcacagtcaaacattcaaccactctcgatacattaactctctcattttctttaacaaattctgcaatatcttcgtaaaaagattcttgaaactttttagaatatctatcgactctagatgaaatagcgttcgtcaacatactatgttttgtatacataaaggcgcccattttaacagtttctagtgacaaaatgctagcgatcctaggatcctttagaatcacatagattgacgattcgtctctcttagtaactctagtaaaataatcatacaatctagtacgcgaaataatattatccttgacttgaggagatctaaacaatctagttttgagaacatcgataagttcatcgggaatgacatacatactatctttaatagaactcttttcatccagttgaatggattcgtccttaaccaactgattaatgagatcttctattttatcattttccagatgatatgtatgtccattaaagttaaattgtgtagcgcttctttttagtctagcagccaatactttaacatcactaatatcgatatacaaaggagatgatttatctatggtattaagaattcgtttttcgacatccgtcaaaaccaattcctttttgcctgtatcatccagttttccatcctttgtaaagaaattattttctactagactattaataagactgataaggattcctccataattgcacaatccaaactttttcacaaaactagactttacaagatctacaggaatgcgtacttcaggttttttagcttgtgattttttcttttgcggacattttcttgtgaccaactcatctaccatttcattgattttagcagtgaaataagctttcaatgcacgggcactgatactattgaaaacgagttgatcttcaaattccgccatttaagttcaccaaacaacttttaaatacaaatatatcaatagtagtagaataagaactataaaaaaaataataattaaccaataccaaccccaacaaccggtattattagttgatgtgactgttttctcatcacttagaacagatttaacaatttctataaagtctgtcaaatcatcttccggagaccccataaatacaccaaatatagcggcgtacaacttatccatttatacattgaatattggcttttctttatcgctatcttcatcatattcatcatcaatatcaacaagtcccagattacgagccagatcttcttctacattttcagtcattgatacacgttcactatctccagagagtccgataacgttagccaccacttctctatcaatgattagtttcttgagcgcgaaagtaatttttgtttccgttccggatctatagaagacgataggtgtgataattgccttggccaattgtctttctcttttactgagtgattctagttcaccttctatagatctgagaatggatgattctccagtcgaaacatattctaccatggatccgtttaatttgttgatgaagatggattcatccttaaatgttttctctgtaatagtttccaccgaaagactatgcaaagaatttggaatgcgttccttgtgcttaatgtttccatagacggcttctagaagttgatacaacataggactagccgcggtaacttttatttttagaaagtatccatcgcttctatcttgtttagatttatttttataaagtttagtctctccttccaacataataaaagtggaagtcatttgactagataaactatcagtaagttttatagagatagacgaacaattagcgtattgagaagcatttagtgtaacgtattcgatacattttgcattagatttactaatcgattttgcatactctataacacccgcacaagtctgtagagaatcgctagatgcagtaggtcttggtgaagtttcaactctcttcttgattaccttactcatgattaaacctaaataattgtactttgtaatataatgatatatattttcactttatctcatttgagaataaaaatgtttttgtttaaccactgcatgatgtacagatttcggaatcgcaaaccaccagtggttttattttatccttgtccaatgtgaattgaatgggagcggatgcgggtttcgtacgtagatagtacattcccgtttttagaccgagactccatccgtaaaaatgcatactcgttagtttggaataactcggatctgctatatggatattcatagattgactttgatcgatgaaggctcccctgtctgcagccatttttatgatcgtcttttgtggaatttcccaaatagttttataaactcgcttaatatcttctggaaggtttgtattctgaatggatccaccatctgccataatcctattcttgatctcatcattccataattttctctcggttaaaactctaaggagatgcggattaactacttgaaattctccagacaatactctccgagtgtaaatattactggtatacggttccaccgactcattatttcccaaaatttgagcagttgatgcagtcggcataggtgccaccaataaactatttctaagaccgtatgttctgattttatcttttagaggttcccaattccaaagatccgacggtacaacattccaaagatcatattgtagaataccgttactggcgtacgatcctacatatgtatcgtatggtccttccttctcagctagttcacaactcgcctctaatgcaccgtaataaatggtttcgaagatcttcttatttagatcttgtgcttccaggctatcaaatggataatttaagagaataaacgcgtccgctaatccttgaacaccaataccgataggtctatgtctcttattagagatttcagcttctggaataggataataattaatatctataattttattgagatttctgacaattactttgaccacatccttcagtttgagaaaatcaaatcgcccatctattacaaacatgttcaaggcaacagatgccagattacaaacggctacctcattagcatccgcatattgtattatctcagtgcaaagattactacacttgatagttcctaaattttgttgattactctttttgttacacgcatccttataaagaatgaatggagtaccagtttcaatctgagattctataatcgctttccagacgactcgagcctttattatagatttgtatctcctttctctttcgtatagtgtatacaatcgttcgaactcgtctccccaaacattgtccaatccaggacattcatccggacacatcaacgaccactctccgtcatccttcactcgtttcataaagagatcaggaatccaaagagctataaatagatctctggttctatgttcctcgtttcctgtattctttttaagatcgaggaacgccataatatcagaatgccacggttccaagtatatggccataactccaggccgtttgtttcctccctgatctatgtatctagcggtgttattataaactctcaacattggaataataccgtttgatataccattggtaccggagatatagcttccactggcacgaatattactaattgatagacctattccccctgccattttagagattaatgcgcatcgttttaacgtgtcatagataccctctatgctatcatcgatcatgttaagtagaaaacagctagacatttggtgacgactagttcccgcattaaataaggtaggagaagcgtgcgtaaaccatttttcagaaagtagattgtacgtctcaatagctgagtctatatcccattgatgaattcctactgcgacacgcattaacatgtgctgaggtctttcaacgatcttgttgtttattttcaacaagtaggatttttccaaagttttaaaaccaaaatagttgtatgaaaagtctcgttcgtaaataataaccgagttgagtttatccttatatttgttaactatatccatggtgatacttgaaataatcggagaatgtttcccatttttaggattaacatagttgaataaatcctccatcacttcactaaatagtttttttgtttccttgtgtagatttgatacggctattctggcggctagaatggcataatccggatgttgtgtagtacaagtggctgctatttcggctgccagagtgtccaattctaccgttgttactccattatatattccttgaataaccttcatagctattttaataggatctatatgatccgtgtttaagccataacataattttctaatacgagacgtgattttatcaaacatgacattttccttgtatccatttcgtttaatgacaaacatttttgttggtgtaataaaaaaattatttaacttttcattaatagggatttgacgtatgtagcgtacaaaatgatcgttcctggtatatagataaagagtcctatatatttgaaaatcgttacggctcgattaaactttaatgattgcatagtgaatatatcattaggatttaactccttgactatcatggcggcgccagaaattaccatcaaaagcattaatacagttatgccgatcgcagttaaaacggttatagcatccaccatttatatctaaaaattagatcaaagaatatgtgacaaagtcctagttgtatactgagaattgacgaaacaatgtttcttacatatttttttcttattagtaactgacttaatagtaggaactggaaagctagacttgattattctataagtatagatacccttccagataatgttctctttgataaaagttccagaaaatgtagaattttttaaaaagttatcttttgctattaccaagattgtgtttagacgcttattattaatatgagtgatgaaatccacaccgcctctagatatcgcctttatttccacattagatggtaaatccaatagtgaaactatctttttaggaatgtatggactcgcgtttagaggagtgaacgtcttgggcgtcggaaaggatgattcgtcaaacgaataaacaatttcacaaatggatgttaatgtattagtaggaaattttttgacgctagtggaattgaagattctaatggatgatgttctacctatttcatccgataacatgttaatttccgacaccaacggttttaatatttcgatgatatacggtagtctctctttcggacttatatagcttattccacaatacgagtcattatatactccaaaaaacaaaataactagtataaaatctgtatcgaatgggaaaaacgaaattatcgacataggtatagaatccggaacattgaacgtattaatacttaattctttttctgtggtaagtaccgataggttattgacattgtatggttttaaatattctataacttgagacttgatagatattagtgatgaattgaaaattatttttatcaccacgtgtgtttcaggatcatcgtcgacgcccgtcaaccaaccgaatggagtaaaataaatatcattaatatatgctctagatattagtatttttattaatcctttgattatcatcttctcgtaggcgaatgattccatgatcaagagtgatttgagaacatcctccggagtattaatgggcttagtaaacagtccatcgttgcaataataaaagttatccaagttaaaggatattatgcattcgtttaaagatatcacctcatctgacggagacaattttttggtaggttttagagactttgaagctacttgtttaacaaagttattcatcgtcgtctactattctatttaattttgtagttaatttatcacatatcacattaattgactttttggtccatttttccatacgtttatattcttttaatcctgcgttatccgtttccgttatatccagggatagatcttgcaagttaaatagaatgctcttaaataatgtcattttcttatccgctaaaaatttaaagaatgtataaacctttttcagagatttgaaactcttaggtggtgtcctagtacacaatatcataaacaaactaataaacattccacattcagattccaacagctgattaacttccacattaatacagcctattttcgctccaaatgtacattcgaaaaatctgaataaaacatcgatgtcacaatttgtattatccaatacagaatgtttgtgattcgtgttaaaaccatcggagaaggaatagaaataaaaattattatagtggtggaattcagttggaatattgcctccggagtcataaaaggatactaaacattgttttttatcataaattacacatttccaatgagacaaataacaaaatccaaacattacaaatctagaggtagaacttttaattttgtctttaagtatatacgataagatatgtttattcataaacgcgtcaaatttttcatgaatcgctaaggagtttaagaatctcatgtcaaattgtcctatataatccacttcggatccataagcaaactgagagactaagttcttaatacttcgattgctcatccaggctcctctctcaggctctattttcatcttgacgacctttggattttcaccagtatgtattcctttacgtgataaatcatcgattttcaaatccatttgtgagaagtctatcgccttagatactttttcccgtagtcgaggtttaaaaaaatacgctaacggtatactagtaggtaactcaaagacatcatatatagaatggtaacgcgtctttaactcgtcggttaactctttcttttgatcgagttcgtcgctactattgggtctgctcaggtgccccgactctactagttccaacatcataccgataggaatacaagacactttgccggcggttgtagatttatcatatttttccactacatatccgttacaatttgttaaaaatttagatacatctatattgctacataatccagctagtgaatatatatgacataataaattggtaaatcctagttctggtattttactaattactaaatctgtatatctttccatttatcatggaaaagaatttaccagatatcttcttttttccaaactgcgttaatgtattctcttacaaatattcacaagatgaattcagtaatatgagtaaaacggaacgtgatagtttctcattggccgtgtttccagttataaaacatagatggcataacgcacacgttgtaaaacataaaggaatatacaaagttagtacagaagcacgtggaaaaaaagtatctcctccatcactaggaaaacccgcacacataaacctaaccgcgaagcaatatatatacagtgaacacacaataagctttgaatgttatagttttctaaaatgtataacaaatacagaaatcaattcgttcgatgagtatatattaagaggactattagaagctggtaatagtttacagatattttccaattccgtaggtaaacgaacagatactataggtgtactagggaataagtatccatttagcaaaattccattggcctcattaactcctaaagcacaacgagagatattttcagcgtggatttctcatagacctgtagttttaactggaggaactggagtgggtaagacgtcacaggtacccaagttattgctttggtttaattatttatttggtggattctctactctagataaaatcactgactttcacgaaagaccagtcattctatctcttcctaggatagctttagttagattgcatagcaataccattttaaaatcattgggatttaaggtactagatggatctcctatttctttacggtacggatctataccggaagaattaataaacaaacaaccaaaaaaatatggaattgtattttctacccataagttatctctaacaaaactatttagttatggcactcttattatagacgaagttcatgagcatgatcaaataggagatattattatagcagtagcgagaaagcatcatacgaaaatagattctatgtttttaatgactgccacgttagaggatgacagggaacggctaaaagtatttttacctaatcccgcatttatacatattcctggagatacactgtttaaaattagcgaggtatttattcataataagataaatccatcttccagaatggcatacatagaagaagaaaagagaaatttagttactgctatacagatgtatactcctcctgatggatcatccggtatagtctttgtggcatccgttgcacagtgtcacgaatataaatcatatttagaaaaaagattaccgtatgatatgtatattattcatggtaaggtcttagatatagacgaaatattagaaaaagtgtattcatcacctaatgtatcgataattatttctactccttatttggaatccagcgttactatacgcaatgttacacacatttatgatatgggtagagtttttgtccccgctccttttggaggatcgcaacaatttatttctaaatctatgagagatcaacgaaaaggaagagtaggaagagttaatcctggtacatacgtctatttctatgatctgtcttatatgaagtctatacagcgaatagattcagaatttctacataattatatattgtacgctaataagtttaatctaacactccccgaagatttgtttataatccctacaaatttggatattctatggcgtacaaaggaatatatagactcgttcgatattagtacagaaacatggaataaattattatccaattattatatgaagatgatagagtatgctaaactttatgtactaagtcctattctcgctgaggagttggataactttgagaggacgggagaattaactagtattgtacgagaagccattttatctctaaatttacgaattaagattttaaattttaaacataaagatgatgatacgtatatacacttttgtaaaatattattcggtgtctataacggaacaaacgctactatatattatcatagacctctaacgggatatatgaatatgatttcagatactatatttgttcctgtagataataactaaaaatcaaactctaatgaccacatctttttttagagatgaaaaattttccacatctccttttgtagacacgactaaacattttgcagaaaaaagtttattagtgtttagataatcgtatacttcatcagtgtagatagtaaatgtgaacagataaaaggtattcttgctcaatagattggtaaattccatagaatatattaatcctttcttcttgagatcccacatcatttcaaccagagacgttttatccaatgatttacctcgtactataccacatacaaaactagattttgcagtgacgtcgtacctggtattcttaccaaacaaaattttacttttagttcttttagaaaattctaaggtagaatctctatttgccaatatgtcatctatggaattaccactagcaaaaaatgatagaaatatatattgatacatcgcagctggttttgatctactatactttaaaaacgaatcagattccataattgcctgtatatcatcagctgaaaaactatgttttacacgtattccttcggcatttctttttaatgatatatcttgtttagacaatgataaagttatcatgtccatgagagacgcgtctccgtatcgtataaatatttcattagatgttagacgcttcattaggggtatacttctataaggtttcttaatcagtccatcattggttgcgtcaagaactactatcggatgttgttgggtatctctagtgttacacatggccttactaaagtttgggtaaataactatgatatctctattaattatagatgcatatatttcatttgtcaaggatattagtatcgacttgctatcgtcattaatacgtgtaatgtaatcatataaatcatgcgatagccaaggaaaatttaaatagatgttcatcatataatcgtcgctataattcatattaatacgttgacattgactaatttgtaatatagcctcgccacgaagaaagctctcgtattcagtttcatcgataaaggataccgttaaatataactggttgccgatagtctcatagtctattaagtggtaagtttcgtacaaatacagaatccctaaaatattatctaatgttggattaatctttaccataactgtataaaatggagacggagtcataactattttaccgtttgtacttactggaatagatgaaggaataatctccggacatgctggtaaagacccaaatgtctgtttgaagaaatccaatgttccaggtcctaatctcttaacaaaaattacgatattcgatcccgatatcctttgcattctatttaccagcatatcacgaactatattaagattatctatcatgtctattctcccaccgttatataaatcgcctccgctaagaaacgttagtatatccatacaatggaatacttcatttctaaaatagtattcgttttctaattctttaatgtgaaatcgtatactagaaagggaaaaattatctttgagttttccgttagaaaagaaccacgaaactaatgttctgattgcgtccgattccgttgctgaattaatggatttacaccaaaaactcatataacttctagatgtagaagcattcgctaaaaaattagtagaatcaaaggatataagtagatgttccaacaagtgagcaattcccaagatttcatctatatcattctcgaatccgaaattagaaattcccaagtagatatcctttttcatccgatcgttgatgaaaatacgaactttattcggtaagacaatcatttactaaggagtaaaataggaagtaatgttcgtatgtcgttatcatcgtataaattaaaggtgtgttttttaccattaagtgacattataattttaccaatattggaattataatataggtgtatttgcgcactcgcgacggttgatgcatcggtaaatatagctgtatctaatgttctagtcggtatttcatcatttcgctgtctaataatagcgttttctctatctgtttccattacagctgcctgaagtttattggtcggataatatgtaaaataataagaaatacatacgaataacaaaaataaaataagatataataaagatgccatttagagatctaattttgtttaacttgtccaaattcctacttacagaagatgaggaatcgttggagatagtgtcttccttatgtagaggatttgaaatatcttataatgacttgataacttactttccagataggaaataccataaatatatttataaagtatttgaacatgtagatttatcggaggaattaagtatggaattccatgatacaactctgagagatttagtctatcttagattgtacaagtattccaagtgtatacggccgtgttataaattaggagataatctaaaaggcatagttgttataaaggacaggaatatttatattagggaagcaaatgatgacttgatagaatatctcctcaaggaatacactcctcagatttatacatattctaatgagcgcgtccccataactggttcaaaattaattctttgtggattttctcaagttacatttatggcgtatacaacgtcgcatataacaacaaataaaaaggtagatgttctcgtttccaaaaaatgtatagatgaactagtcgatccaataaattatcaaatacttcaaaatttatttgataaaggaagcggaacaataaacaaaatactcaggaagatattttattcggtaacaggtggccaaactccataggtagctttttctatttcggattttagaatttccaaattcaccagcgatttatcggttttggtgaaatccaaggatttattaatgtccacaaatgccatttgttttgtctgtggattgtatttgaaaatggaaacgatgtagttagatagatgcgctgcgaagtttcctattagggttccgcgcttcacgtcacccagcatacttgaatcaccatcctttaaaaaaaatgataagatatcaacatggagtatatcatactcggattttaattcttctactgcatcactgacattttcacaaatactacaatacggtttaccgaaaataatcagtacgttcttcatttatgggtatcaaaaacttaaaatcgttactgctggaaaataaatcactgacgatattagatgataatttatacaaagtatacaatggaatatttgtggatacaatgagtatttatatagccgtcgccaattgtgtcagaaacttagaagagttaactacggtattcataaaatacgtaaacggatgggtaaaaaagggagggcatgtaaccctttttatcgatagaggaagtataaaaattaaacaagacgttagagacaagagacgtaaatattctaaattaaccaaggacagaaaaatgttagaattagaaaagtgtacatccgaaatacaaaatgttaccggatttatggaagaagaaataaaggcagaaatgcaattaaaaatcgataaactcacatttcaaatatatttatctgattctgataacataaaaatatcattgaatgagatactaacacatttcaacaataatgagaatgttacattattttattgtgatgaacgagacgcagaattcgttatgtgtctcgaggctaaaacacatttctctaccacaggagaatggccgttgataataagtaccgatcaggatactatgctatttgcatctgctgataatcatcctaagatgataaaaaacttaactcaactgtttaaatttgttccctcggcagaggataactatttagcaaaattaacggcgttagtgaatggatgtgatttctttcctggactctatggggcatctataacacccaccaacttaaacaaaatacaattgtttagtgattttacaatcgataatatagtcactagtttggcaattaaaaattattatagaaagactaactctaccgtagacgtgcgtaatattgttacgtttataaacgattacgctaatttagacgatgtctactcgtatattcctccttgtcaatgcactgttcaagaatttatattttccgcattagatgaaaaatggaatgaatttaaatcatcttatttagaaagcgtgccgttaccctgccaattaatgtacgcgttagaaccacgcaaggagattgatgtttcagaagttaaaactttatcatcttatatagatttcgaaaatactaaatcagatatcgatgttataaaatctatatcctcgatcttcggatattctaacgaaaactgtaacacgatagtattcggcatctataaggataatttactactgagtataaataattcattttactttaacgatagtctgttaataaccaatactaaaagtgataatataataaatataggttactagattaaaaatggtgttccaactcgtgtgctctacatgcggtaaagatatttctcacgaacgatataaattgattatacgaaaaaaatcattaaaggatgtactcgtcagtgtaaagaacgaatgttgtaggttaaaattatctacacaaatagaacctcaacgtaacttaacagtgcaacctctattggatataaactaatatggatccggttaattttatcaagacatatgcgcctagaggttctattatttttattaattataccatgtcattaacaagtcatttgaatccatcgatagaaaaacatgtgggtatttattatggtacgttattatcggaacacttggtagttgaatcaacatatagaaaaggagttcgaatagtcccattggatagtttttttgaaggatatcttagtgcaaaagtatacatgttagagaatattcaagttatgaaaatagcagctgatacgtcattaactttattgggtattccgtatggatttggtcataatagaatgtattgttttaaattggtagctgactgttataaaaatgccggtattgatacatcgtctaaacgaatattgggcaaagatatttttctgagccaaaacttcacagacgataatagatggataaagatatatgattctaataatttaacattttggcaaattgattaccttaaagggtgagttaatatgcataactactcctccgttgttttttccctcgttctttttcttaacgttgtttgccatcactctcataatgtaaagatattctaaaatggtaaacttttgcatatcggacgcagaaattggtataaatgttgtaattgtattatttcccgtcaatggactagtcacagctccatcagttttatatcctttagagtatttctcactcgtgtctaacattctagagcattccatgatctgtttatcgttgatattggccggaaagatagattttttattttttattatattactattggcaattgtagatataacttctggtaaatatttttctaccttttcaatctcttctattttcaagccggctatatattctgctatattgttgctagtatcaataccttttctggctaagaagtcatatgtggtattcactatatcagttttaactggtagttccattagcctttccacttctgcagaataatcagaaattggttctttaccagaaaatccagctactataataggctcaccgatgatcattggcaaaatcctatattgtaccagattaatgagagcatatttcatttccaataattctgctagttcttgagacattgatttatttgatgaatctagttggttctctagatactctaccatttctgccgcatacaataacttgttagataaaatcagggttatcaaagtgtttagcgtggctagaatagtgggcttgcatgtattaaagaatgcggtagtatgagtaaaccgttttaacgaattatatagtctccagaaatctgtggcgttacatacatgagccgaatgacatcgaagattgtccaatatttttaatagctgctctttgtccattatttctatatttgactcgcaacaattgtagataccattaatcaccgattcctttttcgatgccggacaatagcacaattgtttagctttggactctatgtattcagaattaatagatatatctctcaatacagattgcactatacattttgaaactatgtcaaaaattgtagaacgacgctgttctgcagccatttaactttaaataatttacaaaaatttaaaatgagcatccgtataaaaatcgataaactgcgccaaattgtggcatatttttcagagttcagtgaagaagtgtctataaatgtagactcgacggatgagttaatgtatatttttgccgccttgggcggatctgtaaacatttgggcaattatacctctaagtgcatcagtgttttaccgaggagccgaaaatattgtgtttaatcttcctgtgtccaaggtaaaatcgtgtttgtgtagttttcacaatgatgccatcatagatatagaacctgatctggaaaataatctagtaaaactttctagttatcatgtagtaagtgtcgattgtaacaaggaactgatgcctattaggacagatactactatttgtctaagtatagatcaaaagaaatcttacgtgtttaattttcacaagtatgaagaaaaatgttgtggtagaaccgtcattcatctagaatggttgttgggctttatcaagtgtattagtcagcatcagcatctggctattatgtttaaagatgacaatattattatgaagactcctggtaatactgatgcgttttccagggaatattctatgactgaatgttctcaagaactacaaaagttttctttcaaaatagctatctcgtctctcaacaaactacgaggattcaaaaagagagtcaatgtttttgaaactagaatcgtaatggataatgacgataacattttaggaatgttgttttcggatagagttcaatcctttaagatcaacatctttatggcgtttttagattaatactttcaatgagataaatatgggtggcggagtaagtgttgagctccctaaacgggatccgcctccgggagtacccactgatgagatgttattaaacgtggataaaatgcatgacgtgatagctcccgctaagcttttagaatatgtgcatataggaccactagcaaaagataaagaggataaagtaaagaaaagatatccagagtttagattagtcaacacaggacccggtggtctttcggcattgttaagacaatcgtataatggaaccgcacccaattgctgtcgcacttttaatcgtactcattattggaagaaggatggaaagatatcagataagtatgaagagggtgcagtattagaatcgtgttggccagacgttcacgacactggaaaatgcgatgttgatttattcgactggtgtcagggggatacgttcgatagaaacatatgccatcagtggatcggttcagcctttaataggagtaatagaactgtagagggtcaacaatcgttaataaatctgtataataagatgcaaacattatgtagtaaagatgctagtgtaccaatatgcgaatcatttttgcattatttacgcgcacacaatacagaagatagcaaagagatgatcgattatattctaagacaacagtctgcggactttaaacagaaatatatgagatgtagttatcccactagagataagttagaagagtcattaaaatatgcggaacctcgagaatgttgggatccagagtgttcgaatgccaatgttaatttcttactaacacgtaattataataatttaggactttgcaatattgtacgatgtaataccagcgtgaacaacttacagatggataaaacttcctcattaagattgtcatgtggattaagcaatagtgatagattttctactgttcccgtcaatagagcaaaagtagttcaacataatattaaacactcgttcgacctaaaattgcatttgatcagtttattatctctcttggtaatatggatactaattgtagctatttaaatgggtgccgcggcaagcatacagacgacggtgaatacactcagcgaacgtatctcgtctaaattagaacaagaagcgaatgctagtgctcaaacaaaatgtgatatagaaatcggaaatttttatatccgacaaaaccatggatgtaacctcactgttaaaaatatgtgctctgcggacgcggatgctcagttggatgctgtgttatcagccgctacagaaacatatagtggattaacaccggaacaaaaagcatacgtgccagctatgtttactgctgcgttaaacattcagacgagtgtaaacactgttgttagagattttgaaaattatgtgaaacagacttgtaattctagcgcggtcgtcgataacaaattaaagatacaaaacgtaatcatagatgaatgttacggagccccaggatctccaacaaatttggaatttattaatacaggatctagcaaaggaaattgtgccattaaagcgttgatgcaattgacgactaaggccactactcaaatagcacctagacaagttgctggtacaggagttcagttttatatgattgttatcggtgttataatattggcagcgttgtttatgtactatgccaagcgtatgctgttcacatccaccaatgataaaatcaaacttattttagccaataaggaaaacgtccattggactacttacatggacacattctttagaacttctccgatggttattgctaccacggatatgcaaaactgaaaatatattgataatattttaatagattaacatggaagttatcgctgatcgtctagacgatatagtgaaacaaaatatagcggatgaaaaatttgtagattttgttatacacggtctagagcatcaatgtcctgctatacttcgaccattaattaggttgtttattgatatactattatttgttatagtaatttatatttttacggtacgtctagtaagtagaaattatcaaatgttgttggtggtgctagtcatcacattaactattttttattactttatactataatagtactagactgacttctaacaaacatctcacctgccataaataaatgcttgatattaaagtcttctatttctaacactattccatctgtggaaaataatactctgacattatcgctaattgacacatcggtgagtgatatgcctataaagtaataatcttctttgggcacatataccagtgtaccaggttctaacaacctatttactggtgctcctgtagcatactttttctttaccttgagaatatccatcgtttgcttggtcaatagcgatatgtgattttttatcaaccactcgaaaaagtaattggagtgttcatatcctctacgggctattgtctcatggccgtgtatgaaatttaagtaacacgactgtggtagatttgttctatagagccggttgccgcaaatagatagaactaccaatatgtctgtacaaatgttaaacattaattgattaacagaaaaaacaatgttcgttctgggaatagaaaccagatcaaaacaaaattcgttagaatatatgccacgtttatacatggaatataaaataactacagtttgaaaaataacagtatcatttaaacatttaacttgcggggttaatctcacaactttactgtttttgaactgttcaaaatatagcatcgatccgtgagaaatacgtttagccgcctttaatagaggaaatcccaccgcctttctggatctcaccaacgacgatagttctgaccagcaactcatttcttcatcatccacctgttttaacatataataggcaggagatagatatccgtcattgcaatattccttctcgtaggcacacaatctaatattgataaaatctccattctcttctctgcatttattatcttgtctcggtggctgattaggctgtggtcttggtttaggccttggtctatcgttgttgaatctattttggtcattaaatctttcatttcttcctggtatatttctatcacctcgtttggttggatttttgtctatattatcgtttgtaacatcggtacgggtattcatttatcacaaaaaaaacttctctaaatgagtctactgctagaaaacctcatcgaagaagataccatattttttgcaggaagtatatctgagtatgatgatttacaaatggttattgccggcgcaaaatccaaatttccaagatctatgctttctatttttaatatagtacctagaacgatgtcaaaatatgagttggagttgattcataacgaaaatatcacaggagcaatgtttaccacaatgtataatataagaaacaatttgggtctaggagatgataaactaactattgaagccattgaaaactatttcttggatcctaacaatgaagttatgcctcttattattaataatacggatatgactgccgtcattcctaaaaaaagtggtaggagaaagaataagaacatggttatcttccgtcaaggatcatcacctatcttgtgcattttcgaaactcgtaaaaagattaatatttataaagaaaatatggaatccgcgtcgactgagtatacacctatcggagacaacaaggctttgatatctaaatatgcgggaattaatgtcctgaatgtgtattctccttccacatccataagattgaatgccatttacggattcaccaataaaaataaactagagaaacttagtactaataaggaactagaatcgtatagttctagccctcttcaagaacccattaggttaaatgattttctgggactattggaatgtgttaaaaagaatattcctctaacagatattccgacaaaggattgattactataaatggagaatgttcctaatgtatactttaatcctgtgtttatagagcccacgtttaaacattctttattaagtgtttataaacacagattaatagttttatttgaagtattcattgtattcattctaatatatgtattttttagatctgaattaaatatgttcttcatgcctaaacgaaaaatacccgatcctattgatagattacgacgtgctaatctagcgtgtgaagacgataaattaatgatctatggattaccatggatgacaactcaaacatctgcgttatcaataaatagtaaaccgatagtgtataaagattgtgcaaagcttttgcgatcaataaatggatcacaaccagtatctcttaacgatgttcttcgcagatgatgattcattttttaagtatttggctagtcaagatgatgaatcttcattatctgatatattgcaaatcactcaatatctagactttctgttattattattgatccaatcaaaaaataaattagaagctgtgggtcattgttatgaatctctttcagaggaatacagacaattgacaaaattcacagactttcaagattttaaaaaactgtttaacaaggtccctattgttacagatggaagggtcaaacttaataaaggatatttgttcgactttgtgattagtttgatgcgattcaaaaaagaatcctctctagctaccaccgcaatagatcctgttagatacatagatcctcgtcgtgatatcgcattttctaacgtgatggatatattaaagtcgaataaagtgaacaataattaattctttattgtcatcatgaacggcggacatattcagttgataatcggccccatgttttcaggtaaaagtacagaattaattagacgagttagacgttatcaaatagctcaatataaatgcgtgactataaaatattctaacgataatagatacggaacgggactatggacgcatgataagaataattttgaagcattggaagcaactaaactatgtgatgtcttggaatcaattacagatttctccgtgataggtatcgatgaaggacagttctttccagacattgtttaattctgtgagcgtatggcaaacgaaggaaaaatagttatagtagccgcactcgatgggacatttcaacgtaaaccgtttaataatattttgaatcttattccattatctgaaatggtggtaaaactaactgctgtgtgtatgaaatgctttaaggaggcttccttttctaaacgattgggtgaggaaaccgagatagagataataggaggtaatgatatgtatcaatcggtgtgtagaaagtgttacgtcggctcataatattatattttttatctaaaaaactaaaaataaacattgattaaattttaatataatacttaaaaatggatgttgtgtcgttagataaaccgtttatgtattttgaggaaattgataatgagttagattacgaaccagaaagtgcaaatgaggtcgcaaaaaaactgccgtatcaaggacagttaaaactattactaggagaattattttttcttagtaagttacagcgacacggtatattagatggtgccaccgtagtgtatataggatcggctcctggtacacatatacgttatttgagagatcatttctataatttaggagtgatcatcaaatggatgctaattgacggccgccatcatgatcctattctaaatggattgcgtgatgtgactctagtgactcggttcgttgatgaggaatatctacgatccatcaaaaaacaactgcatccttctaagattattttaatttctgatgtgagatccaaacgaggaggaaatgaacctagtacggcggatttactaagtaattacgctctacaaaatgtcatgattagtattttaaaccccgtggcgtctagtcttaaatggagatgcccgtttccagatcaatggatcaaggacttttatatcccacacggtaataaaatgttacaaccttttgctccttcatattcagctgaaatgagattattaagtatttataccggtgagaacatgagactgactcgagttaccaaattagacgctgtaaattatgaaaaaaagatgtactaccttaataagatcgtccgtaacaaagtagttgttaactttgattatcctaatcaggaatatgactattttcacatgtactttatgctgaggaccgtgtactgcaataaaacatttcctactactaaagcaaaggtactatttctacaacaatctatatttcgtttcttaaatattccaacaacatcaactgaaaaagttagtcatgaaccaatacaacgtaaaatatctagcaaaaattctatgtctaaaaacagaaatagcaagagatccgtacgcggtaataaatagaaacgtactactgagatatactaccgatatagagtataatgatttagttactttaataaccgttagacataaaattgattctatgaaaactgtgtttcaggtatttaacgaatcatccataaattatactccggttgatgatgattatggagaaccaatcattataacatcgtatcttcaaaaaggtcataacaagtttcctgtaaattttctatacatagatgtggtaatatctgacttatttcctagctttgttagactagatactacagaaactaatatagttaatagtgtactacaaacaggcgatggtaaaaagactcttcgtcttcccaaaatgttagagacggaaatagttgtcaagattctctatcgccctaatataccattaaaaattgttagatttttccgcaataacatggtaactggagtagagatagccgatagatctgttatttcagtcgctgattaatcaattagtagagatgagataagaacattataataatcaataatatatcttatatcttatatcttatatcttatatcttgtttagaaaaatgctaatattaaaatagctaacgctagtaatccaatcggaagccatttgatatctataatagggtatctaatttcctgatttaaatagcggacagctatattctcggtagctactcgtttggaatcacaaacattatttacatctaatttactatctgtaatggaaacgtttcccaatgaaatggtacaatccgatacattgcattttgttatatttttttttaaagaggctggtaacaacgcatcgcttcgtttacatggctcgtaccaacaataatagggtaatcttgtatctattcctatccgtactatgcttttatcaggataaatacatttacatcgtatatcgtctttgttagcatcacagaatgcataaatttgttcgtccgtcatgataaaaatttaaagtgtaaatataactattatttttatagttgtaataaaaagggaaatttgattgtatactttcggttctttaaaagaaactgacttgataaaaatggctgtaatctctaaggttacgtatagtctatatgatcaaaaagagattaatgctacagatattatcattagtcatgttaaaaatgacgacgatatcggtaccgttaaagatggtagactaggtgctatggatggggcattatgtaaaacttgtgggaaaacggaattggaatgtttcggtcactggggtaaagtaagtatttataaaactcatatagttaagcctgaatttatttcagaaattattcgtttactgaatcatatatgtattcactgcggattattgcgttcacgagaaccgtattccgacgatattaacctaaaagagttatcgggacacgctcttaggagattaaaggataaaatattatccaagaaaaagtcatgttggaacagtgaatgtatgcaaccgtatcaaaaaattactttttcaaagaaaaaggtttgtttcgtcaacaagttggatgatattaacgttcctaattctctcatctatcaaaagttaatttctattcatgaaaagttttggccattattagaaattcatcaatatccagctaacttattttatacagactactttcccatccctccgttgattattagaccggctattagtttttggatagatagtatacccaaagagaccaatgaattaacttacttattaggtatgatcgttaagaattgtaacttgaatgctgatgaacaggttatccagaaggcggtaatagaatacgatgatattaaaattatttctaataacactaccagtatcaatttatcatatattacatccggcaaaaataatatgattagaagttatatcgtcgcccgacgaaaagatcagaccgctagatctgtaattggtcccagtacatctatcaccgttaatgaggtaggaatgcccgcatatattagaaatacacttacagaaaagatatttgttaatgcctttacagtggataaagttaaacaactattagcgtcaaaccaagttaaattttactttaataaacgattaaaccaattaacaagaatacgccaaggaaagtttattaaaaataaaatacatttattgcctggtgattgggtagaagtagctgttcaagaatatacaagtattatttttggaagacagccgtctctacatagatacaacgtcatcgcttcatctatcagagctaccgaaggagatactatcaaaatatctcccggaattgccaactctcaaaatgctgatttcgacggggatgaggaatggatgatattagaacaaaatcctaaagctgtaattgaacaaagtattcttatgtatccgacgacgttactcaaacacgatattcatggagcccccgtttatggatctattcaagatgaaatcgtagcagcgtattcattgtttaggatacaagatctttgtttagatgaagtattgaacatcttggggaaatatggaagagagttcgatcctaaaggtaaatgtaaattcagcggtaaagatatctatacttacttgataggtgaaaagattaattatccgggtctcttaaaggatggtgaaattattgcaaacgacgtagatagtaattttgttgtggctatgaggcatctgtcattggctggactcttatccgatcataagtcgaacgtggaaggtatcaactttattatcaagtcatcttatgtttttaagagatatctatctatttacggttttggggtgacattcaaagatctgagaccaaattcgacgttcactaataaattggaggccatcaacgtagaaaaaatagaacttatcaaagaagcatacgccaaatatctcaacgatgtaagagacgggaaaatagttccattatctaaagctttagaggcggactatgtggaatccatgttatccaacttgacaaatcttaatatccgagagatagaagaacatatgagacaaacgctgatagatgatccagataataacctcctgaaaatggccaaagcgggttataaagtaaatcccacagaactaatgtatattctaggtacgtatggacaacaaaggattgatggtgaaccagcagagactcgagtattgggtagagttttaccttactatcttccagactctaaggatccagaaggaagaggttatattcttaattctttaacaaaaggattaacgggttctcaatattacttttcgatgctggttgcaagatctcaatctactgatatcgtctgtgaaacatcacgtaccggaacactggctagaaaaatcattaaaaagatggaggatatggtggtcgacggatacggacaagtagttataggtaatacgctcatcaagtacgccgccaattataccaaaattctaggctcagtatgtaaacctgtagatcttatctatccagatgagtccatgacttggtatttggaaattagtgctctgtggaataaaataaaacagggattcgtttactctcagaaacagaaacttgcaaagaagacattggcgccgtttaatttcctagtattcgtcaaacccaccactgaggataatgctattaaggttaaggatctgtacgatatgattcataacgtcattgatgatgtgagagagaaatacttctttacggtatctaatatagattttatggagtatatattcttgacgcatcttaatccttctagaattagaattacaaaagaaacggctatcactatctttgaaaagttctatgaaaaactcaattatactctaggtggtggaactcctattggaattatttctgcacaggtattgtctgagaagtttacacaacaagccctgtccagttttcacactactgaaaaaagtggtgccgtcaaacaaaaacttggtttcaacgagtttaataacttgactaatttgagtaagaataagaccgaaattatcactctggtatccgatgatatctctaaacttcaatctgttaagattaatttcgaatttgtatgtttgggagaattaaatccagacatcactcttcgaaaagaaacagataggtatgtagtagatataatagtcaatagattatacatcaagagagcagaaataaccgaattagtcgtcgaatatatgattgaacgatttatctcctttagcgtcattgtaaaggaatggggtatggaaacattcattgaggatgaggataatattagatttactgtctacctaaatttcgttgaaccggaagaattgaatcttagtaagtttatgatggttcttccgggtgccgccaacaagggaaagattagtaaattcaagattcctatctctgactatacgggttatgacgacttcaatcaaacaaaaaagctcaataagatgactgtagaactcatgaatctaaaagaattgggttctttcgatttggaaaacgtcaacgtgtatcctggagtatggaatacatacgatatcttcggtatcgaggccgctcgtgaatacttgtgcgaagccatgttaaacacctatggagaagggttcgattatctgtatcagccttgtgatcttctcgctagtttactatgtgctagttacgaaccagaatcagtgaataaattcaagttcggcgcagctagtactcttaagagagctacgttcggagacaataaagcattgttaaacgcggctcttcataaaaagtcagaacctattaacgataatagtagctgccacttttttagcaaggtccctaatataggaactggatattacaaatactttatcgacttgggtcttctcatgagaatggaaaggaaactatctgataagatatcttctcaaaagatcaaggaaatggaagaaacagaagacttttaattcttatcaataacatatttttctatgatctgtcttttaaacgatggattttccacaaatgcgcctctcaagtccctcatagaatgatacacgtataaaaaatatagcataggcgatgactccttatttttagacattagatatgccaaaatcatagccccgcttctatttactcccgcagcacaatgaaccaacacgggctcgtttcgttgatcacatttagataaaaaggcggttacgtcgtcaaaatatttactaatatcggtagttgtatcatctaccaacggtatatgaataatattaatattagagttaggtaatgtatatttatccatcgtcaaatttaaaacatatttgaacttaacttcagatgatggtgcatccatagcatttttataatttcccaaatacacattattggttacccttgtcattatagtgggagatttggctctgtgcatatctccagttgaacgtagtagtaagtatttatacaaacttttcttatccatttataacgtacaaatggataaaactactttatcggtaaacgcgtgtaatttagaatacgttagagaaaaggctatagtaggcgtacaagcagccaaaacatcaacacttatattctttgttattatattggcaattagtgcgctattactctggtttcagacgtctgataatccagtctttaatgaattaacgagatatatgcgaattaaaaatacggttaacgattggaaatcattaacggatagcaaaacaaaattagaaagtgatagaggtaaacttctagccgctggtaaggatgatatattcgaattcaaatgtgtggatttcggcgcctattttatagctatgcgattggataagaaaacatatctgccgcaagctattaggcgaggtactggagacgcgtggatggttaaaaaggcggcaaaggtcgatccatctgctcaacaattttgtcagtatttgataaaacacaagtctaataatgttattacttgtggtaatgagatgttaaatgaattaggttatagcggttattttatgtcaccgcattggtgttccgattttagtaatatggaatagtgttagataaatgcggtaacgaatgttcctgtaaggaaccataacagtttagatttaacgttaaagatgagcataaacataataaacaaaattacaatcaaacttataacattaatatcaaacaatccaaaaaatgaaatcagtggagtagtaaacgcgtacataactcctggataacgtttagcagctgccgttcctattctagaccaaaaatttggtttcatgttttcgaaacggtattctgcaacaagtcggggatcgtgttctacatatttggcggcattatccagtatctgcctattgatcttcatttcgttttcgattctggctatttcaaaataaaatcccgatgatagacctccagactttataatttcatctacgatgttcagcgccgtagtaactctaataatataggctgataagctaacatcataccctcctgtatatgtgaatatggcatgatttttgtccattacaagctcggttttaactttattgcctgtaataatttctctcatctgtaggatatctatttttttgtcatgcattgccttcaagacgggacgaagaaacgtaatatcctcaataacgttatcgttttctacaataactacatattctacctttttattttctaactcggtaaaaaaattagaatcccatagggctaaatgtctagcgatatttcttttcgtttcttctgtacacatagtgttacaaaaccctgaaaagaagtgagtatacttgtcatcatttctaatgtttcctccagtccactgtataaacgcataatccttgtaatgatctggatcatccttgactaccacaacatttcttttttctggcataacttcgttgtcctttacatcatcgaacttctgatcattaatatgctcatgaacattaggaaatgtttctgatggaggtctatcaataactggcacaacaataacaggagttttcaccgccgccatttagttattgaaattaatcatatacaactctttaatacgagttatattttcgtctatccattgtttcacattgacatatttcgacaaaaagatataaaatgcgtattccaatgcttctctgtttaatgaattactaaaatatacaaacacgtcactgtctggcaataaatgatatcttagaatattgtaacaatttattttgtattgcacatgttcgtgatctatgagttcttcttcgaatggcataggatctccgaatctgaaaacgtataaataggagttagaataataatatttgagagtattggtaatatataaactctttagcggtataattagtttttttctctcaatttctatttttagatgtgatggaaaaatgactaattttgtagcattagtatcatgaactctaatcaaaatcttaatatcttcgtcacacgttagctctttgaagtttttaagagatgcatcagttggttctacagatggagtaggtgcaacaattttttgttctacacatgtatgtactggagccattgttttaactataatggtgcttgtatcgaaaaactttaatgcagatagcggaagctcttcgccgcgactttctacgtcgtaattgggttctaacgccgatctctgaatggatactagttttctaagttctaatgtgattctctgaaaatgtaaatccaattcctccggcattatagatgtgtatacatcggtaaataaaactatagtatccaacgatcccttctcgcaaattctagtcttaaccaaaaaatcgtatataaccacggagatggcgtatttaagagtggattcttctaccgttttgttcttggatgtcatataggaaactataaagtccgcactactgttaagaatgattactaacgcaactatatagtttaaattaagcattttggaaacataaaataactctgtagacgatacttgactttcgaataagtttgcagacaaacgaagaaagaacagacctctcttaatttcagaagaaaactttttttcgtattcctgacgtctagagtttatatcaataagaaagttaagaattagtcggttaatgttgtatttcattacccaagtttgagatttcataatattatcaaaagacatgataatattaaagataaagcgctgactatgaacgaaatagctatatggttcgctcaagaatatagtcttgttaaacgtggaaacgataactgtatttttaatcacgtcagcggcatctaaattaaatataggtatatttattccacacactctacaatatgccacaccatcttcataataaataaattcgttagcaaaattattaattttagtgaaatagttagcgtcaactttcatagcttccttcaatctaatttgatgctcacacggtgcgaattccactctaacatcccttttccatgcctcaggttcatcgatctctataatatctagttttttgcgtttcacaaacacaggctcgtctctcgcgatgagatctgtatagtaactatgtaaatgataactagatagaaagatgtagctatatagatgacgatcctttaagagaggtataataactttaccccaatcagatagactgttgttatggtcttcggaaaaagaatttttataaatttttccagtattttccaaatatacgtacttaacatctaaaaaatccttaatgataataggaatggataatccgtctattttataaagaaatacatatcgcacattatacttttttttggaaatgggaataccgatgtgtctacataaatatgcaaagtctaaatattttttagagaatcttagttggtccaaattcttttccaagtacggtaatagatttttcatattgaacggtatcttcttaatctctggttctagttccgcattaaatgatgaaactaagtcactatttttataactaacgattacatcacctctaacatcatcatttaccagaatactgatcttcttttgtcgtaaatacatgtctaatgtgttaaaaaaaagatcatacaagttatacgtcatttcatctgtggtattcttgtcattgaaggataaactcgtactaatctcttctttaacagcctgttcaaatttatatcctatatacgaaaaaatagcaaccagtgtttgatcatccgcgtcaatattctgttctatcgtagtgtataacaatcgtatatcttcttctgtgatagtcgatacgttataaaggttgataacgaaaatatttttatttcgtgaaataaagtcatcgtaggattttggacttatatttgcgtctagtagatatgcttttatttttggaatgatctcaattagaatagtctctttagagtccatttaaagttacaaacaactaggaaattggtttatgatgtataatttttttagtttttatagattctttattctatacttaaaaaatgaaaataaatacaaaggttcttgagggttgtgttaaattgaaagcgagaaataatcataaattatttcattatcgcgatatccgttaagtttgtatcgtaatggcgtggtcaattacaaataaagcggatactagtagcttcacaaagatggctgaaatcagagctcatctaaaaaatagcgctgaaaataaagataaaaacgaggatattttcccggaagatgtaataattccatctactaagcccaaaaccaaacgagccactactcctcgtaaaccagcggctactaaaagatcaaccaaaaaggaggaagtggaagaagaagtagttatagaggaatatcatcaaacaactgaaaaaaattctccatctcctggagtcagcgacattgtagaaagcgtggccgctgtagagctcgatgatagcgacggggatgatgaacctatggtacaagttgaagctggtaaagtaaatcatagtgctagaagcgatctctctgacctaaaggtggctaccgacaatatcgttaaagatcttaagaaaattattactagaatctctgcagtatcgacggttctagaggatgttcaagcagctggtatctctagacaatttacttctatgactaaagctattacaacactatctgatctagtcaccgagggaaaatctaaagttgttcgtaaaaaagttaaaacttgtaagaagtaaatgcgtgcacttttttataaagatggtaaactctttaccgataataattttttaaatcctgtatcagacgataatccagcgtatgaggttttgcaacatgttaaaattcctactcatttaacagatgtagtagtatatgaacaaacgtgggaggaggcgttaactagattaatttttgtgggaagcgattcaaaaggacgtagacaatacttttacggaaaaatgcatgtacagaatcgcaacgctaaaagagatcgtatttttgttagagtatataacgttatgaaacgaattaattgttttataaacaaaaatataaagaaatcgtccacagattccaattatcagttggcggtttttatgttaatggaaactatgttttttattagatttggtaaaatgaaatatcttaaggagaatgaaacagtagggttattaacactaaaaaataaacacatagaaataagtcccgatgaaatagttatcaagtttgtaggaaaggacaaagtttcacatgaatttgttgttcataagtctaatagactatataaaccgctattgaaactgacggatgattctagtcccgaagaatttctgttcaacaaactaagtgaacgaaaggtatacgaatgtatcaaacagtttggtattagaatcaaggatctccgaacgtatggagtcaattatacgtttttatataatttttggacaaatgtaaagtccatatctcctcttccgtcaccaaaaaagttaatagcgttaactatcaaacaaactgctgaagtggtaggtcatactccatcaatttcaaaaagagcttatatggcaacgactattttagaaatggtaaaggataaaaattttttagatgtagtatctaaaactacgttcgatgaattcctatctatagtcgtagatcacgttaaatcatctacggatggatgatatagatctttacacaaataattacaagaccgataaatggaaatggataagcgtatgaaatctctcgcaatgacagctttcttcggagagctaagcacattagatattatggcattgataatgtctatatttaaacgccatccaaacaataccattttttcagtggataaggatggtcagtttatgattgatttcgaatacgataattataaggcttctcaatatttggatctgaccctcactccgatatctggagatgaatgcaagactcacgcatcgagtatagccgaacaattggcgtgtgtggatattattaaagaggatattagcgaatatatcaaaactactccccgtcttaaacgatttataaaaaaataccgcaatagatcagatactcgcatcagtcgagatacagaaaagcttaaaatagctctagctaaaggcatagattacgaatatataaaagacgcttgttaataagtaaatgaaaaaaaactagtcgtttataataaaacacgatatggatgccaacgtagtatcatcttctactattgcgacgtatatagacgctttagcgaagaatgcttcagaattagaacagaggtctaccgcatacgaaataaataatgaattggaactagtatttattaagccgccattgattactttgacaaatgtagtgaatatctctacgattcaggaatcgtttattcgatttaccgttactaataaggaaggtgttaaaattagaactaagattccattatctaaggtacatggtctagatgtaaaaaatgtacagttagtagatgctatagataacatagtttgggaaaagaaatcattagtgacggaaaatcgtcttcacaaagaatgcttgttgagactatcgacagaggaacgtcatatatttttggattacaagaaatatggatcctctatccgactagaattagtcaatcttattcaagcaaaaacaaaaaactttacgatagactttaagctaaaatattttctaggatccggtgcccaatctaaaagttctttgttgcacgctattaatcatccaaagtcaaggcctaatacatctctggaaatagaattcacacctagagacaatgaaacagttccatatgatgaactaataaaggaattgacgactctctcgcgtcatatatttatggcttctccagagaatgtaattctttctccgcctattaacgcgcctataaaaacctttatgttgcctaaacaagatatagtaggtttggatctggaaaatctatatgccgtaactaagactgacggcattcctataactatcagagttacatcaaacgggttgtattgttattttacacatcttggttatattattagatatcctgttaagagaataatagattccgaagtagtagtctttggtgaggcagttaaggataagaactggaccgtatatctcattaagctaatagagcccgtgaatgctatcagtgatagactagaagaaagtaagtatgttgaatctaaactagtggatatttgtgatcggatagtattcaagtcaaagaaatacgaaggtccgtttactacaactagtgaagtcgtcgatatgttatctacatatttaccaaagcaaccagaaggtgttattctgttctattcaaagggacctaaatctaacattgattttaaaattaaaaaggaaaatactatagaccaaactgcaaatgtagtatttaggtacatgtccagtgaaccaattatctttggagaatcgtctatctttgtagagtataagaaatttagcaacgataaaggctttcctaaagaatatggttctggtaagattgtgttatataacggcgttaattatctaaataatatctattgtttggaatatattaatacacataatgaagtgggtattaagtccgtggttgtacctattaagtttatagcagaattcttagttaatggagaaatacttaaacctagaattgataaaaccatgaaatatattaactcagaagattattatggaaatcaacataatatcatagtcgaacatttaagagatcaaagcatcaaaataggagatatctttaacgaggataaactatcggatgtgggacatcaatacgccaataatgataaatttagattaaatccagaagttagttattttacgaataaacgaactagaggaccgttgggaattttatcaaactacgtcaagactcttcttatttctatgtattgttccaaaacatttttagacgattccaacaaacgaaaggtattggcgattgattttggaaacggtgctgacctggaaaaatacttttatggagagattgcgttattggtagcgacggatccggatgctgatgctatagctagaggaaatgaaagatacaacaaattaaactctggaattaaaaccaagtactacaaatttgactacattcaggaaactattcgatccgatacatttgtctctagtgtcagagaagtattctattttggaaagtttaatatcatcgactggcagtttgctatccattattcttttcatccgagacattatgctaccgtcatgaataacttatccgaactaactgcttctggaggcaaggtattaatcactaccatggacggagacaaattatcaaaattaacagataaaaagacttttataattcataagaatttacctagtagcgaaaactatatgtctgtagaaaaaatagctgatgatagaatagtggtatataatccatcaacaatgtctactccaatgactgaatacattatcaaaaagaacgatatagtcagagtgtttaacgaatacggatttgttcttgtagataacgttgatttcgctacaattatagaacgaagtaaaaagtttattaatggcgcatctacaatggaagatagaccgtctacaaaaaactttttcgaactaaatagaggagccattaaatgtgaaggtttagatgtcgaagacttacttagttactatgttgtttatgtcttttctaagcggtaaataataatatggtatgggttctgatatccccgttctaaatgcattaaataattccaatagagcgatttttgttcctataggaccttccaactgtggatactctgtattgttaatagatatattaatacttttgtcgggtaacagaggttctacgtcttctaaaaataaaagtttgataacatctggcctgttcataaataaaaacttggcgattctatatatactcttattatcaaatctagccattgtcttatagatgtgagctactgtaggtgtaccatttgattttctttctaatactatatatttctctcgaagaagttcttgcacatcatctgggaataaaatactactgttgagtaaatcagttattttttttatatcgatattgatggacatttttatagttaaggataataagtatcccaaagtcgataacgacgataacgaagtatttatacttttaggaaatcacaatgactttatcagattaaaattaacaaaattaaaggagcatgtatttttttctgaatatattgtgactccagatacatatggatctttatgcgtcgaattaaatgggtctagttttcagcacggtggtagatatatagaggtggaggaatttatagatgctggaagacaagttagatggtgttctacatccaatcatatatctaaagatatacccgaagatatgcacactgataaatttgtcatttatgatatatacacttttgacgctttcaagaataaacgattggtattcgtacaggtacctccgtcgttaggagatgatagtcatttgactaatccgttattgtctccgtattatcgtaattcagtagccagacaaatggtcaataatatgatttttaatcaagattcatttttaaaatatttattagaacatctgattagaagccactatagagtttctaaacatataacaatagttagatacaaggataccgaagaattaaatctaacgagaatatgttataatagagataagtttaaggcgtttgtattcgcttggtttaacggcgtttcggaaaatgaaaaggtactagatacgtataaaaaggtatctaatttgatataatgaattcagtgactgtatcacacgcgccatatactattacttatcacgatgattgggaaccagtaatgagtcaattggtagagttttataacgaagtagccagttggctgctacgagacgagacgtcgcctattcctgataagttctttatacagttgaaacaaccgcttagaaataaacgagtatgtgtgtgcggtatagatccgtatccgaaagatggaactggtgtaccgttcgaatcaccaaattttacaaaaaaatcaattaaggagatagcttcatctatatctagattaaccggagtaattgattataaaggttataaccttaatataatagacggggttataccctggaattattacttaagttgtaaattaggagaaacaaaaagtcacgcgatctactgggataagatttccaagttactgctgcagcatataactaaacacgttagtgttctttattgtttgggtaaaacagatttctcgaatatacgggcaaagttagaatccccggtaactaccatagtcggatatcatccagcggctagagaccgccaattcgagaaagatagatcatttgaaattatcaacgttttactggaattagacaacaaggcacctataaattgggctcaagggtttatttattaatgctttagtgaaattttaacttgtgttctaaatggatgcggctattagaggtaatgatgttatctttgttcttaagactataggtgtcccgtcagcgtgcagacaaaatgaagatccaagatttgtagaagcatttaaatgcgacgagttagaaagatatattgagaataatccagaatgtacactattcgaaagtcttagggatgaggaagcatactctatagtcagaattttcatggatgtagatttagacgcgtgtctagacgaaatagattatttaacggctattcaagattttattatcgaggtgtcaaactgtgtagctagattcgcgtttacagaatgcggtgccattcatgaaaatgtaataaaatccatgagatctaatttttcattgactaagtctacaaatagagataaaacaagttttcatattatctttttagacacgtataccactatggatacattgatagctatgaaacgaacactattagaattaagtagatcatctgaaaatccactaacaagatcgatagacactgccgtatataggagaaaaacaactcttcgggttgtaggtactaggaaaaatccaaattgcgacactattcatgtaatgcaaccaccgcatgataatatagaagattacctattcacttacgtggatatgaacaacaatagttattacttttctctacaacaacgattggaggatttagttcctgataagttatgggaaccagggtttatttcattcgaagacgctataaaaagagtttcaaaaatattcattaattctataataaactttaatgatctcgatgaaaataattttacaacggtaccactggtcatagattacgtaacaccttgtgcattatgtaaaaaacgatcgcataaacatccgcatcaactatcgttggaaaatggtgctattagaatttacaaaactggtaatccacatagttgtaaagttaaaattgttccgttggatggtaataaactgtttaatattgcacaaagaattttagacactaactctgttttattaaccgaacgaggagaccatatagtttggattaataattcatggaaatttaacagcgaagaacccttgataacaaaactaattttgtcaataagacatcaactacctaaggaatattcaagcgaattactctgtccgaggaaacgaaagactgtagaagctaacatacgagacatgttagtagattcagtggagaccgatacctatccggataaacttccgtttaaaaatggtgtattggacctggtagacggaatgttttactctggagatgatgctaaaaaatatacgtgtactgtatcaaccggatttaaatttgacgatacaaagttcgtcgaagacagtccagaaatggaagagttaatgaatatcattaacgatatccaaccattaacggatgaaaataagaaaaatagagagctatatgaaaaaacattatctagttgtttatgcggtgctaccaaaggatgtttaacattcttttttggagaaactgcaactggaaagtcgacaaccaaacgtttgttaaagtctgctatcggtgacctgtttgttgagacgggtcaaacaattttaacagatgtattggataaaggacctaatccatttatcgctaacatgcatttgaaaagatctgtattctgtagcgaactacctgattttgcatgtagtgggtcaaagaaaatcagatctgataatattaaaaagttgacagaaccttgtgtcattggaagaccgtgtttctccaataaaattaataatagaaaccatgcgacaatcattatcgatactaattacaaacctgtttttgataggatagataacgcattaatgagaagaattgccgtcgtgcgattcagaacacacttttctcaaccttctggtagagaggctgctgaaaataatgacgcgtacgataaagtcaaactattagacgaggggttagatggtaaaatacaaaataatagatatagattcgcatttctatacttgttggtgaaatggtacagaaaatatcatgttcctattatgaaactatatcctacacccgaagagattcctgactttgcattctatctcaaaataggtactctgttggtatctagctctgtaaagcatattccattaatgacggacctctccaaaaagggatatatattgtacgataatgtggtcactcttccgttgactactttccaacagaaaatatccaagtattttaattctagactatttggacacgatatagagagcttcatcaatagacataagaaatttgccaatgttagtgatgaatatctgcaatatatattcatagaggatatttcatctccgtaaatatatgctcatatatttatagaagatatcacatatctaaatgaataccggaatcatagatttatttgataatcatgttgatagtataccaactatattacctcatcagttagctactctagattatctagttagaactatcatagatgagaacagaagcgtgttattgttccatattatgggatcaggtaaaacaataatcgctttgttgttcgccttggtagcttccagatttaaaaaggtttacattctagtgccgaacatcaacatcttaaaaattttcaattataatatgggtgtagctatgaacttgtttaatgacgaattcatagctgagaatatctttattcattccacaacaagtttttattctcttaattataacgataacgtcattaattataacggattatctcgctacaataactctatttttatcgttgatgaggcacataatatctttgggaataatactggagaacttatgaccgtgataaaaaataaaaacaagattccttttttactattgtctggatctcccattactaacacacctaatactctgggtcatattatagatttaatgtccgaagagacgatagattttggtgaaattattagtcgtggtaagaaagtaattcagacacttcttaacgaacgcggtgtgaatgtacttaaggatttgcttaaaggaagaatatcatattacgaaatgcctgataaagatctaccaacgataagatatcacggacgtaagtttctagatactagagtagtatattgtcacatgtctaaacttcaagagagagattatatgattactagacgacagctatgttatcatgaaatgtttgataaaaatatgtataacgtgtcaatggcagtattgggacaacttaatctgatgaataatttagatactttatttcaggaacaggataaggaattgtacccaaatctgaaaataaataatggcgtgttatacggagaagaattggtaacgttaaacattagttccaaatttaaatactttattaatcggatacagacactcaacggaaaacattttatatacttttctaattctacatatggcggattggtaattaaatatatcatgctcagtaatggatattctgaatataatggttctcagggaactaatccacatatgataaacggcaaaccaaaaacatttgctatcgttactagtaaaatgaaatcgtctttagaggatctattagatgtgtataattctcctgaaaacgatgatggtagtcaattgatgtttttgttttcatcaaacattatgtccgaatcctatactctaaaagaggtaaggcatatttggtttatgactatcccagatactttttctcaatacaaccaaattcttggacgatctattagaaaattctcttacgccgatatttctgaaccagttaatgtatatcttttagccgccgtatattccgatttcaatgacgaagtgacgtcattaaacgattacacacaggatgaattaattaatgttttaccatttgacatcaaaaagctgttgtatctaaaatttaagacgaaagaaacgaatagaatatactctattcttcaagagatgtctgaaacgtattctcttccaccacatccatcaattgtaaaagttttattgggagaattggtcagacaatttttttataataattctcgtattaagtataacgataccaagttacttaaaatggttacatcagttataaaaaataaagaagacgctaggaattacatagatgatattgtaaacggtcacttctttgtatcgaataaagtatttgataaatctcttttatacaaatacgaaaacgatattattacagtaccgtttagactttcctacgaaccatttgtttggggagttaactttcgtaaagaatataacgtggtatcttctccataaaactgatgagatatataaagaaataaatgtcgagctttgttaccaatggatacctttccgttacattggaaccacacgagctgacgttagacataaaaactaatattaggaatgccgtatataagacgtatctccatagagaaattagtggtaaaatggccaagaaaatagaaattcgtgaagacgtggaattacctctcggcgaaatagttaataattctgtagttataaacgttccgtgtgtaataacctacgcgtattatcacgttggggatatagtcagaggaacattaaacatcgaagatgaatcaaatgtaactattcaatgtggagatttaatctgtaaactaagtagagattcgggtactgtatcatttagcgattcaaagtactgcttttttcgaaatggtaatgcgtatgacaatggcagcgaagtcactgccgttctaatggaggctcaacaaggtatcgaatctagttttgtttttctcgcgaatatcgtcgactcataaaaaagagaatagcggtaagtataaacacgaatactatggcaataattgcgaatgttttattctcttcgatatatttttgataatatgaaaaacatgtctctctcaaatcggacaaccatctcataaaatagttctcgcgcgctggagaggtagttgccgctcgtataatctctccagaataatatacttgcgtgtcgtcgttcaatttatacggatttctatagttctctgttatataatgcggtttgccctcatgattagacgacgacaatagtgttctaaatttagatagttgatcagaatgaatgtttattggcgttggaaaaattatccatacagcgtctgcagagtggttgatagttgttcctagatatgtaaaataatccaacttactaggcagcaaattgtctagataaaatactgaatcaaacggtgcagacgtattggcggatctaatggaatccaattgattaactatcttttgaaaatatacatttttatgatccaatacttgtaagaatatagaaataatgataagtccatcatcgtgtttttttgcctcttcataagaactatattttttcttattccaatgaacaagattaatctctccagagtatttgtacacatctatcaagtgattggatccataatcgtcttcctttccccaatatatatgtagtgatgataacacatattcattggggagaaaccctccacttatatatcctcctttaaaattaatccttactagttttccagtgttctggatagtggttggtttcgactcattataatgtatgtctaacggcttcaatcgcgcgttagaaattgcttttttagtttctatattaataggagatagttgttgcggcatagtaaaaatgaaatgataactgtttaaaaatagctcttagtatgggaattacaatggatgaggaagtgatatttgaaactcctagagaattaatatctattaaacgaataaaagatattccaagatcaaaagacacgcatgtgtttgctgcgtgtataacaagtgacggatatccgttaataggagctagaagaacttcattcgcgttccaggcgatattatctcaacaaaattcagattctatctttagagtatccactaaactattacggtttatgtactacaatgaactaagagaaatctttagacggttgagaaaaggttctatcaacaatatcgatcctcactttgaagagttaatattattgggtggtaaactagataaaaaggaatctattaaagattgtttaagaagagaattaaaagaggaaagtgatgaacgtataacagtaaaagaatttggaaatgtaattctaaaacttacaacacgggataaattatttaataaagtatatataagttattgcatggcgtgttttattaatcaatcgttggaggatttatcgcatactagtatttacaatgtagaaattagaaagattaaatcattaaatgattgtattaacgacgataaatacgaatatctgtcttatatttataatatgctagttaatagtaaatgaacttttacagatctagtataattagtcagattattaagtataatagacgactagctaagtctattatttgcgaggatgactctcaaattattacactcacggcattcgttaaccaatgcctatggtgtcataaacgagtatccgtgtccgctattttattaactactgataacaaaatattagtatgtaacagacgagatagttttctctattctgaaataattagaactagaaacatgtttagaaagaaacgattatttctgaattattccaattatttgaacaaacaggaaagaagtatactatcgtcatttttttctctagatccagctactactgataatgatagaatagacgctatttatccgggtggcatacccaaaaggggtgagaatgttccagagtgtttatccagggaaattaaagaagaagttaatatagacaattcttttgtattcatagacactcggttttttattcatggcatcatagaagataccattattaataaattttttgaggtaatcttctttgtcggaagaatatctctaacgagtgatcaaatcattgatacatttaaaagtaatcatgaaatcaaggatctaatatttttagatccgaattcaggtaatggactccaatacgaaattgcaaaatatgctctagatactgcaaaacttaaatgttacggccatagaggatgttattatgaatcattaaaaaaattaactgaggatgattgattaaaaaatataaattaatttaccatcgtgtatttttataacgggattgtccggcatatcatgtagatagttaccgtctacatcgtatactcgaccatctacgcctttaaatcctctatttattgacattaatctattagaattggaataccaaatattagtaccctcaattagtttattggtaatattttttttagacgatagatcgatggctcttgaaaccaaggttttccaaccggactcattgtcgatcggtgagaagtctttttcattagcatgaatccattctaatgatgtatgtttaaacactctaaacaattggacaaattcttttgatttgctttgaatgatttcaaataggtcttcgtctacagtaggcataccattagataatctagccattataaagtgcacgtttacatatctacgttctggaggagtaagaacgtgactattgagacgaatggctcttcctactatctgacgaagagacgcctcgttccatgtcatatctaaaatgaagatatcattaattgagaaaaaactaataccctcgcctccactagaagagaatacgcatgttttaatgcattctccgttagtgtttgattcttggttaaactcagccaccgccttgattctagtatcttttgttctagatgagaactctatattagagataccaaagactttgaaatatagtaataagatttctattcctgactgattaacaaatggttcaaagactagacatttaccatgggatgctaatattcccaaacatacatctataaatttgacgcttttctcttttaattcagtaaatagagagatatcagccgcactagcatcccctttcaatagttctccctttttaaaggtatctaatgcggatttagaaaactctctatctcttaatgaatttttaaaatcattatatagtgttgctatctcttgcgcgtattcgcccggatcacgattttgtctttcaggaaagctatcgaacgtaaacgtagtagccatacgtctcagaattctaaatgatgatatacctgtttttatttcagcgagtttagccttttgataaatttcttcttgctttttcgacatattaacgtatcgcattaatactgttttcttagcgaatgatgcagacccttctacgtcatcaaaaatagaaaactcgttattaactatatacgaacatagtcctcctagtttggagactaattctttttcatcgactagacgtttattctcaaatagtgattggtgttgtaaggatcctggtcgtagtaagttaaccaacatggtgaattcttgcacactattgacgataggtgtagccgataaacaaatcatcttatggttttttaacgcaatggtcttagataaaaaattatatactgaacgagtaggacggatcttaccatcttctttgattaatgatttagaaatgaagttatgacattcatcaatgatgacgcatattctactcttggaattaatagttttgatattagtaaaaaatttatttctaaaattttgatcatcgtaattaataaaaatacaatccttcgttatctctggagcgtatctgagtatagtgttcatccaaggatcttctatcaaagcctttttcaccaataagataatagcccaattcgtataaatatccttaagatgtttgagaatatatacagtagtcattgttttaccgacacccgtttcatggaacaataaaagagaatgcatactgtctaatcctaagaaaactcttgctacaaaatgttgataatccttgaggcgtactacgtccgaccccatcatttcaacgggcatattagtagttctgcgtaaggcataatcgatataggccgcgtgtgatttactcatttatgagtgataagtaataactatgttttaaaaatcacagcagtagtttaactagtcttctctgatgtttgttttcgatactttttgaatcagaagtcatactagaataaagcaacgagtgaacgtaatagagagcttcgtatactctattcgaaaactctaagaacttattaatgaattccgtatccactggattgtttaaaatactaaattgaacactgttcacatccttccaagaagaagacttagtgacggacttaacatgagacataaataaatccaaattttttttacaaacatcactagccaccataatggcgctatctttcaaccagctatcgcttacgcattttagcagtctaacatttttaaagagactacaatatattctcatagtatcgattacacctctaccgaataaagttggaagtttaataatacaatatttttcgtttacaaaatcaaataatggtcgaaacacgtcgaaggttaacatcttataatcgctaatgtatagattgttttcagtgagatgattattagatttaatagcatctcgttcacgtttgaacagtttattgcgtgcgctgaggtcggcaactacggcgtccgctttagtactcctcccataatactttacgctattaatctttaaaatttcatagactttatctagatcgctttctggtaacatgatatcatgtgtaaaaagttttaacatgtcggtcggcattctatttagatcattaactctagaaatctgaagaaagtaattagctccgtattccagactaggtaatgggcttttacctagagacagattaagttctggcaatgtttcataaaatggaagaaggacatgcgttccctcccggatattttttacaatttcatccatttacaactctatagtttgttttcattattattagttattatctcccataatcttggtaatacttaccccttgatcgtaagataccttatacaggtcattacatacaactaccaattgtttttgtacataatagattggatggttgacatccatggtggaataaactactcgaacagatagtttatctttccccctagatacattagccgtaatagttgtcggcctaaagaatatctttggtgtaaagttaaaagttagggttcttgttccattattgctttttgtcagtagttcattataaattctcgagatgggtccgttctctgaatatagaacatcatttccaaatctaacttctagtctagaaataatatcggtcttattcttaaaatctattcccttgatgaagggatcgttaatgaacaaatccttggcctttgattcggctgatctattatctccgttatagacgttacgttgactagtccaaagacttacaggaatagatgtatcgatgatgttgatactatgtgatatgtgagcaaagattgttctcttagtggcatcactatatgttccagtaatggcggaaaactttttagaaatgttatatataaaagaattttttcgtgttccaaacattagcagattagtatgaagataaacactcatattatcaggaacattatcaatttttacatacacatcagcatcttgaatagaaacgataccatcttctggaacctctacgatctcggcagactccggataaccagtcggtggaccatcgctaacaataactagatcatccaacaatctactcacatatgcatctatataatctttttcatcttgtgagtaccctggatacgaaataaatttattatccgtatttccataataaggtttagtataaacagagagagatgttgccgcatgaacttcagttacagtcgccgttggttggtttatttgacctattactctcctaggtttctctataaacgatggtttaatttgtacattcttaaccatatatccaataaagctcaattcaggaacataaacaaattctttgttgaacgtttcaaagtcgaacgaagagtcacgaataacgatatcggatactggattgaaggttaccgttacggtaatttttgaatcggatagtttaagactgctgaatgtatcttccacatcaaacggagttttaatataaacgtatactgtagatggttctttaatagtgtcattaggagttaggccaatagaaatatcattaagttcactagaatatccagagtgtttcaaagcaattgtattattgatacaattattatataattcttcgccctcaatttcccaaataacaccgttacacgaagagatagatacgtgattaatacatttatatccaacatatggtacgtaactgaatcttcccatacctttaacttctggaagttccaaactcagaaccaaatgattaagcgcagtaatatactgatccctaatttcgaagctagcgatagcctgattgtctggaccatcgtttgtcataactccggatagagaaatatattgcggcatatataaagttggaatttgactatcgactgcgaagacattagaccgtttaatagagtcatccccaccgatcaaagaattaatgatagtattattcattttctatttaaaatggaaaaagcttacaataaactccgtagagaaatatctataatttgtgagttttccttaaagtaacagcttccgtaaacgccgtctttatctcttagtaggtttattgtatttatgaccttttccttatcttcatagaatactaaaggcaacaaagaaatttttggttcttctctaagagctacgtgagacttaaccatagaagccaacgaatccctacatattttagaacagaaataccctacttcaccacccttgtatgtctcaatactaataggtctaaaaaccaaatcttgattacaaaaccaacacttatcaattacactatttgtcttaatagacacatctgccatagatttataatactttggtagtatacaagcgagtgcttcttctttagcgggcttaaagactgctttaggtgctgaaataaccacatctggaaggcttactcgcttagccatttaattacggaactatttttttatacttctaatgagcaagtagaaaacctctcatctacaaaaacgtactcgtgtccataatcctctaccatagttacacgttttttagatctcatatgtgctaaaaagttttcccatactaattggttactattatttttcgtataatttttaacagtttgaggttttagatttttagttacagaagtgatatcgaatattttatccaaaaagaatgaataattaattgtcttagaaggagtgttttcttggcaaaagaataccaagtgcttaaatatttctactacttcattaatcttttctgtactcagattcagtttctcatcttttacttgattgattatttcaaagactaacttataatcctttttatttattctctcgttagccttaagaaaactagatacaaaatttgcatctacatcatccgtggatatttgatttttttccatgatatccaagagttccgagataatttctccagaacattgatgagacaataatctccgcaatacatttctcaaatgaataagtttattagacacgtggaagtttgactttttttgtacctttgtacatttttgaaataccgactcgcaaaaaatacaatattcatatccttgttcagatactataccgttatgtctacaaccgctacataatcgtagattcatgttaacactctacgtatctcgtcgtccaatattttatataaaaacattttatttctagacgttgccagaaaatcctgtaatatttttagttttttgggctgtgaataaagtatcgccctaatattgttaccgtcttccgccaatatagtagttaaattatccgcacatgcagaagaacaccgcttaggcggattcagtacaatgttatatttttcgtaccaactcatttaaatatcataatctaaaatagttctgtaatatgtctagcgctaatatattgatcataatcctgtgcataaattaagatacaacaatgtctcgaaatcatcgacatggcttcttccatagttagaagatcgtcgtcaaagttagcaacgtgattcatcaacatttgctgttttgaggcagcaaatactgaaccgtcgccattcaaccattcataaaaaccatcgtctgaatccattgataatttcttgtactggtttttgagagctcgcatcaatctagcatttctagctcccggattgaaaacagaaagaggatcgtacatccagggtccattttctgtaaatagaatcgtataatgtcccttcaagaagatatcagacgatccacaatcaaagaattggtctccgagtttgtaacagacagcggactttaacctatacatgataccgtttagcataatttctggtgatacgtcaatcggagtatcatctattagagatctaaagccggtgtaacattctccaccaaacatattcttattctgacgtcgttctacataaaacatcattgctccattaacgataacaggggaatgaacagcactacccatcacattagttcccaatggatcaatgtgtgtaactccagaacatcttccatagcctatgttaggaggagcgaacaccactcttccactattgccatcgaatgccatagaataaatatccttggaattgatagaaatcggactgtcggatgttgtgatcatcttcataggattaacaactatgtatggtgccgcctgaagtttcatatcgtaactgatgccgtttataggtctagccacagaaaccaacgtaggtctaaatccaactatagacaaaatagaagccaatatctgttcctcatctgtcataacttgagagcatccagtatgaataatcttcattagatggggatctaccgcatcatcatcgttacaataaaaaattcccattctaatgttcataattgcttttctaatcatggtatgcatgtttgctctctgaatctctgtggaaattagatctgatacacctgtaatcactatcggattatcctccgtaagacgattaaccaacaacatataattataagactttacttttctaaattcataaagttgctggattaggctataggtgtctccatgtacatacgcgttctcgagcgcaggaagtttaataccgaatagtgccatcagaataggatgaatatagtaattagtttctggttttctataaataaaagacaaatcttgtgaactagacatatcggtaaaatgcatggattggaatcgtgtagtcgacagaagaatatgatgattagatggagagtatattttatctaactctttgagttggtcaccgattctaggactagctcgagaatgaataagtactaaaggatgagtacatttcacagaaacactagcattgttcaatgtgctctttacatgggtaaggagttgaaatagctcgtttctatttgttctgacaatatttagtttattcataatgttaagcatatcctgaatagtaaagttagatgtgtcatacttgttagtagttagatatttagcaattgcattcccatcatttctcaatctcgtactccaatcatgcgtagatgctacttcatctatagaaaccatacaatcctttttgataggctgttgagattgattatttcctgcacgtttaggtttggtacgttgatttctagcccctgcggatataaagtcatcgtctacaatttgggacaatgaattgcatacactacaagacaaagatttatcagaagtgtgaatatgatcttcatctaccaaagaaagagtttgattagtataactagattttagtcctgcgttagatgttaaaaaaacatcgctattgaccacggcttccattatttatattcgtagtttttactcgaaagcgtgattttaatatccaatcttattacttttggaatcgttcaaaacctttgactaattgtagaatttgatctattgccctacgcgtatactcccttgcatcatatacgttcgtcaccagatcgtttgtttcggcctgaagttggtgcatatctctttcaacattcgacatgagatccttaagggccatatcgtctagattttgttgagatgctgctcctggatttggattttgttgtgctgttgtacatactgtaccaccagtaggtgtaggagtacatacagtggccacaataggaggttgaggaggtgtaaccgttggagtagtacaagaaatacttccatccgattgttgtgtacatgtagttgttggtaacgtctgagaaggttgggtagatggcggcgtcgtcgttttttgatctttattaaatttagagataatatcctgaacagcattgctcggcgtcaacgctggaaggagtgaactcgccggcgcatcagtatcttcagacagccaatcaaaaagattagacatatcagatgatgtattagtttgttgtcgtggttttggtgtaggagcagtactactaggtagaagaataggagccggtgtagctgttggaaccggctgtggagttatatgaatagttggttgtagcggttggataggctgtctgctggcggccatcatattatctctagctagttgttctcgcaactgtctttgataatacgactcttgagactttagtcctatttcaatcgcttcatcctttttcgtatccggatccttttcttcagaataatagattgacgactttggtgtagaggattctgccagcctctgtgagaacttgttaaagaagtccatttaaggctttaaaattgaattgcgattataagattaaatggcagacacagacgatattatcgactatgaatccgatgatctcaccgaatacgaggatgatgaagaagaggaagaagatggagagtcactagaaactagtgatatagatcccaaatcttcttataagattgtagaatcagcatccactcatatagaagatgcgcattctaatcttaaacatatagggaatcatatatctgctcttaaacgacgctatactagacgtataagtctatttgaaatagcgggtataatagcagaaagctataacttgcttcaacgaggaagattacctctagtttcagaattttctgacgaaacgatgaagcaaaatatgctacatgtaattatacaagagatagaggagggttcttgtcctatagtcatcgaaaagaacggagaattgttgtcggtaaacgattttgacaaagatggtctaaaattccatctagactatattatcaaaatttggaaacttcaaaaacgatattagaatttatacgaatatcgttctctaaatgtcacaatcaagtctcgcatgttcagcaatttattgtcgtactttatatcgtgttcattaacgatatcttgcaaaatagtaatgattctatcttccttcgatagatattcttcagagattattgtcttatattctttcttgttatccgatatgaatttgataagactttgaacattattgatacccgtctgtttaattttttctacagatattttagttttggcagattctatcgtatctgtcaatagacatccaacatcgacattcgacgtcaattgtctataaatcaacgtataaattttagaaataacattagcgaattgttgtgcgttgatgtcgttattctgaaacagtatgattttaggtagcattttcttaacaaagagaacgtatttattgttactcagttgaacagatgatatatccagattactaacgcatctgattccgtataccaaactttcagaagaaatggtgtacaattgtttgtattcattcaatgtctctttttcagaaattagtttagagtcgaatactgcaataattttcaagagatagttttcatcagataagattttatttagtgtagatatgataaaactattgttttgttggagaacttgatacgccgcgttctctgtagtcgacgctctcaaatgggaaacaatctccattatttttttggaatcggatacaatatcttcggtatcttgacgcagtctagtatacatagagttaagagagattagagtttgtacattaagcaacatgtctctaaatgtggctacaaacttttcctttttcacatcatctagtttattatataccgatttcacaacggcaccagatttaaggaaccagaatgaaaaactctgataactacaatatttcatcatagttacgattttatcatcttctatagttggtgtaatagcgcatacctttttctccaagactggaaccaacgtcataaaaatgtttaaatcaaaatccatatcaacatctgatgcgctaagaccagtctcgcgttcaagattatctttactaatggtgacgaactcatcgtataaaactctaagtttgtccattatttatttacagatttagttgtttaatttatttgtgctcttccagagttgggatagtatttttctaacgtcggtattatattattaggatctacgttcatatgtatcataatattaatcatccacgttttgataaatctatctttagcttctgaaataacgtatttaaacaaaggagaaaaatatttagctacggcatcagacgcaataacattttttgtaaatgtaacgtatttagacgacagatcttcgttaaaaagttttccatctatgtagaatccatcggttgttaacaccattcccgcgtcagattgaataggagtttgaatagtttgttttggaaatagatccttcaataacttatagttgggtgggaaaaaatcgattttatcactagactctttcttttttactatcattacctcatgaactatttcttgaatgagtatatgtattttctttcctatatcggacgcgttcattggaaaatataccatgtcgttaactataagaatatttttatcctcgtttacaaactgaataatatcagatgtagttcgtaaacgaactatatcatcaccagcacaacatctaactatatgatatccactagtttcctttagccgtttattatcttgttccatattagcagtcattccatcatttaagaaggcgtcaaagataatagggagaaatgacattttggattctgttacgactttaccaaaattaaggatatacggacttactatctttttctcaacgtcaatttgatgaacacacgatgaaaatgtgcttctatgagattgatcatgtagaaaacaacaagggatacaatatttccgcatatcatgaaatatattaagaaatcccaccttattatatttccccaaaggatccatgcacgtaaacattatgccgttatcattaataaagacttctttctcatcggatctgtaaaagttgttactgatttttttcattccaggatctagataattaataatgatgggttttctattcttattctttgtattttggcatatcctagaccagtaaacagtttccactttggtaaaatcagcagacttttgaacgctattaaacatggcattaatggcaataactaaaaatgtaaaatatttttctatgttaggaatatggtttttcactttaatagatatatggtttttggccaaaatgatagatatttttttatccgaggatagtaaaatattattagtcgccgtctctataaaaatgaagctagtctcgatatccaattttattctagaattgataggagtcgccaaatgtaccttatacgttatatctcccttgatgcgttccatttgtgtatctatatcggacacaagatctgtaaatagttttacgttattaatcatcacggtatcgccgtcgctagataacgctaatgtaccatccaagtcccaaatggagagatttaactgttcatcgtttagaataaaatgattaccggtcatattaataaagtgttcatcgtatctagataacaacgacttataattaatgtccaagtcttgaactcgctgaatgatcttttttaacccagttagttttagattggtacgaaatatattgttaaactttgattctacagtaatgtccaaatctagttgtggaaatacttccatcaacattgtttcaaacttgataatattattatctacatcttcgtacgatccaaattccggaatagatgtatcgcacgctctggccacccagataaccaaaaagtcacacgctccaggatatacattgtataaaaagctatcgttttttagtagggtttttttctgcgtgtatacgaagggattaaaaatagtattatcaacgtaactatattccaaattattcttatgagaatagataataatatcgtccttaatatctaacaaatttcctaaatatccctttaattgagtcattcgaagcgtcaatagaatatgtctcttaactatttccggctgttgtatatttaaatgacttcgtaaaaaataatatatgggcgacttctcatctatgtaatcatatggagtgagatatagggctcgttctacctcctgccccttacccacctgtaataccaattgcggacttactatatatcgcatatttatatcgtggggtaaagtgaaaatctactaccgatgatgtaagtcttacaatgttcgaaccagtaccagatcttaatttggaggcctccgtagaactaggggaggtaaatatagatcaaacaacacctatgataaaggagaatagcggttttatatcccgcagtagacgtctattcgcccatagatctaaggatgatgagagaaaactagcactacgattctttttacaaagactttattttttagatcatagagagattcattatttgttcagatgcgttgacgctgtaaaagacgtcactattaccaaaaaaaataacattatcgtggcgccttatatagcacttttaactatcgcatcaaaaggatgcaaacttacagaaacaatgattgaagcattctttccagaactatataatgaacatagtaagaaatttaaattcaactctcaagtatccatcatccaagaaaaactcggataccagtttggaaactatcacgtttatgattttgaaccgtattactctacagtagctctggctattcgagatgaacattcatctggcatttttaatatccgtcaagagagttatctggtaagttcattatctgaaataacatatagattttatctaattaatctaaaatctgatcttgttcaatggagtgctagtacgggcgctgtaattaatcaaatggtaaatactgtattgattacagtgtatgaaaagttacaactggtcatagaaaatgattcacaatttacatgttcattggctgtggaatcaaaacttccaataaaattacttaaagatagaaatgaattatttacaaaattcattaacgagttaaaaaagaccagttcattcaagataagcaaacgcgataaggatacgctactaaaatattttacttaggactggagttagaatttatagacgactcatttcgtttatcattgttactattattactattactatcattattagtgttggcattattagtattcttcttgtcatcttgttcagaaatatacagcaatgctatacctaatactaaatacattatcatgctcgcaatggctctaacaacaacgaaccaaaatgaatttggtcgtagcttttgttcacaaaaatacataaagaaatgtctacataaatctatggcgccattggctacttgaaatagcgccagtcctcctacagattttaatatagctgtataacatgacatttattcatcatcaaaagagacagagtcaccatctgtcatatttagattttttttcatgtgttcaaagtatcctctactcatttcattataatagtttatcatacttagaattttaggacggatcaatgagtaagacttgactagatcgtcagtagtaatttgtgcatcgtctattctgcatccgcttcgtcgaataatgtatagcatcgctttgagattctccatagctatcaagtctttatacaatgacatggaaatatctgtgaatactttatacttctccaacatcgatgccttaacatcatcgcctactttagcattgaaaatacgttctattgtgtagatggatgtagcaagatttttaaacaacaatgccatcttacacgatgattgcctcaagtctccaatcgtttgtttagaacgattagctacagagtccaatgcttggctgactagcatattattatctttagaaattgtattcttcaatgaggcgtttatcatatctgtgatttcgttagtcatattacagtctgactgggttgtaatgttatccaacatatcacctatggatacggtacacgtaccagcatttgtaataatcctatctaagatgttgtatggcattgcgcagaaaatatcttctcctgtaatatctccactctcgataaatctactcagattattcttaaatgccttattctctggagaaaagatatcagtgtccatcatttcattaatagtatacgcagaaaagataccacgagtatcaattctatccaagatacttatcggttccgagtcacagataatggtttcctctccttcgggagatcctgcatagaaatatctaggacaatagtttctatactgtctgtaactctgataatctctaaagtcactaactgataccatgaaattgagaagatcaaacgctgaagtaattaatttttctgcctcgtttttactacaactagttttcatcaatgtagtgacgatgtattgtttagttacttttggtctaatactgatgatagagatattattgcttcccataatggatcttctagtagtcaccttaaagcccattgatgcgaatagcagatagataaagtcttggtatgactcctttctaatatagtacggactacctttgtcacccaactttatacccacataagccataacaacctctttaatagccgtttcatgaggtttatcagccatgagcctgagtagttggaagaatctcatgaatcccgtctcagaaagtcctatatgcatgatagatttatctttcctgggaaactctcgtatagtcatagatgaaatactctttaaagtttctgaaataagattagtaacagtcttacctccgactactctaggtaacaaacaaactctaataggtgttttctctgcggagataatatcagaaaggatagagcaataagtagtattattgtgattataaagaccgaatacataacaggtagaatttataaacatcatgtcctgaaggtttttagacttgtattcctcgtaatccataccgtcccaaaacatggatttggtaactttgatagccgtagatctttgttccttcgccaacaggttaaagaaattaataaagaatttgttgtttctatttatgtccacaaattgcacgtttggaagcgccacggttacattcactgcagcattttgaggatcgcgagtatgaagtacgatgttattgtttactggtatatctggaaagaaatctaccagtctaggaataagagattgatatcgcatagaaatagtaaagtttataatctcatcatcgaagagcattttgttaccattgtaataaatatccactctgtcatatgtataaatgaagtactgttcaaacatgatgagatgtttatatgttggcatagtagtgagatcgacgtttggtaatggcaatgtattaagattaactccataatgtctagcagcatctgcgatgttataagcgtcgtcaaagcggggtcgatcttgtattgttatatattgtctaacacctataagattatcaaaatcttgtctgcttaatacaccgttaacaatttttgccttgaattcttttattggtgcattaataacatccttatagaggatgttaaacaaataagtgttatcaaagttaagatctggatatttcttttctgctagaacatccattgagtcggagccatctggtttaatataaccaccgataaatctagctctgtattctgtatccgtcaatctaatattaagaaggtgttgagtgaaaggtggaagatcgtaaaagctgtgagtattaatgataggattagtttccgaactaatgttaattggggtattaataatatctatatttccagcgttaagtgtaacattaaacagttttaattcacgtgacgtggtatcaattaaataattaatgcccaatttggatatagcagcctgaagctcatcttgtttagttacggatcctaatgagttattaagcaatatatcgaacggatgaacgaaggttgttttgagtttgtcgcatactttgtaatctagacatagatgcggaagaacggtagaaactatacgaaataaatattcagagtcctctaattgatcaagagtaactattgacttaataggcatcatttatttagtattaaatgacgaccgtaccagtgacggatatacaaaacgatttaattacagagttttcagaagataattatccatctaacaaaaattatgaaataactcttcgtcaaatgtctattctaactcacgttaacaacgtggtagatagagaacataatgccgccgtagtgtcatctccagaggaaatatcctcacaacttaatgaagatctatttccagatgatgattcaccggccactattatcgaacgagtacaacctcatactactattattgacgatactccacctcctacgtttcgtagagagttattaatatcggaacaacgtcaacaacgagaaaaaagatttaatattacagtatcgaaaaatgctgaagcaataatggaatctagatctatgataacttctatgccaacacaaacaccatccttgggagtagtttatgataaagataaaagaattcagatgttagaggatgaagtggttaatcttagaaatcaacgatctaatacaaaatcatctgataatttagataattttaccaaaatactatttggtaagactccgtacaaatcaacagaagttaataagcgtatagccatcgttaattatgcaaatttgaacgggtcccccttatcagtcgaggacttggatgtttgttcggaggatgaaatagatagaatctataaaacgattaaacaatatcacgaaagtagaaaacgaaaaattatcgtcactaacgtgattattattgtcataaacattatcgagcaggcattgctaaaactcggatttgaagaaatcaaaggactgagtaccgatatcacttcagaaattatcgatgtggagatcggagatgactgcgatgctgtagcatctaaactaggaatcggtaacagtccggttcttaatattgtattgtttatactcaagatattcgttaaacgaattaaaattatttaatttaatacattcccatatccagacaacaatcgtctggattaatctgttcctgtcgtctcataccggacgacatattaatctttttattagtgggcatctttttagatggtttctttttcccagcattaactgagtcgatacctagaagatcgtgattgatctctccgaccattccacgaacttctaattggccgtctctgacggtaccataaactattttaccagcattagtaacagcttggacaatctgaccatccatcgcattgtacgatgtagtagtaactgttgttctacgtctaggagcaccagaagtatttttggagcccttggatgttgatgtagaagaagacgaggattttgattttggtttacatgtaatacattttgaactctttgattttgtatcacatgcgccggcagtcacatctgtttgagaattaagattattgttgcctcctttgacggctgcatctccaccgatttgcgctagtagatttttaagctgtggtgtaatcttattaactgtttcgatataatcatcgtaactgcttctaacggctaaattttttttatccgccatttagaagctaaaaatatttttatttatgcagaagatttaactagattatacaatgaactaatatgatccttttccagattatttacaaacttggtattttttggttctggaggaggcgaatttaaattcggacttggattcggattttgtaagttcttgatcttattatacatcgagtataggatggcgacagtaactgctacacaaataccgatcaaaagaagaataccaatcatttattgacaataacttcactattgatcaagtatgcaatatatcatcttttcactaaataagtagtaataatgattcaacaatgtcgagatatatggacgataataatttagttcatggaaatatcgctatgattggtgtgaatgactccgctaactctgtggggtgcgcagtgctttccccacatagaataaattagcattccgactgtgataataataccaagtataaacgccataatactcaatactttccatgtacgagtgggactggtagacttactaaagtcaataaaggcgaagatacacgaaagaatcaaaagaatgattccagcgattagcacgccggaaaaataatttccaatcataagcatcatgtccatttaactaataaaaattttaaatcgccgaatgaacaaagtggaatataaaccatataaaaacaatagtttgtactgcaaaaataatatctatttttgttttcgaagatatggtaaaattaaatagtagtacacagcatgttataactaacagcagcaacggctcgtaattacttatcatttactagacgaaaaggtggtgggatattttcttgctcaaataatacgaatatatcacccatccattttatgcgatgtttatatactctaatctttaatagatctatagacgacgggtttaccaacaatatagattttatcgattcatctaatttaaacccttccttaaacgtgaatgatctattatctggcataacgatgaccctacctgatgaatcggacaatgtactgggccatgtagaataaattatcaacgaattatcgtctacgaacatttatatcatttgttttaattttaggacgcgaataaatggatataaaatagaaaataacagatattacaaccagtgttatggccgcgcccaaccaggtaggcagttttattttatcttttactacaggttctcctggatgtacgtcaccaacggcggacgtagttctagtacaattagacgtaagttccgcttgggaattttttaacgctaaagagttaacgttaatcgtgcacccaacgtatttacatctagttcgttgaacatcttgattataatataaccattttctatctctagattcgtcagtgcactcatgtaaccaacataccctaggtcctaaatatttatctccggaattagattttggataattcgcgcaccaacaatttctatttcctttatgatcgttacaaaagacgtataatgccgtatccccaaaagtaaaataatcaggacgaataattctaataaactcagaacaatatctcgcatccatatgtttggagcaaatatcggaataagtagacatagccggtttccgttttgcacgtaaccattctaaacaattggggtttccaggatcgtttctacaaaatccagtcatgaaatcgtcacaatgttctgtcttgtaattattattaaatatttttggacagtgtttggtatttgtcttagaacaacattttgccacgctatcactatcgcccaggagataatccttttttataaaatgacatcgttgcccggatgctatataatcagtagcgtgttttaaatccttaatatattcaggagttacctcgttctgataatagattaatgatccaggacgaaatttgaaagaactacatggttctccatgaattaatacatattgtttagcaaattcaggaactataaaactactacaatgatctatcgacataccatctatcaaacaaaacttgggtttaatttctcccggagatgtttcataatagtacgtataactttcttctgcaaacttaacagctctattatattcaggataattaaaacctaattccatatatttgtctcgtatatctgctattcctggtgctattttgattctattaagagtaacagctgcccccattcttaataatcgtcagtatttaaactgttaaatgttggtatatcaacatctaccttatttcccgcagtataaggtttgttgcaggtatactgttcaggaatggttacatttatacttcttctatagtcctgtctttcgatgttcatcacatatgcaaagaacagaataaacaaaataatgtaagaaataatattaaatatctgtgaattcgtaaatacattgattgccataataattacagcagctacaatacacacaatagacattcccacagtgttgccattacctccacgatacatttgagttactaagcaataggtaataactaagctagtaagaggcaatagaaaagatgagataaatatcatcaatatagagattagaggagggctatatagagccaagacgaacaaaatcaaaccgagtaacgttctaacatcattatttttgaagattcccaaataatcattcattcctccataatcgttttgcatcatacctccatctttaggcataaacgattgctgctgttcctctgtaaataaatctttatcaagcactccagcacccgcagagaagtcgtcaagcatattgtaatatcttaaataactcatttatatattaaaaaatgtcactattaaagatggagtataatctttatgccgaactaaaaaaaatgacttgtggtcaacccctaagtctttttaacgaagacggggatttcgtagaagttgaaccgggatcatcctttaagtttctgatacctaagggattttacgcctctccttccgtaaagacgagtctagtattcgagacattaacaacgaccgataataaaatcactagtatcaatccaacaaatgcgccaaagttatatcctcttcaacgcaaagtcgtatctgaagtagtttctaatatgaggaaaatgatcgaatcaaaacgtcctctatacattactcttcacttggcgtgtggatttggtaagactattaccacgtgttatcttatggctacacacggtagaaaaaccgtcatttgcgtacccaataaaatgttaatacatcaatggaagacacaggtagaggcagtcggattggaacataagatatccatagatggagtaagtagtctattaaaggaactaaagactcaaagtccggatgtattaatagtagtcagtagacatctgacaaacgatgccttttgtaaatatatcaataagcattatgatttgttcatcttggatgaatcacatacgtataatctgatgaacaatacagcagttacaagatttttagcgtattatcctccgatgatgtgttattttttaactgctacacctagaccatctaaccgaatttattgtaacagtattattaatattgccaagttatccaatctaaaaaaaactatctatgcagtagatagtttttttgagccatattccacagataatattagacatatggtaaaacgactagatggaccatctaataaatatcatatatataccgagaagttattatctgtagacgagcctagaaatcaacttattcttgataccctggtagaagaattcaagtcaggaactattaatcgcattttagttattactaaactacgtgaacatatggtattattctacaaacgattattagattttttcggaccagaggttgtatttataggagacgcccaaaatagacgtactccagatatggtcaaatcaatcaaggaactaaatagatttatattcgtatccaccttattttattccggtactggtttagatattcctagtttggattcgttgttcatttgctcggcagtaatcaacaatatgcaaatagagcaattactagggagggtatgtcgagaaacagaactattagataggacggtatatgtatttcctaacacatccatcaaagaaataaagtacatgataggaaatttcatgcaacgaattattagtctgtctgtagataaactaggatttaaacaaaaaagttatcggaaacatcaagaatccgatcccacttctgtatgtacaacatcctccagagaagaacgtgtattaaatagaatatttaactcgcaaaatcgttaagaagtttaagcgacgatccgcatgctgcgcaggccagtgtattacccctcatagtattaatataatccaatgatacttttgtgatgtcggaaatcttaaccaatttagactgacaggcagaacacgtcatgcaatcatcatcgtcatcgataactgtagtcttgggcttctttttgcgactcttcattccggaacgcacattggtgctatccatttaggtagtaaaaaataagtcagaatatgccctataacacgatcgtgcaaaacctggtatatcgtctctatctttatcacaatatagtgtatcgacatttttattattattgacctcgtttatcttggaacatggaatgggaacatttttgttatcaacggccatctttgccttaattccagatgttgtaaaattataactaaacagtctatcatcgacacaaatgaaattcttgtttagacgtttgtagtttacgtatgcggctcgttcgcgtctcattttttcagatattgcaggtactataatattaaaaataagaatgaaataacataggattaaaaataaagttatcatgacttctagcgctgatttaactaacttaaaagaattacttagtctgtacaaaagtttgagattttcagattctgcggctatagaaaagtataattctttggtagaatggggaacatctacttactggaaaataggcgtgcaaaaggtagctaatgtcgagacgtcaatatctgattattatgatgaggtaaaaaataaaccgtttaatattgatccgggctattacattttcttaccggtatattttgggagcgtctttatttattcgaagggtaaaaatatggtagaacttggatctggaaactcttttcaaataccagatgatatgcgaagtgcgtgtaacaaagtattagacagcgataacggaatagactttctgagatttgttttgttaaacaatagatggataatggaagatgctatatcaaaatatcagtctccagttaatatatttaaactagctagtgagtacggattaaacatacccaaatatttagaaattgaaatagaggaagacacattatttgacgacgagttatactctattatagaacgctctttcgatgataaatttccaaaaatatccatatcgtatattaagttgggagaacttagacggcaagttgtagactttttcaaattctcattcatgtatattgagtccatcaaggtagatcgtataggagataatatttttattcctagcgttataacaaaatcaggaaaaaagatattagtaaaagatgtagaccatttaatacgatccaaggttagagaacatacatttgtaaaagtaaaaaagaaaaacacattttccattttatacgactatgatggaaacggaacagaaactagaggagaagtaataaaacgaattatagacactataggacgagactattatgttaacggaaagtatttctctaaggttggtagtgcaggcttaaagcaattgactaataaattagatattaatgagtgcgcaactgtcgatgagttagttgatgagattaataaatccggaactgtaaaacgaaaaataaaaaaccaatcagcatttgatttaagcagagaatgtttgggatatccagaagcggattttataacgttagttaataacatgcggttcaaaatagaaaattgtaaggttgtaaatttcaatattgaaaatactaattgtttaaataacccgagtattgaaactatatatggaaactttaaccagttcgtctcaatctttaatgtcgtcaccgatgtcaaaaaaagattattcgagtgaaataatatgcgcctttgatataggtgcaaaaaatcctgccagaactgttttagaagtcaaggataactccgttagggtattggatatatcaaaattagactggagttctgattgggaaaggcgcatagctaaagatttgtcacaatatgaatacactacagttcttctagaacgtcagcctagaaggtcgccgtatgttaaatttatctattttattaaaggctttttatatcatacatcggctgccaaagttatttgcgtctcgcctgtcatgtctggtaattcatatagagatcgaaaaaagagatcggtcgaagcatttcttgattggatggacacattcggattgcgagactccgttccggatagacgcaaattagacgatgtagcggatagtttcaatttggctatgagatacgtattagataaatggaatactaattatacaccttataataggtgtaaatctagaaattacataaaaaaaatgtaataacgttagtaacgccattatggataatctatttacctttctacatgaaatagaagatagatatgccagaactatttttaactttcatctaataagttgcgatgaaataggagatatatatggtcttatgaaagaacgcatttcctcagaggatatgtttgataatatagtgtataataaagatatacatcctgccattaagaaactagtgtattgcgacatccaacttactaaacacattattaatcagaatacgtatccggtatttaacgattcttcacaagtgaaatgttgtcattatttcgacataaactcagataatagcaatattagctctcgtacagtagagatatttgagagggaaaagtcatctcttgtatcatatattaaaactaccaataagaagagaaaggtcaattacggcgaaataaagaaaactgttcatggaggcactaatgcaaattacttttccggtaaaaagtctgacgagtatctgagtactacagttagatccaacattaatcaaccttggatcaaaaccatctctaagaggatgagagttgatatcattaatcactctatagtaacgcgtggaaaaagctctatattacaaactatagaaattatttttactaatagaacatgtgtgaaaatattcaaggattctactatgcacattattctatccaaggacaaggatgaaaaggggtgtatacacatgattgacaaattattctatgtctattataatttatttctgttgttcgaagatatcatccaaaacgagtactttaaagaagtagctaatgttgtaaaccacgtactcacggctacggcattagatgagaaattattcctaattaagaaaatggctgaacacgatgtttatggagttagcaatttcaaaatagggatgtttaacctgacatttattaagtcgttggatcataccgttttcccctctctgttagatgaggatagcaaaataaagttttttaaggggaaaaagctcaatattgtagcattacgatctctggaggattgtataaattacgtgactaaatccgagaatatgatagaaatgatgaaggaaagatcgactattttaaatagcatagatatagaaacggaatcggtagatcgtctaaaagaattgcttctaaaatgaaaaaaaacactaattcagaaatggatcaacgactagggtataagtttttggtgcctgatcctaaagccggagttttttatagaccgttacatttccaatatgtatcgtattctaattttatattgcatcgattgcatgaaatcttgaccgtcaagcggccactcttatcgtttaagaataatacagaacgaattatgatagaaattagcaatgttaaagtgactcctccagattactcacctataatcgcgagtattaaaggtaagagttatgacgcattagccacgttcactgtaaatatctttaaagaggtaatgaccaaagagggtatatccatcactaaaataagtagttatgagggaaaagattctcatttgataaaaattccgctactaataggatacgggaataaaaatccacttgatacagccaagtatcttgttcctaatgtcataggtggagtctttatcaataaacaatctgtcgaaaaagtaggaattaatctagtagaaaagattacaacatggccaaaatttagggttgttaagccaaactcattcactttctcgttttcctccgtatcccctcctaatgtattaccgacaagatatcgccattacaagatatctctggatatatcacaattggaagcgttgaatatatcatcgacaaagacatttataacggtcaatattgttttgctgtctcaatatttatctagagtgagtctagaattcattagacgtagtttatcatacgatatgcctccagaagttgtctatctagtaaacgcgataatagatagtgctaaacgaattactgaatctattactgactttaatattgatacatacattaatgacctggtggaagctgaacacattaaacaaaaatctcagttaacgattaacgagttcaaatatgaaatgctgcataactttttacctcatatgaactatacacccgatcaactaaagggattttatatgatatctttactaagaaagtttctctactgtatcttccacacttctagatatccagatagagattcgatggtttgtcatcgcatcctaacgtacggcaaatattttgagacgttggcacatgatgaattagagaattacataggcaacatccgaaacgatatcatgaacaatcacaagaacagaggcacttacgcggtaaacattcatgtactaacaactcccggacttaatcacgcgttttctagcttattgagtggaaagttcaaaaagtcagacggtagttatcgaacacatcctcactattcatggatgcagaatatttctattcctaggagtgttggattttatccggatcaagtaaagatttcaaagatgttttctgtcagaaaataccatccaagtcaatatctttacttttgttcatcagacgttccggaaagaggtcctcaggtaggtttagtatctcaattgtctgtcttgagttccattacaaatatactaacgtctgagtatttggatttggaaaagaaaatttgtgagtatatcagatcatattataaagatgatataagttactttgaaacaggatttccaatcactatagaaaatgctctagtcgcatctcttaatccaaatatgatatgtgattttgtaactgactttagacgtagaaaacggatgggattcttcggtaacttggaggtaggtattactttagttagggatcacatgaatgaaattcgcattaatattggagcgggaagattagtcagaccattcttggttgtggataacggagagctcatgatggatgtgtgtccggagttagaaagcagattagacgacatgacattctctgacattcagaaagagtttccgcatgtcatcgaaatggtagatatagaacaatttacttttagtaacgtatgtgaatcggttcaaaaatttagaatgatgtcaaaggatgaaagaaagcaatacgatttatgtgactttcctgccgaatttagagatggatatgtagcatcttcactagtgggaatcaatcacaattctggacccagagctattcttggatgtgctcaagctaaacaagctatctcttgtctgagttcggatatacgaaataaaatagacaatggaattcatttgatgtatccagagaggccaatcgtgattagtaaggctttagaaacttcaaagattgcggctaattgcttcggccaacatgttactatagcattaatgtcgtacaaaggtatcaatcaagaggatggaattatcatcaaaaaacaatttattcagagaggcggtctcgatattgttacagccaagaaacatcaagtagaaattccattggaaaactttaataacaaagaaagagataggtctaacgcctattcaaaattagaaagtaatggattagttagactgaatgctttcttggaatccggagacgctatggcacgaaatatctcatcaagaactcttgaagatgattttgctagagataatcagattagcttcgatgtttccgagaaatataccgatatgtacaaatctcgcgttgaacgagtacaagtagaacttactgacaaagttaaggtacgagtattaaccatgaaagaaagaagacccattctaggagacaaatttaccactagaacgagtcaaaagggaacagtcgcgtatgtcgcggatgaaacggaacttccatacgacgaaaatggtatcacaccagatgtcattattaattctacatccatcttctctagaaaaactatatctatgttgatagaagttattttaacagccgcatattctgctaagccgtacaacaataagggagaaaaccgacctgtctgttttcctagtagtaacgaaacatccatcgatacatatatgcaattcgctaaacaatgttatgagcattcaaatccgaaattgtccgatgaagaattatcggataaaatcttttgtgaaaagattctctatgatcctgaaacggataagccttatgcatccaaagtattttttggaccaatttattacttgcgtctgaggcatttaactcaggacaaggcaaccgttagatgtagaggtaaaaagacgaagctcattagacaggcgaatgagggacgaaaacgtggaggaggtatcaagttcggagaaatggagagagactgtttaatagcgcatggtgcagccaatactattacagaagttttgaaagattcggaagaagattatcaagatgtgtatgtttgtgaaaattgtggagacatagcagcacaaatcaagggtattaatacatgtcttagatgttcaaaacttaatctctctcctctcttaacaaaaattgataccacgcacgtatctaaagtatttcttactcaaatgaacgccagaggcgtaaaagtcaaattagatttcgaacgaaggcctccttcgttttataaaccattagataaagttgatctcaagccgtcttttctggtgtaatattctagtttggtagtagatacatatcaatatcatcaaattcgagatccgaattataaaatgggcgtggattgttaactatagaatcggacgtctgatattcgaaaatctgtggagtttcaggttttggtggaggtgtaactgctacttgggatactgaagtctgatattcagaaagctgtggatgttctggttcggcatccaccgatggtgtcacatcactaatcggttcggtaacgtctgtggatggaggtgctacttctacagaacctgtagcctcagttgtcaacggagatacatttttaatgcgagaaaatgtataatttggtaatggtttcttatgtggatctgaagaagaggtaagatatctactagaaagataccgatcacgttctagttctcttttgtagaacttaactttttctttctccgcatctagttgatattccaacctcttcacgttactacgttcagattccaattcacgttcgcatgggttacctccgcagtttttacgagcgatttcacgttcagccttcatgcgtctctccctctctctatcgagtttatcagagcagtctttctgaaggcgatcgaactccataaatttctccaacgctttgattgtttccatagatttccgaagttcagcttttaggactgtgattctttttctttcgaattcacagctggatgtacaaccgtttccattaccgccatctctaagtttcttttctagatcggcaacatttcatccccatgccttttacattcctcgagtctactgtcgtcgaaatatcgttccagctccttttcgacatcaataactttagcacgttgtctctcaagctctcttttgtagttatctgattccctggcacgtttaagatcttcatgcaattgagtcagctcttaacttcctctcttgcttcttcgtcatagtacgcgcaatcactgtgagatccattgttaccacgtctacactcggcgagctcgcgtttaagagattcaatttcccgtttgtattggtccatgtttccattgctaccaccattagatttacaggctgctagttgtcgttcgagatcagaaatacgggttttcttggaattgatttcgtcgatgtacttggcatcgaaacacttattaagttctttttccaattctacgattttatttctttcgcgagtcaattccctcctgtagtaactatctgttttgtcagattcacgctctctacgtagactttcttgcaagttactaatttgttccctagcacgtccgagtttagttttatatgctgaatagagttctgattcatcctttgagcagatctctagcgatcgtttaagattcctaattctagtctttagcctatttacctcctcagaagatgttccgttaccgttgcgtttacactcgttaagctgtctatcaagatccatgattctatctctaagacgttgcatctctctttccatatcagcattgctttcattattacgtctgcagtcactcaactgtctttcaatatctgagattctatctctaagacgtcgcatctctctctgtttcggcattggtttcattattacgtttacagtcgttcaactgtctttcaagatctgatattctagattggagtctgctaatctctgtagcattttcacggcattcactcagttgtctttcaagatctgaaattttagattggagtctgctaatctctgtaagatttcctcctccgctctcgatgcagtcggtcaacttattctctagttctctaatacgcgaacgcagtgcatcaacttcttgcgtgtcttcctggttgcgtgtacattcatcgagtctagattcgagatctctaacgcgtcgtcgttcttcctcaagttctctgcgtactacagaaagcgtgtccttatcttgttgatatttagcaatttctgattctagagtactgattttgcttacgtagttactaatatttgtcttggccttatcaagatcctccttgtatttgtcgcattccttgatatccctacgaagtctggacagttcccattcgacattacgacgtttatcgatttcagctcggagatcgtcatcgcgttgttttagccacatacgactgagttcaagttctcgttgacaagatccatctacttttccattcctaatagtatccagttccttttctagttctgaacgcatttctcgttccctatcaagcgattctctcaattctcggatagtcttcttatcaatttctaataaatctgaaccatcatctgtcccattttgaatatccctgtgttctttgatctcttttgtaagtcggtcgattctttcggttttataaacagaatccctttccaaagtcctaatcttactgagtttatcactaagttctgcattcaattcggtgagttttctcttggcttcttccaactctgttttaaactctccactatttccgcattcttcctcgcatttatctaaccattcaattagtttattaataactagttggtaatcagcgattcctatagccgttcttgtaattgtgggaacataattaggatcttctaatggattgtatggcttgatagcatcatctttatcattattagggggatggacaaccttaattggttggtcctcatctcctccagtagcgtgtggttcttcaataccagtgttagtaataggcttaggcaaatgcttgtcgtacgcgggcacttcctcatccatcaagtatttataatcgggttctacttcagaatattcttttctaagagacgcgacttcgggagttagtagaagaactctgtttctgtatctatcaacgctggaatcaatactcaagttaaggatagcgaatacctcatcgtcatcatccgtatcttctgaaacaccatcatatgacatttcatgaagtctaacgtattgataaatagaatcagatttagtattaaacagatccttaacctttttagtaaacgcatatgtatattttagatctccagatttcataatatgatcacatgccttaaatgtcagtgcttccatgatataatctggaacactaatgggtgacgaaaaagatacagcaccatatgctacgttgataaataaatctgaaccactaagtagataatgattaatgttaagaaagaggaaatattcagtgtataggtatgtcttggcgtcatatcttgtactaaacacgctaaacagtttgttaatgtgatcaatttccaatagattaattagagcagcgggaataccaacaaacatattaccacatccgtattttctatgaatatcacatatcatgttaaaaaatcttgatagaagagcgaatatctcgtctgacttaatgagtcgtagttcagcagcaacataagtcataactgtaaatagaacatactttcctgtagtgttgattctagactccacatcaacaccattattaaaaatagttttatatacatctttaatctgctctccgttaatcgtcgaacgttctagtatacggaaacactttgatttcttatctgtagttaatgacttagtgatatcacgaagaatattacgaattacatttcttgtttttcttgagagacctgattcagaactcaactcatcgttccatagtttttctacctcagtggcgaaatctttggagtgcttggtacatttttcaataaggttcgtgacctccatttattataaaaaatttattcaaaacttaactacaatcgggtaattataaaatcgtagatctcccatgtggcggaatactaccatctatcgcatgtggatggacagtaggtaatggccatgggaacagtaatgtttgcatatttatctttcttgccagtattactgcatattgtcccaatgtttcgatgtgatgttctaacctatcaactgccgctgtatcacaacaatagtgtccgatgaaattaagattatgatccaatgtgtttaatatatgattatcaagtcttatacgatccgcgtcttttttgacaggatcaggttcttctacaggaagaagtttcggcctcttatgatattcatgtctgggaaacggtggtctagggtgaggctccggtatcggagtgggttttggattataatcatcatcgtctatgacatcatcatcatcttcgacttcgatatttattttgctatcttgatgatgtcctgtatcagttgcattttcagcactcgactgaatattagcgcattcattgtctattattaccatatttctaaacccaaaatgtatgtgttgaacatcagtactatcgttgatgagtcttatagcatgaattcgcttatcgttatcgggtttatcttctgtcaccttagcaattccttttttattaaactctacataatcatatccatttctattgtttgttctaatataaacgagtatagcatcattgctaaatttttcaatagtatcaaaaacagaatatcctaaaccatataatatatattcaggaacactcaaactaaatgtccaggattctcctaaatacgtaaactttaatagtgcgaaatcattcaaaaatctaccacttatagatagatagtacataaatgcgtatagtagtctacctatctctttattatgaaaaccggcattacgatcatatatgtcgtgatatacctgtgatccgtttacgttaaaccataaatacatgggtgatcctataaacatgaatttatttctaattctcagagctatagttaattgaccgtgtaatatttgcttacatgcatacttgatacgcttattaataagatttttatcattgctcgttatttcagaatcgtatatataaggagtaccatcgtgattcttaccagatattatacaaaatactatatataaaatatattgacccacgttagtaatcatataaatgtttaacgttttaaattttgtattcaatgatccattatcatacgctatcatggtcttgtaatattcattctttaaaatataatattgtgttagccattgcattggagctcctaatggagattttctattctcatccattttaggataggctttcataaagtccctaataacttcgtgaataatgtttctatgttttctactgatgcatgtatttgcttcgatttttttatcccatgtttcatctatcatagatttaaacgcagtaatgctcgcaacattaacatcttgaaccgttggtacaattccgttccataaatttataatgttcgccatttatataactcattttttgaatatacttttaattaacaaaagagttaagttactcatatggacgccgtccagtctgaacatcaatctttttagccagagatatcatagccgctcttagagtttcagcgtgattttccaacctaaatagaacttcatcgttgcgtttacaacacttttctatttgttcaaactttgttgttacattagtaatctttttttccaaattagttagccgttgtttgagagtttcctcattgtcgtcttcatcggctttaacaattgcttcgcgtttagcctctggctttttagcagcctttgtagaaaaaaattcagttgctggaattgcaagatcgtcatctccggggaaaagagttccgtccatttaaagtacagattttagaaactgacactctgcgttatttatatttggtacaacacatggattataaatattgatgttaataacatcagaaaatgtaaagtctatacattgttgcatcgtgttaaattttctaatggatctagtattattgggtccaacttctgcctgaaatccaaatatggaagcggatacaaaaccgtttcctggataaaccacacatctccacttttgctttacatcagaaattgtgtcgttgacatcttgaactctcctatctaatgccggtgttccacctatagattttgaatattcgaatgctgcatgagtagcattaaattccttaatattgccataattttcatatattgagtaaccctggataaaaagtaaacacaccgcagccgtcgctaccacaataaaaaaaattgatagagagttcatttataatctattagaagctgacaaaatttttttacacgcatcagacaatgctttaataaatagttcaacatctacttttgtcatatcgaaccgatggtatgattctaacctagaattacatccgaaaaagttgactatgttcatagtcattaagtcattaacaaacaacattccagactctggattataagacgatactgtttcgtcacaattacctaccttaatcatgtgattatgaatattggctattagagcaccttctaagaaatctataatatctttgaaacacgatttaaaatcaaaccacgaatatacttctacgaagaaagttagtttacccataggagaaataactataaatggagatctaaatacaaaatccggatctatgatagttttaacattattatattctctattaaatacctccacatctaaaaatgttaattttgaaactatgtcttcgtttattaccgtacctgaactaaacgctataagctctattgtttgagaactctttaaacgatattcttgaaatacatgtaacaaagtttcctttaactcggtcggtttatctaccatagttacagaatttgtatccttatctataatataataatcaaaatcgtataaagttatataattatcgcgttcagattgggatcttttcaaatagactaaaaaccccatttctctagtaagtatcttatgtatatgtttgtaaaatatcttcatggtgggaatatgctctaccgcagttagccattcctcattgacagcggtagatgtattagacaaaactattccaatgtttaacaagggccattttacgagattattaaatccttgtttgataaatgtagccaatgagggttcgagttcaacgacgattgaattctcttcccgcggatgctgcatgatgaacgacgggatgttgttcgattgatttggaattctttttcgactttttgtttatattaaatattttaaaatttatagcggatagcaattcatgtaccacggataatgtagacgcgtattgcgcatcgatatctttattattagataaatttatcaataaatgtgagaagtttgcctcgttaaggtcttccatttaaatattatataaacatttgtgtttgtatcttattcgtcttttatggaatagttttttactagtaaagctgcaattacacactttgtccgtaaaacataaatataaacaccagcttttatcaatcgttccaaaaagtcgacggcggacatttttaacatggcatctattttaaatacacttaggtttttggaaaaaacatcattttataattgtaacgattcaataactaaagaaaagattaagattaaacataagggaatgtcatttgtattttataagccaaagcattctaccgttgttaaatacttgtctggaggaggtatatatcatgatgatttggttgtattggggaaggtaacaattaataatctaaagatgatgctattttacatggatttatcatatcatggagtgacaagtagtggagcaatttacaaattgggatcgtctatcgatagactttctctaaataggactattgttacaaaagttaataattatgatgatacattttttgacgacgatgattgatcgctattgcacaattttgtttttgtactttctaatatagtgtttaggttctttttcatatgagaatattgatttactaaaatatctatgtttaacttttgttctatgacgtccttatcggcggtatcggtacatatacgtaattcaccttcacaaaatacggagtcttcgataataatagccaatcgattattggatctagctgtctgtatcatattcaacatgtttaatatatcctttcgtttcccctttacaggcatcgatcgtagcatattttccgcgtctgatatggaaatgttaaaactacaaaaatgcgtaatgttagcccgtcctaatattggtacgtgtctataagtttggcatagtagaataatagacgtgtttaaatgccttccaaagtttaagaattctattagagtattgcattttgatagtttatcgcctacatcatcaaaaataagtaaaaagtgtgctgattttttatgattttgtgcgacagcaatacatttttctatgttacttttagttcgtatcagattatattctagagattcctgactactaacgaaattaatatgatttggccaaatgtatccatcataatctgggttataaacgggtgtaaacaagaatatatgtttatattttttaactagtgtagaaaacagagatagtaaatagatagtttttccagatccagatcctcctgttaaaaccattctaaacggcatttttaataaattttctcttgaaaattgtttttcttggaaacaattcataattatatttacagttactaaattaatttgataataaatcaaaatatggaaaactaaggttgttagtagggaggagaacaaagaaggcacatcgtgatataaataacatttattatcatgatgacaccagaaaacgacgaagagcagacatctgtgttctccgctactgtttacggagacaaaattcagggaaagaataaacgcaaacgcgtgattggtctatgtattagaatatctatggttatttcactactatctatgattaccatgtccgcgtttctcatagtgcgcctaaatcaatgcatgtctgctaacgaggctgctattactgacgccgctgttgccgttgctgctgcatcatctactcatagaaaggttgcgtctagcactacacaatatgatcacaaagaaagctgtaatggtttatattaccagggttcttgttatatattacattcagactaccagttattctcggatgctaaagcaaattgcactgcggaatcatcaacactacccaataaatccgatgtcttgactacctggctcattgattatgttgaggatacatggggatctgatggtaatccaattacaaaaactacatccgattatcaagattctgatgtatcacaagaagttagaaagtatttttgtgttaaaacaatgaactaatatttatttttgtacattaataaatgaaatcgcttaatagacaaactgtaagtaggtttaagaagttgtcggtgccggccgctataatgatgatactctcaaccattattagtggcataggaacatttctgcattacaaagaagaactgatgcctagtgcttgcgccaatggatggatacaatacgataaacattgttatttagatactaacattaaaatgtctacagataatgcggtttatcagtgtcgtaaattacgagctagattgcctagacctgatactagacatctgagagtattgtttagtattttttataaagattattgggtaagtttaaaaaagaccaatgataaatggttagatattaataatgataaagatatagatattagtaaattaacaaattttaaacaactaaacagtacgacggatgctgaagcgtgttatatatacaagtctggaaaactggttaaaacagtatgtaaaagtactcaatctgtactatgtgttaaaaaattctacaagtgacaacaaaaaatgaattaataataagtcgttaacgtacgccgccatggacgccgcgtttgttattactccaatgggtgtgttgactataacagatacattgtatgatgatctcgatatctcaatcatggactttataggaccatacattataggtaacataaaaactgtccaaatagatgtacgggatataaaatattccgacatgcaaaaatgctactttagctataagggtaaaatagttcctcaggattctaatgatttggctagattcaacatttatagcatttgtgccgcatacagatcaaaaaataccatcatcatagcatgcgactatgatatcatgttagatatagaagataaacatcagccattttatctattcccatctattgatgtttttaacgctacaatcatagaagcgtataacctgtatacagctggagattatcatctaatcatcaatccttcagataatctgaaaatgaaattgtcgtttaattcttcattctgcatatcagacggcaatggatggatcataattgatgggaaatgcaatagtaattttttatcataaaagttgtaaagtaaataataaaacaataaatattgaactagtagtacgtatattgagcaatcagaaatgatgctggtacctcttatcacggtgaccgtagttgcgggaacaatattagtatgttatatattatatatttgtaggaaaaagatacgtactgtctataatgacaataaaattatcatgacaaaattaaaaaagataaagagttctaattccagcaaatctagtaaatcaactgatagcgaatcagactgggaggatcactgtagtgctatggaacaaaacaatgacgtagataatatttctaggaatgagatattggacgatgatagcttcgctggtagtttaatatgggataacgaatccaatgttatggcgcctagcacagaacacatttacgatagtgttgctggaagcacgctgctaataaataatgatcgtaatgaacagactatttatcagaacactacagtagtaattaatgaaacggagactgttgaagtacttaatgaagataccaaacagaatcctaactattcatccaatcctttcgtaaattataataaaaccagtatttgtagcaagtcaaatccgtttattacagaacttaacaataaatttagtgagaataatccgtttagacgagcacatagcgatgattatcttaataagcaagaacaagatcatgaacacgatgatatagaatcatcggtcgtatcattggtgtgattagtttcctttttataaaattgaagtaatatttagtattattgctgccgtcacgttgtacaaatggagatattccctgtattcggcatttctaaaattagcaattttattgctaataatgactgtagatattatatagatacagaacatcaaaaaattatatctgatgagatcaatagacagatggatgaaacggtacttcttaccaacatcttaagcgtagaagttgtaaatgacaatgagatgtaccatcttattcctcatagattatcgacgattatactctgtattagttctgtcggaggatgtgttatctctatagataatgacatcaatggcaaaaatattctaacctttcccattgatcatgctgtaatcatatccccactgagtaaatgtgtcgtagttagcaagggtcctacaaccatattggttgttaaagcggatatacctagcaaacgattggtaacatcgtttacaaacgacatactatatgtaaacaatctgtcactgattaattatttgccgttgtctgtattcattattagacgagtcaccgactatttggatagacacatatgcgatcagatatttgctaataataagtggtattcccttataaccatcgacgataagcaatatcctattccatcaaactgtataggtatgtcctctgccaagtacataaattctagcatcgagcaagatactttaatccatgtttgtaacctcgagcatccgttcgactcagtatacaaaaaaatgcagtcgtacaattctctacctatcaaggaacaaatattgtacggtagaattgataatataaatatgagcattagtatttctgtggattaatagatttctagtatggggatcattaatcatctctaatctctaaatacctcataaaacgaaaaaaaagctattatcaaatactgtacggaatggattcattctcttctctttttatgaaactctgttgtatatctactgataaaactggaagcaaaaaatctgatagaaagaataagaataagatcaaggattatatggaacacgattattataaaataacaatagttcctggttcctcttccacgtctactagctcgtggtattatacacatgcctagtaatagtctctttgcgttgacggaaagcagactagaaataacaggctaaaatgttcagacaccataatagttcccaacccagataataacagagttccatcaacacattcctttaaactcaatcccaaacccaaaaccgttaaaatgtatccggccaattgatagtagataatgaggtgtacagcgcatgataatttacacagtaaccaaaatgaaaatactttagtaattataagaaatatagacggtaatgtcatcatcaacaatccgataatatgcctgagagtaaacattgacggataaaacaaaaatgctccgcataactctatcatggcaataacacaaccaaatacttgtaagattcctaaattagtagaaaatacaacgaatatcgatgtataagtgatctcgagaaataataagaataaagtaatgcccgtaaagataaacatcaacattgtttggtaatcattaaaccaattagtatgaagttgaactaatttcacagtagattttattccagtgttatcctcgcatgtataagtacctggtaagatatctttatattccataatcaatgagacatcactatctgataacgaatgaagtctagcactagtatgccatttacttaatattgtcgtcttggaagttttattataagttaaaatatcatggttatccaatttccatctaatatactttgtcggattatctatagtacacggaataatgatggtatcattacatgctgtatactctatggtctttgtagttgttataacaaccaacgtatagaggtatatcaacgatattctaactcttgacattttttatttatttaaaatgatacctttgttatttattttattctattttgctaacggtattgaatggcataagtttgaaacgagtgaagaaataatttctacttacttattagacgacgtattatacacgggtgttaatggggcggtatacacattttcaaataataaactaaacaaaactggtttaactaataataattatataacaacatctataaaagtagaggatgcggataaggatacattagtatgcggaaccaataacggaaatcccaaatgttggaaaatagacggttcagacgacccaaaacatagaggtagaggatacgctccttatcaaaatagcaaagtaacgataatcagtcacaacggatgtgtactatctgacataaacatatcaaaagaaggaattaaacgatggagaagatttgacggaccatgtggttatgatttatacacggcggataacgtaattccaaaagatggtttacgaggagcattcgtcgataaagatggtacttatgacaaagtttacattcttttcactgatactatcggctcaaagagaattgtcaaaattccgtatatagcacaaatgtgcctaaacgacgaaggtggtccatcatcattgtctagtcatagatggtcgacgtttctcaaagtcgaattagaatgtgatatcgacggaagaagttatagacaaattattcattctagaactataaaaacagataatgatacgatactatatgtattcttcgatagtccttattccaagtccgcattatgtacctattctatgaataccattaaacaatctttttctacgtcaaaattggaaggatatacaaagcaattgccgtctccagctcctggtatatgtttaccagctggaaaagttgttccacataccacgtttgaagtcatagaaaaatataatgtactagatgatattataaagcctttatctaaccaacctatcttcgaaggaccgtctggtgttaaatggttcgatataaaggagaaggaaaatgaacatcgggaatatagaatatacttcataaaagaaaattctatatattcgttcgatacaaaatctaaacaaactcgtagctcgcaagtcgatgcgcgactattttcagtaatggtaacttcgaaaccgttatttatagcagatatagggataggagtaggaatgccacaaatgaaaaaaatacttaaaatgtaatcttaattcgagtacaccacacgacaatgaacaaacataagacagattatgctggttatgcttgctgcgtaatatgcggtctaattgtcggaattatttttacagcgacactattaaaagttgtagaacgtaaattagttcatacaccatcaatagataaaacgataaaagatgcatatattagagaagattgtcctactgactggataagctataataataaatgtatccatttatctactgatcgaaaaacctgggaggaaggacgtaatgcatgcaaagctctaaattcaaattcggatctaattaagatagagactccaaacgagttaagttttttaagaagccttagacgaggctattgggtaggagaatccgaaatattaaaccagacaaccccatataattttatagctaagaatgccacgaagaatggaactaaaaaacggaaatatatttgtagcacaacgaatactcccaaactgcattcgtgttacactatataacaattacactacatttttatcataccactacttcggttagatgttttagaaaaaaataaatatcgccgtaccgttcttgtttttataaaaataacaattaacaattatcaaattttttctttaatattttacgtggttgaccattcttggtggtaaaataatctcttagtgttggaatggaatgctgtttaatgtttccacactcatcgtatattttgacgtatgtagtcacatcgtttacgcaatagtcagactgtagttctatcatgcttcctacatcagaaggaggaacagttttaaagtctcttggttttaatctattaccgttagttttcatgaaatcctttgttttatccacttcacattttaaataaatgtccactatacattcttttgttaattttactagatcgtcatgggtcatagaatttataggttccgtagtccatggatccaaactagcaaacttcgcgtatacggtatcgcgattagtgtatacaccaactgtatgaaaattaagaaaacagtttaataaatcaacagaaatatttaatcctccgtttgatacagatgcgccatatttatggatttcggattcacacgttgtttgtctgaggtgttcgtctagtgttgcttctacgtaaacttcgattcccatatattctttattgtcagaatcgcataccgatttatcatcatacactgtttgaaaactaaatggtatacacatcaaaataataaataataacgagtacattctgcaatattgttatcgtaattggaaaaatagtgttcgagtgagttggattatgtgagtattggattgtatattttattttatattttgtaataagaataaaatgctaatgtcaagtttattccaatagatgtcttattaaaaacatatataataaataacaatggctgaatggcataaaattatcgaggatatctcaaaaaataataagttcgaggatgccgccatcgttgattacaagactacaaagaatgttctagctgctattcctaacagaacatttgccaagattaatccgggtgaaattattcctctcatcactaatcgtaatattctaaaacctcttattggtcagaaatattgtattgtatatactaactctctaatggatgagaacacgtatgctatggagttgcttactgggtacgcccctgtatctccgatcgttatagcgagaactcataccgcacttatatttttgatgggtaagccaacaacatccagacgtgacgtgtatagaacgtgtagagatcacgctacccgtgtacgtgcaactggtaattaaaataaaaagtaatattcatatgtagtgtcaattttaaatgatgatgatgaaatggataatatccatattgacgatgtcaataatgccggtattggcatacagttcatcgatttttagatttcattcagaggatgtggaattatgttatgggcatttgtattttgataggatctataatgtagtaaatataaaatataatccgcatattccatatagatataattttattaatcgcacgttaaccgtagatgaactagacgataatgtcttttttacacatggttattttttaaaacacaaatatggttcacttaatcctagtttgattgtctcattatcaggaaacttaaaatataatgatatacaatgctcagtaaatgtatcgtgtctcattaaaaatttggcaacgagtacatctactatattaacatctaaacataagacttattctctacatcggtccacgtgtattactataataggatacgattctattatatggtataaagatataaatgacaagtataatgacatctatgattttactgcaatatgtatgctaatagcgtctacattgatagtgaccatatacgtgtttaaaaaaataaaaatgaactcttaattatgctatgctattagaaatggataaaatcaaaattacggttgattcaaaaattggtaatgttgttaccatatcgtataacttggaaaagataactattgatgtcacacctaaaaagaaaaaagaaaaggatgtattattagcgcaatcagttgctgtcgaagaggcaaaagatgtcaaggtagaagaaaaaaatattatcgatattgaagatgacgatgatatggatgtagaaagcgcgtaatactatctataaaaataagtatataataaatactttttatttacggtactcttactgtgtagtggtgataccctactcgattatttttttaaaaaaatacttattctgattcttctaaccatttccgtgttcgttcgaatgccacatcgacgtcaaagataggggagtagttgaaatctagttctgcattgttggtacgcacctcaaatgtagtgttggatatcttcaacgtatagttgttgagtagtgatggttttctaaatagaattctcttcatatcattcttgcacgcgtacatttttagcatccatcttggaatcctagatccttgttctattcccaatggtttcatcaatagaagattaaacatatcgtacgaacacgatggagagtaatcgtagcaaaagtaagcatttcctttaatcttagatcccggatactggatatattttgcagccaacacgtgcatccatgcagcatttcctacatatacccggctatgcaccgcgtcatcatcgactgtacgatacataatgttaccgtgttgcttacattgctcgtaaaagactttcgtcaatttgtctccttctccgtaaattctagtgggtcttaggcaacaagtatacaattttgctccattcatgattacggaattattggctttcataaccagttgctcggccatacgtttactttttgcgtatacatgtcctggtgatatatcataaagggtatgctcatggccgatgaatggatcaccgtgtttattgggtcctattgcttccatgctactagtatagatcaaatacttgattcctaggtccacacaagctgccaaaatagtctgtgttccataatagtttactttcatgatttcattatcggtgtattttccaaatacatccactagagcagccgtatgaataatcagatttaccccatctagcgcttctctcaccttatcaaagtcgtttatatcacattgtatatagtttataaccttaactttcgaggttattggttgtggatcttctacaatatctatgactctgatttcttgaacatcatctgcactaattaacagttttactatatacctgcctagaaatccggcaccaccagtaaccgcgtacacggccattgctgccactcataatatcagactacttattctattttactaaataatggctgtttgtataatagaccacgataatatcagaggagttatttactttgaaccagtccatggaaaagataaagttttaggatcagttattggattaaaatccggaacgtatagtttgataattcatcgttacggagatattagtcaaggatgtgattccataggcagtccagaaatatttatcggtaacatctttgtaaacagatatggtgtagcatatgtttatttagatacagatgtaaatatatttacaattattggaaaggcgttatctatttcaaaaaatgatcagagattagcgtgtggagttattggtatttcttacataaatgaaaagataatacattttcttacaattaacgagaatggcgtttgatatatcagttaatgcgtctaaaacaataaatgcattagtttacttttctactcagcaaaataaattagtcatacgtaatgaagttaatgatacacactacactgtcgaatttgatagggacaaagtagttgacacgtttatttcatataatagacataatgacaccatagagataagaggggtgcttccagaggaaactaatattggttgcgcggttagtatgacttacttgtataataagtatagttttaaactgattttagcagaatatataagacacagaaatactatatccggcaatatttattcggcattgatgacactagatgatttggctattaaacagtatggagacattgatctattatttaatgagaaacttaaagtagactccgattcgggactatttgactttgtcaactttgtaaaggatatgatatgttgtgattctagaatagtagtagctctatctagtctagtatctaaacattgggaattgacaaataaaaaatataggtgtatggcattagccgaacatatatctgatagtattccaatatctgagctatctagactacgatacaatctatgtaagtatctacgcggacacactgagagcatagaggataaatttgattattttgaagacgatgattcgtctacatgttctgccgtaaccgacagggaaacggatgtataattttttttatagcgtgaaggatatgataaaaaatataattgttgtatttatcccattccaatcaccttatatgattctgtaacacaataaaggagtcttatagatgtatagaggtcagatactggtttgataaactgtttattccacataagtatgtttgactttatggttagacccgcatactttaacaaatcactgaaaattggagttaggtattgacctctcagaatcagttgccgttctggaacattaaatgtattttttatgatatactccaacgcatttatgtgggcatacaacaagtcattactaatggaatattccaagagttttagttgtctagtatttaacaagagaagagatttcaacagactgtttatgaactcgaatgccgcctcattgtcgcttatattgatgatgtcgaattctcccaatatcatcaccgatgagtagctcatcttgttatcgggatccaagttttctaaagatgtcattaaaccctcgatcatgaatggatttatcatcatcgtttttatgttggacatgagcttagtccgtttgtccacatctatagacgacgatttctgaattatttcatatatccctctctttaactccaggaacttgtcaggatggtctactttaatatgttctcgtctaagagatgaaaatctttggatggttgcacgcgacttttctctaaaggatgacgttgcccaagatcctctcttaaatgaatccatcttatccttggacaagatggacagtctattttccttagatggtttaatatttttgttacccatgatctataaaggtagacctaatcgtctcggatgacctatatatttattttcagttttattatacgcataaattgtaaaaaatatgttaggtttacaaaaatgtctcgtggggcattaatcgtttttgaaggattggacaaatctggaaaaacaacacaatgtatgaacatcatggaatcaataccggcaaacacgataaaatatcttaactttcctcagagatccactgtcactggaaagatgatagatgactatctaactcgtaaaaaaacctataatgatcatatagttaatctattattttgtgcaaatagatgggagtttgcatcttttatacaagaacaactagaacagggaattactttaatagttgatagatacgcgttctctggagtagcgtatgccgccgctaaaggcgcgtcaatgactctcagtaagagttatgaatctggattgcctaaacccgacttagttatattcttggaatctggtagcaaagaaattaatagaaacgtcggtgaggaaatttatgaagatgttacattccaacaaaaggtattacaagaatataaaaaaatgattgaagaaggagatattcattggcaaattatttcttctgaattcgaggaagatgtaaagaaggagttgattaagaatatagttatagaggctatacacacggttactggaccagtggggcaactgtggatgtaatagtgaaattacattttttataaatagatgttagtacagtgttataaatggatgaagcatattactctggcaacttggaatcagtactcggatacgtgtccgatatgcataccgaactcgtatcaatatctcaattagttattgccaagatagaaactatagataatgatatattaaacaaggacattgtaaattttatcatgtgtagatcaaacttggataatccatttatctctttcctagatactgtatatactattatagatcaagagaactatcagaccgagttgattaattcattagacgacaatgaaattatcgattgtatagttaataagtttatgagcttttataaggataacctagaaaatatagtagatgctatcatcactctaaaatatataatgaataatccagattttaaaactacgtatgccgaagtactcggttccagaatagccgatatagatattaaacaagtgatacgtaagaatatactacaattgtctaatgatatccgcgaacgatatttgtgaaaatattaaaaaaaaatactttttttattaaatgacgtcgcttcgcgaatttagaaaattatgctgtgatatatatcacgcatcaggatataaagaaaaatctaaattaattagagactttataacagatagggatgataaatatttgatcattaagctattgcttcccggattagacgatagaatttataacatgaacgataaacaaattataaaattatatagtataatatttaaacaatctcaggaagatatgctacaagatttaggatacggatatataggagacactattaggactttcttcaaagagaacacagaaatccgtccacgagataaaagcattttaactttagaagacgtggatagtttcttaactacgttatcatccgtaactaaagaatcgcatcaaataaaattattgactgatattgcatccgtttgtacatgtaatgatttaaaatgtgtagtcatgcttattgataaagatctaaaaattaaagcgggtcctcggtacgtacttaacgctattagtcctcatgcctatgatgtgtttagaaaatctaataacttgaaagagataatagaaaattcatctaaacaaaatctagactctatatctatttctgttatgactccaattaatcccatgttagcggaatcgtgtgattctgtcaataaggcgtttaaaaaatttccatcaggaatgtttgcggaagtcaaatacgatggtgaaagagtacaagttcataaaaataataacgagtttgccttctttagtagaaacatgaaaccagtactctctcataaagtggattatctcaaagaatacataccgaaagcatttaaaaaagctacgtctatcgtattggattctgaaattgttcttgtagacgaacataatgtaccgctcccgtttggaagtttaggtatacacaaaaagaaagaatataaaaactctaacatgtgtttgttcgtgtttgactgtttgtactttgatggattcgatatgacggacattccattgtacgaacgaagatcttttctcaaagatgttatggttgaaatacccaatagaatagtattctcagagttgacgaatattagtaacgagtctcagttaactgacgtattggatgatgcactaacgagaaaattagaaggattggtcttaaaagatattaatggagtatacgaaccgggaaagagaagatggttaaaaataaagcgagactatttgaacgagggttccatggcagattctgccgatttagtagtactaggtgcctactatggtaaaggagcaaagggtggtatcatggcagtctttctaatgggttgttacgacgatgaatccagtaaatggaagacggttaccaagtgttcaggacacgatgataatacgttaagggagttgcaagaccaattaaagatgattaaaattaacaaggatcccaaaaaaattccagagtggttagtagttaataaaatctatattcccgattttgtagtagaggatccgaaacaatctcagatatgggaaatttcaggagcagagtttacatcttccaagtcccataccgcaaatggaatatccattagatttcctagatttactaggataagagaggataaaacgtggaaagaatctactcatctaaacgatttagtaaacttgactaaatcttaatagttacatacaaactgaaaattaaaataacactatttagttggtggtcgccatggatggtgttattgtatactgtctaaacgcgctagtaaaacatggcgaggaaataaatcatataaaaaatgatttcatgattaaaccatgttgtgaaagagtttgtgaaaaagtcaagaacgttcacattggcggacaatctaaaaacaatacagtgattgcagatttgccatatatggataatgcggtatccgatgtatgcaattcactgtataaaaagaatgtatcaagaatatccagatttgctaatttgataaagatagatgacgatgacaagactcctactggtgtatataattattttaaacctaaagatgccattcctgttatcatatctataggaaaggataaagatgtctgtgaactattaatctcatcagacatatcgtgtgcatgcgtggagttaaattcatatcacgtagccattcttcccatggatgtttccttttttaccaaaggaaatgcatcattgattattctcctgtttgatttctctatcgatgcggcacctctcttaagaagtgtaaccgataataatgttattatatctagacaccagcgtctacatgacgagcttccgagttccaattggttcaagttttacataagtataaagtccgactattgttctatattatatatggttgttgatggatctgtgatgcatgcgatagctgataatagaactcacgcaattattagcaaaaatatattagacaatactacgattaacgatgagtgtagatgctgttattttgaaccacagattaggattcttgatagagatgagatgctcaatggatcatcgtgtgatatgaacagacattgtattatgatgaatttacctgatgtaggcgaatttggatctagtatgttggggaaatatgaacctgacatgattaagattgctctttcggtggctggtaatttaataagaaatcgagactacattcccgggagacgaggatatagctactacgtttacggtatagcctctagataatttttttaagcacgaaataaaaaacataattttaaaccaatctatttcatactattttgtgtgatcaccatggacataaagatagatattagtatttctggtgataaatttacggtgactactaggagggaaaatgaagaaagaaaaaaatatctacctctccaaaaagaaaaaactactgatgttatcaaacctgattatcttgagtacgatgacttgttagatagagatgagatgtttactattctagaggaatattttatgtacagaggtctattaggcctcagaataaaatatggacgactctttaacgaaattaaaaaattcgacaatgatgcggaagaacaattcggtactatagaagaactcaagcagaaacttagattaaattctgaagagggagcagataactttatagattatataaaggtacaaaaacaggatatcgtcaaacttactgtatacgattgcatatctatgataggattgtgtgcatgcgtggtagatgtttggagaaatgagaaactgttttctagatggaaatattgtttacgagcgattaaactgtttattaatgatcacatgcttgataagataaaatctatactgcagaatagactagtatatgtggaaatgtcatagaaagttaaaagttaatgagagcaaaaatatataaggttgtattccatatttgttattttttctgtaatagttaaaaaatacattcgatggtctatctatcagattattatgtgttataaggtactttttctcataataaactagagtatgagtaagatagtgtttttcaaaacatataaatctaaaattgatggatgagatatacagctattaatttcgaaaatatattttaatctgataactttaaacatggatttttgatggtggtttaacgttttaaaaaaagattttgttattgtagtatatgataatattaaaagatggatataaagaatttgctgactgcatgtactattttttacattactacattggctacggcagatatacctacttcgtcactgccacacgctccggtaaacggggcatgtgacgagggagaatatcttgataagaggcataatcaatgttgtaatcagtgtccacctggagaatttgccaaggtcagatgtaatggtaacgataacacaaaatgtgaacgctgcccacctcatacatataccgcaatccccaattactctaatggatgtcatcaatgtagaaaatgcccaacaggatcatttgataaggtaaagtgtaccggaacacagaacagtaaatgttcgtgtcttcctggttggtattgcgctactgattcttcacagactgaagattgtcgagattgtataccaaaaaggagatgtccatgcggatactttggtggaatagatgaacaaggaaatcctatttgtaaatcgtgttgtgttggtgaatattgcgactacctacgtaattatagacttgatccatttcctccatgcaaactatctaaatgtaattaattatgattttgatgataatgttaccatacattatatcgctacttggttagtgtattattcagtatgaagacctattaataattacttatcttttgacgatcttgttataattataatataaaaacttatggcatagtaacttataattgctgacgcgataaattcgtaataatctgttttgttcaaaggaatctacaggcataaaaataaaaatataatttataatatactcttacagcgcgccatcatgaataacagcagtgaattgattgctgttattaatggatttagaaatagtggacgattttgtgatattagtatagttattaatgatgaaatgataaacgctcacagactcatcctatctggagcctccgaatatttttccattctgttttccaataattttatcgattctaatgaatacgaagttaatctaagtcatttagattatcaaagcgtaaacgatttgatcgattacatttatgggatacctttgagcctaactaacgataacgtgaaatatattctttcaaccgctgattttttacaaattggatctgccattactgagtgcgaaaaatacatacttaaaaatctttgttctagaaactgtatcgatttctacatatacgctgataaatataataacaagaaaatagaatcagcgtcgtttaacacaatattacaaaatattttgagactcatcaacgatgaaaactttaaatacttaacagaggaatcaatgataaaaattttaagcgatgatatgttaaatataaaaaatgaggatttcgccccactaattctcattaaatggttagagagtactcaacaaccatgcaccgtcgagttacttaaatgcctcagaatatcattgctttccccacaagttataaaatcactttatagtcatcgactggttagttcaatctacgaatgtataacattcttaaacaatatagcattcttggatgaatcatttcctagataccatagcatcgagttgatatctatcggtataagtaattcgcatgataagatttccataaactgctacaatcataaaaaaaatacatgggaaatgatatcttcacgtagatataggtgtagtttcgcagtggccgtcctggataatattatttatatgatgggtggatatgatcagtccccgtatagaagttcaaaggttatagcgtacaatacatgtacaaattcttggatatatgatataccagagctaaaatatcctcgttctaattgtgggggactggctgatgacgaatacatttattgtataggcggcatacgcgatcaggattcatcgttgacatctagtattgatagatggaagccatcaaaaccatattggcagaagtatgctaaaatgcgcgaaccaaaatgtgatatgggggttgcgatgttaaacggattaatatatgttataggtggaatcgttaaaggtgacacgtgtaccgacgcactagagagtttatcagaagatggatggatgaagcatcaacgtcttccaataaaaatgtccaatatgtcgacgattgttcatgatggcaagatttatatatctggaggttacaacaatagtagtgtagttaatgtaatatcgaatttagtccttagctataattcgatatatgatgaatggaccaaattatcatcattaaacattcctagaattaatcccgctctatggtcagcgcataataaattatatgtaggaggaggaatatctgatgatgttcgaactaatacatctgaaacatacgacaaagaaaaagattgttggacattggataatggtcacgtgttaccacgcaattatataatgtataaatgcgaaccgattaaacataaatatccattggaaaaaacacagtacacgaatgattttctaaagtatttggaaagttttataggtagttgatagaacaaaatacataattttgtaaaaataaatcactttttatactaatatgacacgattaccaatacttttgttactaatatcattagtatacgctacaccttttcctcagacatctaaaaaaataggtgatgatgcaactctatcatgtaatcgaaataatacaaatgactacgttgttatgagtgcttggtataaggagcccaattccattattcttttagctgctaaaagcgacgtcttgtattttgataattataccaaggataaaatatcttacgactctccatacgatgatctagttacaactatcacaattaaatcattgactgctagagatgccggtacttatgtatgtgcattctttatgacatcgcctacaaatgacactgataaagtagattatgaagaatactccacagagttgattgtaaatacagatagtgaatcgactatagacataatactatctggatctacacattcaccggaaactagttctgagaaacctgattatatagataattctaattgctcgtcggtattcgaaatcgcgactccggaaccaattactgataatgtagaagatcatacagacaccgtcacatacactagtgatagcattaatacagtaagtgcatcatctggagaatccacaacagacgagactccggaaccaattactgataaagaagatcatacagtcacagacactgtctcatacactacagtaagtacatcatctggaattgtcactactaaatcaaccaccgatgatacgtacaatgataatgatacagtaccaccaactactgtaggcggtagtacaacctctattagcaattataaaaccaaggactttgtagaaatatttggtattaccgcattaattatattgtcggccgtggcaatattctgtattacgtattatatatgtaataaacgttcacgtaaatacaaaacagagaacaaagtctagatttttgacttacataaatgtctgggatagtaaaatctatcatattgagcgggccatctggtttaggaaagacagccatagccaaaagactatgggaatatatttggatttgtggtgtcccataccactagatttcctcgtcctatggaacgagaaggtgtcgattaccattacgttaacagagaggccatctggaagggaatagccgccggaaactttctagaacatactgagtttttaggaaatatttacggaacttctaaaactgctgtgaatacagcggctattaataatcgtatttgtgtgatggatctaaacatcgatggcgttagaagtcttaaaaatacgtacctaatgccttactcggtgtatataagacctacctctcttaaaatggttgagaccaagcttcgttgtagaaacactgaagcggatgatgagattcatcgtcgtgtgatgttggcaaaaactgacatggatgaggcaggtgaagccggtctattcgacactattatcattgaagatgatgtgaatttagcatatagtaagttaattcagatactacaggaccgtattagaatgtattttaacactaattagagacttaagacttaaaacttgataattaataatataactcgtttttatatgtggctatttcaacgtctaatgtattagttaaatattaaaacttaccacgtaaaacttaaaatttaaaatgatatttcattgacagatagatcacacattatgaactttcaaggacttgtgttaactgacaattgcaaaaatcaatgggtcgttggaccattaataggaaaaggtggatttggtagtatttatactactaatgacaataattatgtagtaaaaatagagcccaaagctaacggatcattatttaccgaacaggcattttatactagagtacttaaaccatccgttatcgaagaatggaaaaaatctcacaatataaagcacgtaggtcttatcacgtgcaaggcatttggtctatacaaatccattaatgtggaatatcgattcttggtaattaatagattaggtgcagatctagatgcggtgatcagagccaataataatagactaccaaaaaggtcggtgatgttgatcggaatcgaaatcttaaataccatacaatttatgcacgagcaaggatattctcacggagatattaaagcgagtaatatagtcttggatcaaatagataagaataaattatatctagtggattacggattggtttctaaattcatgtctaatggcgaacatgttccatttataagaaatccaaataaaatggataacggtactctagaatttacacctatagattcgcataaaggatacgttgtatctagacgtggagatctagaaacacttggatattgtatgattagatggttgggaggtatcttgccatggactaagatatctgaaacaaagaattgtgcattagtaagtgccacaaaacagaaatatgttaataatactgcgactttgttaatgaccagtttgcaatatgaacctagagaattgctgcaatatattaccatggtaaactctttgacatattttgaggaacccaattacgacaagtttcggcacatattaatgcagggtgtatattattaagtgtggtgtttggtcgataaaaattaaaaaataacttaatttattattgatctcgtgtgtacaaccgaaatcatggcgatgttttacgcacacgctctcggtgggtacgacgagaatcttcatgcctttcctggaatatcatcgactgttgccaatgatgtcaggaaatattctgttgtgtcagtttataataacaagtatgacattgtaaaagacaaatatatgtggtgttacagtcaggtgaacaagagatatattggagcactgctgcctatgtttgagtgcaatgaatatctacaaattggaaatccgatccatgatcaagaaggaaatcaaatctctatcatcacatatcgccacaaaaactactatgctctaagcggaatcgggtacgagagtctagacttgtgtttggaaggagtagggattcatcatcacgtacttgaaacaggaaacgctgtatatggaaaagttcaacatgattattctactatcaaagagaaggccaaagaaatgagtgcacttagtccaggacctatcatcgattaccacgtctggataggagattgtatctgtcaagttactgctgtggacgtacatggaaaggaaattatgaaaatgagattcaaaaagggtgcggtgcttccgatcccaaatctggtaaaagttaaacttggggagaatgatacagaaaatctttcttctactatatcggcgacaccatcgaggtaaccacctctctggaagacagcgtgaataatgtactcatgaaacgtttggaaactatacgccatatgtggtctgttgtatatgatcattttgatattgtgaatggtaaagaatgctgttatgtgcatacgcatttgtctaatcaaaatcttataccgagtactgtaaaaacaaatttgtacatgaagactatgggatcatgcattcaaatggattccatggaagctctagagtatcttagcgaactgaaggaatcaggtggatggagtcccagaccagaaatgcaggaatttgaatatccagatggagtggaagacactgaatcaattgagagattggtagaggagttcttcaatagatcagaacttcaggctggtgaatcagtcaaatttggtaattctattaatgttaaacatacatctgtttcagctaagcaactaagaacacgtatacggcagcagcttccttctatactctcatcttttaccaacacaaagggtggatatttgttcattggagttgataataatacacacaaagtatttggattcacggtgggttacgactacctcagactgatagagaatgatatagaaaagcatatcaaaagactttgtgttgtgtatttctgtgagaagaaagaggacatcaagtacgcgtgtcgattcatcaaggtatataaacctggggatgaggctacctcgacatacgtgtgcgctatcaaagtggaaagatgctgttgtgctgtgtttgcagattggccagaatcatggtatatggatactaatggtatcaagaagtattctccagatgaatgggtgtcacatataaaattttaattaatgtaactatagagaacaaataataaggttgtaatatcatatagacaataactaacaattaattagtaactgttatctcttttttaattaaccaactaactatatacctattaatacatcgtaattatagttcttaacatctattaatcattaattcgcttctttaattttttataaactaacattgttaattgaaaagggataacatgttacagaatataaattatatatggatttttttaaaaaggaaatacttgactggagtatatatttatctcttcattatatagcacgcgtgttttccaatttttccacatcccatataatacaggattataatctcgttcgaacatacgagaaagtggataaaacaatagttgattttttatctaggttgccaaatttattccatattttagaatatggggaaaatattctacatatttattctatggatgatgctaatacgaatattataattttttttctagatagagtattaaatattaataagaacgggtcatttatacacaatctcgggttatcatcatccattaatataaaagaatatgtatatcaattagttaataatgatcatccagataataggataagactaatgcttgaaaatggacgtagaacaagacattttttgtcctatatatcagatacagttaatatctatatatgtattttaataaatcatggattttatatagatgccgaagacagttacggttgtacattattacatagatgtatatatcactataagaaatcagaatcagaatcatacaatgaattaattaagatattgttaaataatggatcagatgtagataaaaaagatacgtacggaaacacaccttttatcctattatgtaaacacgatatcaacaacgtggaattgtttgagatatgtttagagaatgctaatatagactctgtagactttaatagatatacacctcttcattatgtctcatgtcgtaataaatatgattttgtaaagttattaatttctaaaggagcaaatgttaatgcgcgtaataaattcggaactactccattttattgtggaattatacacggtatctcgcttataaaactatatttggaatcagacacagagttagaaatagataatgaacatatagttcgtcatttaataatttttgatgctgttgaatctttagattatctattatccagaggagttattgatattaactatcgtactatatacaacgaaacatctatttacgacgctgtcagttataatgcgtataatacgttggtctatctattaaacaaaaatggtgattttgagacgattactactagtggatgtacatgtatttcggaagcagtcgcaaacaacaacaaaataataatggaagtactattgtctaaacgaccatctttgaaaattatgatacagtctatgatagcaattactaaacataaacagcataatgcagatttattgaaaatgtgtataaaatatactgcgtgtatgaccgattatgatactcttatagatgtacagtcgctacagcaatataaatggtatattttaagatgtttcgatgaaatagatatcatgaagagatgttatataaaaaataaaactgtattccaattagttttttgtatcaaagacattaatactttaatgagatacggtaaacatccttctttcgtgaaatgcactagtctcgacgtatacggaagtcgtgtacgtaatatcatagcatctattagatatcgtcagagattaattagtctattatccaagaagctggatcctggagataaatggtcgtgttttcctaacgaaataaaatataaaatattggaaaactttaacgataacgaactatccacatatctaaaaatcttataaacattattaaaatataaaatctaagtaggataaaatcacactacatcattgtttccttttagtgctcgacagtgtatactatttttaacgctcataaataaaaatgaaaacgatttccgttgttacgttgttatgcgtactacctgctgttgtttattcaacatgtactgtacccactatgaataacgctaaattaacgtctaccgaaacatcgtttaatgataaccagaaagttacgtttacatgtgatcagggatatcattctttggatccaaatgctgtctgtgaaacagataaatggaaatacgaaaatccatgcaaaaaaatgtgcacagtttctgattatgtctctgaactatataataaaccgctatacgaagtgaattccaccatgacactaagttgcaacggcgaaacaaaatattttcgttgcgaagaaaaaaatggaaatacttcttggaatgatactgttacgtgtcctaatgcggaatgtcaacctcttcaattagaacacggatcgtgtcaaccagttaaagaaaaatactcatttggggaatatatgactatcaactgtgatgttggatatgaggttattggtgcttcgtacataagttgtacagctaattcttggaatgttattccatcatgtcaacaaaaatgtgatatgccgtctctatctaacggattaatttccggatctacattttctatcggtggcgttatacatcttagttgtaaaagtggttttacactaacggggtctccatcatccacatgtatcgacggtaaatggaatcccatactcccaatatgtgtacgaactaacgaaaaatttgatccagtggatgatggtcccgacgatgagacagatttgagcaaactctcgaaagacgttgtacaatatgaacaagaaatagaatcgttagaagcaacttatcatataatcatagtggcgttgacaattatgggcgtcatatttttaatctccgttatagtattagtttgttcctgtgacaaaaataatgaccaatataagttccataaattgctaccgtaaatataaatccgttaaaataattaataatttaataacaaacaagtatcaaaagattaaagacttatagctagaatcaattgagatgtcttcttcagtggatgttgatatctacgatgccgttagagcatttttactcaggcactattataacaagagatttattgtgtatggaagaagtaacgccatattacataatatatacaggctatttacaagatgcgccgttataccgttcgatgatatagtacgtactatgccaaatgaatcacgtgttaaacaatgggtgatggatacacttaatggtataatgatgaatgaacgcgatgtttctgtaagcgttggcaccggaatactattcatggaaatgtttttcgattacaataaaaatagtatcaacaatcaactaatgtatgatataattaatagcgtatctataattctagctaatgagagatatagaagcgcttttaacgacgatggtatatacatccgtagaaatatgattaacaagttgtacggatacgcatctctaactactattggcacgatcgctggaggtgtttgttattatctgttgatgcatctagttagtttgtataaataattatttcaatatactagttaaaattttaagattttaaatgtataaaaaactaataacgtttttatttgtaataggtgcagtagcatcctattcgaataatgagtacactccgtttaataaactgagtgtaaaactctatatagatggagtagataatatagaaaattcatatactgatgataataatgaattggtgttaaattttaaagagtacacaatttctattattacagagtcatgcgacgtcggatttgattccatagatatagatgttataaacgactataaaattattgatatgtataccattgactcgtctactattcaacgcagaggtcacacgtgtagaatatctaccaaattatcatgccattatgataagtacccttatattcacaaatatgatggtgatgagcgacaatattctattactgcagagggaaaatgctataaaggaataaaatatgaaataagtatgatcaacgatgatactctattgagaaaacatactcttaaaattggatctacttatatatttgatcgtcatggacatagtaatacatattattcaaaatatgatttttaaaaatttaaaatatattatcacttcagtgacagtagtcaaataacaaacaacaccatgagatatattataattctcgcagttttgttcattaatagtatacatgctaaaataactagttataagtttgaatccgtcaattttgattccaaaattgaatggactggggatggtctatacaatatatcccttaaaaattatggcatcaagacgtggcaaacaatgtatacaaatgtaccagaaggaacatacgacatatccgcatttccaaagaatgatttcgtatctttctgggttaaatttgaacaaggcgattataaagtggaagagtattgtacgggactatgcgtcgaagtaaaaattggaccaccgactgtaacattgactgaatacgacgaccatatcaatttgtacatcgagcatccgtatgctactagaggtagcaaaaagattcctatttacaaacgcggtgacatgtgtgatatctacttgttgtatacggctaacttcacattcggaaattctaaagaaccagtaccatatgatatcgatgactacgattgcacgtctacaggttgcagcatagactttgccacaacagaaaaagtgtgcgtgacagcacagggagccacagaagggtttctcgaaaaaattactccatggagttcgaaagtatgtctgacacctaaaaagagtgtatatacatgcgcaattagatccaaagaagatgttcccaatttcaaggacaaaatggccagagttatcaagagaaaatttaatacacagtctcaatcttatttaactaaatttctcggtagcacatcaaatgatgttaccacttttcttagcatgcttaacttgactaaatattcataactaatttttattaatgaaataaaactgcatattatacactggttaacgcccttataggctctaaccattttcaagatgaggtccctgattatagtccttctgttcccctccatgtctattagacgatgtgagaagactgaagaggaaacatggggattgaaaatagggttgtgtataattgccaaagatttttatcccgaaagaactgattgcagtgttcatctcccaactgcaagtgaaggattcagggatatacgaaacaccgataaattataaaaaaagcaatgtgtccgctgtttccgttaataatactattttcgtaactggcggattattcataaataactctaatagcacgatcgtggacatttataaagacaaacaatggtcgattatagaaatgcctatggctagggtatatcacggcatcgactcgacatttggaatgttatattttgccggaggtctatccgttaccgaacaatatggtaatttagagaaaaacaacgagatatcttgttacaatcctagaacgaataagtggtttgatatttcatatactatttataagatatccatatcatcattgtgtaaactaaataacgtcttctatgtatttagtaaggacattggatatgtggaaaagtatgatggtgcatggaagttagtacatgatcgtctccccgctataaaggcattatcaacttctccttattgattgaaaatataaatagtttttatgtatagcagtattaccctatagttttattgcttactactaacatggatacagatacagatacagatacagatacagatacagatacagatgttacaaatgtagaagatatcataaatgaaatagatagagagaaagaagaaatactaaaaaatgtagaaattgaaaataataaaaacattaacaagaatcatcccaatgaatatattagagaagcactcgttattaataccagtagtaatagtgattccattgataaagaagttatagaatgtatcagtcacgatgtaggaatatagatcatatctactaatttttataatcgatacaaaacataaaaaacaactcgttattacatagcaggcatggaatccttcaagtattgttttgataacgatggcaagaaatggattatcggaaatactttatattctggtaattcaatactatataaggtcagaaaaaatttcactagttcgttctacaattacgtaatgaagatagatcacaaatcacacaagccattgttgtctgaaatacgattctatatatctgtattggatcctttgactatcgacaactggacacgggaacgtggtataaagtatttggctattccagatctgtatggaattggagaaaccgatgattatatgttcttcgttataaagaattcgggaagagtattcgccccaaaggatactgaatcagtcttcgaagcatgcgtcactatgataaacacgttagagtttatacactctcaaggatttacccatggaaaaatagaaccgaggaatatactgattagaaataaacgtctttcactaattgactattctagaactaacaaactatacaagagtggaaactcacatatagattacaacgaggacatgataacttcaggaaatatcaattatatgtgtgtagacaatcatcttggagcaacagtttcaagacgaggagatttagaaatgttgggatattgcatgatagaatggttcggtggcaaacttccatggaaaaacgaaagtagtataaaagtaataaaacaaaaaaaagaatataaaaaatttatagctactttctttgaggactgttttcctgaaggaaatgaacctctggaattagttagatatatagaattagtatacacgttagattattctcaaactcctaattatgacagactacgtaaactgtttatacaagattgaaattatattcttttttttatagagtgtggtagtgttacggatatttaatattagactatctctatcgcgctacacgaccaatatcgattactatggatatcttctatgaaaggagagaatgtattcatttctccagcgtcaatctcgtcagtattgacaatactgtattatggagctaatggatccactgctgaacagctatcgaaatatgtagaaaaggaggagaacacggataaggttagcgctcagaatatctcattcaaatccatgaataaagtatatgggcgatattctgccgtgtttaaagatttctttttgggaaaaattggcgataagtttcaaactgttgacttcactgattgtcgcactatagatgcaatcaacaagtgtgtagatatctttactgaggggaaaatcaatccactattggatgaaccattgtctcctagcaattagtgccgtatactttaaagcaaaatggttgacgccattcgaaaaggaatttaccagtgattatcccttttacgtatctccgacggaaatggtagacgtaagtatgatgtctatgtacggcgagctatttaatcacgcatctgtaaaagaatcattcggcaacttttcaatcatagaactgccatatgttggagatactagtatgatggtcattcttccagacaagattgatggattagaatccatagaacaaaatctaacagatacaaattttaagaaatggtgtgactctctggaagctacgtttatcgatgttcacattcccaagtttaaggtaacaggctcgtataatctggtggatactctagtaaagtcaggactgacagaggtgttcggttcaactggagattatagcaatatgtgtaatttagatgtgagtgtcgacgctatgatccacaaaacgtatatagatgtcaatgaagagtatacagaagcagctgcagcaacttctgtactagtggcagactgtgcatcaacaattacaaatgagttctgtgtagatcatccgttcatctatgtgattaggcatgttgatggcaaaattcttttcgttggtagatattgctctccgacaactaattgttaaccattttttttaaaaaaaatagaaaaaacatgtggtattagtgcaggtcgttgttcttccaattgcaattggtaagatgacggccaactttagtacccacgtcttttcaccacagcactgtggatgtgacagactgaccagtattgatgacgtcaaacaatgtttgactgaatatatttattggtcgtcctatgcataccgcaacaggcaatgcgctggacaattgtattccacactcctctcttttagagatgatgcggaattagtgttcatcgacattcgcgagctggtaaaaaatatgccgtgggatgatgtcaaagattgtacagaaatcatccgttgttatataccggatgagcaaaaaaccatcagagagatttcggccatcatcggactttgtgcatatgctgctacttactggggaggtgaagaccatcccactagtaacagtctgaacgcattgtttgtgatgcttgagatgctaaattacgtggattataacatcatattccggcgtatgaattgatgagttgtacatcttgacattttctttcttctcttctccctttcttctcttctccctttcttctcttctcccttcctccctcttctccctttcccagaaacaaacttttttacccactataaaataaaatgagtatactacctgttatatttctttctatatttttttattcttcattcgttcagacttttaacgcgcctgaatgtatcgacaaagggcaatattttgcatcattcatggagttagaaaacgagccagtaatcttaccatgtcctcaaataaatacgctatcatccggatataatatattagatattttatgggaaaaacgaggagcggataatgatagaattataccgatagataatggtagcaatatgctaattctgaacccgacacaatcagactctggtatttatatatgcattaccacgaacgaaacctactgtgacatgatgtcgttaaatttgacaatcgtgtctgtctcagaatcaaatatagatcttatctcgtatccacaaatagtaaatgagagatctactggcgaaatggtatgtcccaatattaatgcatttattgctagtaacgtaaacgcagatattatatggagcggacatcgacgccttagaaataagagacttaaacaacggacacctggaattattaccatagaagatgttagaaaaaatgatgctggttattatacatgtgttttagaatatatatacagaggtaaaacatataacgtaaccagaattgtaaaattagaggtacgggataaaataataccttctattatgcaattaccagatggcattgtaacttcaataggtagtaatttgactattgcgtgtagagtatcgttgagacctcccacaacggatgcagacgtcttttggataagtaatggtatgtattacgaagaagatgatggggacggaaacggtagaataagtgtagcaaataaaatctatatgaccgataagagacgtgttattacatcccggttaaacattaatcctgtcaaggaagaagatgctacaacgtttacgtgtatggcgtttactattcctagcatcagcaaaacagttactgttagtataacgtgaatgtatgttgttacatttccatgtcaattgagtttataagaatttttatacattatcttccaacaaacaattgacgaacgtattgctatgattaactcccacgatactatgcatattattaatcattaacttgcaaactatacctagtgctattttgacatactcatgttcttgtgtaattgcggtatctatattattaaagtacgtaaatctagctatagttttattatttaattttagataatataccgtctccttatttttaaaaattgccacatcctttattaaatcatgaatgggaatttctatgtcatcgttagtatattgtgaacaacaagagcagatatctataggaaagggtggaatgcgatacattgatctatgtagttttaaaacacacgcgaactttgaagaatttatataaatcattccatcgatacatccttctatgttgagatgtatatatccaggaattcgtttattaatatcgggaaatgtataaactaaaacattgcccgaaagcggtgcctctatctgcgttatatccgttcttaacttacaaaatgtaaccaatacctttgcatgacttgttttgttcggcaacgttagtttaaacttgacgaatggattaattacaatagcatgatccgcgcatctattaagtttttttactttaacgcccttgtatgtttttacagagactttatctaaatttctagtgcttgtatgtgttataaatataacgggatatagaaccgaatcacctaccttagatacccaattacattttatcagatccagataataaacaaattttgtcgccctaactaattctatattgttatatattttacaattggttatgatatcatgtaataacttggagtctaacgcgcatcgtcgtacgtttatacaattgtgatttagtgtagtatatctacacatgtatttttccgcactatagtattctggactagtgataaaactatcgttatatctgtcttcaatgaactcatcgagatattgctctctgtcatattcatacacctgcataaactttctagacatcttacaatccgtgttattttaggatcatatttacatatttacgggtatatcaaagatgttagattagttaatgggaatcgtctataataatgaatattaaacaattatatgaggacttttaccacaaagcatcataaaaatgagtcgtcgtctgatttatgttttaaatatcaaccgcgaatcaactcataaaatacaagagaatgaaatatatacatattttagtcattgcaatatagaccatacttctacagaacttgattttgtagttaaaaactatgatctaaacagacgacaacctgtaactgggtatactgcactacactgctatttgtataataattactttacaaacgatgtactgaagatattattaaatcatggagtggatgtaacgatgaaaaccagtagcggacgtatgcctgtttatatattgcttactagatgttgcaatatttcacatgatgtagtgatagatatgatagacaaagataaaaaccacttatcgcatagagactattccaacctactactagagtatataaaatctcgttacatgttattgaaggaagaggatatcgatgagaacatagtatccactttattagataagggaatcgatcctaactttaaacaagacggatatacagcgttacattattattatttgtgtctcgcacacgtttataaaccaggtgagtgtagaaaaccgataacgataaaaaaggccaagcgaattatttctttgtttatacaacatggagctaatctaaacgcgttagataattgtggtaatacaccattccatttgtatcttagtattgaaatgtgtaataatattcatatgactaaaatgctgttgacttttaatccgaatttcgaaatatgtaataatcatggattaacgcctatactatgttatataacttccgactacatacaacacgatattcttgttatgttaatacatcactatgaaacaaatgttggagaaatgccgatagatgagcgtcgtatgatcgtattcgagtttatcaaaacatattctacacgtccggcagattcgataacttatttgatgaataggtttaaaaatataaatatttatacccgctatgaaggaaagacattattacacgtagcatgtgaatataataatacacaagtaatagattatcttatacgtatcaacggagatataaatgcgttaaccgacaataacaaacacgctacacaactcattatagataacaaagaaaattccccatataccattaattgtttactgtatatacttagatatattgtagataagaatgtgataagatcgttggtggatcaacttccatctctacctatctttcgtcgcttatcatactagtcatatcctaaatgttgatcatattccaccaaatgattgtgaaagagattgagattaaatcgtctaacaaacaattagtttttatgacattaacatataataaataaattaatcattattgacttaacgatgacgaaagttatcatcatcttaggattcttgattattaatacaaattcattgtctatgaaatgtgaacaaggtgtctcatattataattcacaagaattaaagtgttgtaaactatgtaagccaggaacatattcagatcatcgatgtgataaatacagcgataccatttgtggacattgtccgagtgacacattcacgtcaatatataatcgttctccttggtgtcatagttgtagaggtccatgtggtactaatcgagtagaggtcacaccttgtacacctaccacaaatagaatctgtcattgtgactcgaatagttattgtctccttaaagcttctgatggtaactgtgttacatgtgctcctaaaacaaaatgtggtcgtgggtatggaaagaaaggagaagatgaaatgggtaataccatttgtaagaaatgtcggaagggtacttattcagatattgtatctgactctgatcaatgtaaaccaatgacaagataagacttactcgcatctactggatagacataaaatatcctcctcgtaataatgaaatataatatacactaattattaatatcaataacaatcgagtattaatatataggtcatttttaaatcccttttgggttccgtcccaaacggcgtttcggtctgcgtcgccgccatggccatgccgagcctctccgcgtgctcctccatcgaggacgacttcaactatggcagctcggtggcgtctgccagcgtgcacatacgaatggcatttctaagaaaagtctacggtatcctttgtctacaatttcttttaacaacggcaacaactgcagtatttttatactttgactgcatgcggacatttatacaagggagtcctgttctaatattggcatcaatgttcggatctataggcttgattttcgcattgactttacacagacataaacatcccctgaatctgtacctgctttgtggatttacactgtcggaatctctaacgctggcctctgttgttactttctatgatgtgcatgtcgttatgcaagctttcatgctgactactgcagcgtttcttgctctgactacatatactctacaatcaaagagagatttcagtaaacttggagcaggattgtttgctgctttgtggattttaattttgtcaggactcttggggatatttgtgcaaaatgagacagtggagctggtcctgtctgcttttggggcccttgtattctgtggattcattatctatgacacgcactcactaatacataagctctcgcctgaagagtatgtgttagcctctatcaatctctacttggatatcatcaatctgttcttgcatctgttgcagcttttggaagtatctaataagaaataaagtttaaaatagaattaataaaaacatataggtcattttttaaacatggattggaaaccaaggtagttagttaatacacacaagatatatttttttcacatcatccacccatgggtaacaccaaggttgttagttaataatatacaagatattttttctcactctgatccatgtaaaccaaggacgagataagacactctcattcctcatccacaacccattaaaaaaatggaaattaaagccctctattagcataaacggctacaggtctacctttacaatggcctttccttgtgcccagttcagaccctgtcattgccacgctactaaggactccctgaataccgtggccgacgtcagacattgtctgactgaatacatcctgtgggtttctcatagatggacccatagagaaagcgcagggtctctctacaggcttctcatctctttcagaactgatgcaacggagctctttggtggtgagttgaaggattcacttccgtgggacaattgcgtggagatcattaaatgtttcatcagaaatgactccatgaaaaccgccgaagaacttcgtgcaatcattggactttgtactcaatcagctatcgtctctggaagagtcttcaacgataagtatatcgacatactacttatgctgcgaaagattctgaacgagaacgactatctcaccctcttggatcatatccgcactgctaaatactaaatctccttcatgctctctcactacactttttatcatcttatgaggaatgattgccttcgtgaaataggaataattagcaccagaatagctatggattattgtggtagagagtgcactattctatgtcgtctactggatgaagatgtgacgtacaaaaaaataaaaccagagattgaaacgtgtcacaacttatcaaaacatatagatagacgaggaaacaatgcgctacattgttacgtcttcaataaatgcgatacagacattaagattgttcggctgttactctctcgcggagtcgagagactttgtagaaacaacgaaggattaactccgctaggagcatacagtaagcatagatacgtaaaatctcagattgtgcatctactgatatccagctattcaaattcctctaacgaactcaagtcgaatataaatgatttcgatctgtattcggataatatcgacttacgtctgctaaaatacctaattgtggataaacggatacgtccgtccaagaatacgaattatgcaatcaatggtctcggattggtggatatatacgtaacgacgcctaatccgagaccagaagtattgctatggcttcttaaatcagaatgttacagcaccggttacgtatttcgtacctgtatgtacgacagtgatatgtgtaagaactctcttcattactatatatcgtctcatagagaatctcaatctctatccaaggatgtaattaaatgtttgatcgataacaatgtttccatccatggcagagacgaaggaggatctttacccatccaatactactggtctttctcaaccatagatatagagattgttaaattattattaataaaggatgtggacacgtgtagagtatacgacgtcagccctatattagaggcgtattatctaaacaagcgatttagagtaaccccatataatgtagacatggaaatcgttaatcttcttattgagagacgtcatactcttgtcgacgtaatgcgtagtattacttcgtacgattccagagaatataaccactacatcatcgataacattctaaagagatttagacaacaggatgtacaagccatgttgataaactacttacattacggcgatatggtcgttcgatgcatgttagataacggacaacaactatcctctgcacgactactttgttaataataatctcgtcgatgtaaacgtcgtaaggtttatcgtggaaaatatggacacgcggctgtaaatcacgtatcgaacaatggccgtctatgtatgtacggtctgatattatcgagatttaataattgcgggtatcactgttatgaaaccatactgatagatgtatttgatatactaagcaagtacatggatgatatagatatgatcgataactctactatattacgcggtcgatgtcaataatatacaatttgcaaagcggttattggaatatggagcgagtgtcacgctcgataatcaatacggccatccagaaaagcagttaccaaagagaaaacaaaacgaagctagttgatttattactgagttaccatcccactctagagactatgattgacgcatttaatagagatatacgctatctatatcctgaaccattattcgcctgtatcagatacgccttaatcctagatgatgattttccttctaaagtaaagtatgatatcgccggtcgtcataaggaactaaagcgctatagagtagacattaatagaatgaagaatgtctacatatcaggcgtctccatgtttgatatattatttaaacgaagcaaacgccacaaattgagatacgcaaagaatccgacatcaaatggtacaaaaaagaactaacgtccatcattacagaaactgtaaagaacaatgagaggatcgactccatagtggacaacattaatacagacgataacttgatttcgaaattacccatggagatactttattactccattaaataatttatcatggagcgataatgtcctgtttcatttgtttccatgacatattacaaaatcgattccgtccaagatgataaaaacatttaccggcatcataaacacggagtttattttatatgtctcgcataaacattactaaaaaaatatattgttcggttttctttcacatctttaattatgaaaaagtaaatcattatgagatggacgagattgtacgcatcgttcgcgacagtatgtggtacatacctaacgtatttatggacgacggtaagaatgaaggtcacgtttctgtcaacaatgtctgtcatatgtattttacgttctttgatgtggatacatcgtctcatctgtttaagctagttattaaacactgcgatctgaataaacgaggtaactctccattacattgctatacgatgaatacacgatttaatccatctgtattaaagatattgttacaccacggcatgcgtaactttgatagcaaggatgaccactatcaatcgataacaagatctttgatatactaacggacaccattgatgactttagtaaatcatccgatctattgctgtgttatcttagatataaattcaatgggagcttaaactattacgttctgtacaaaggatccgaccctaattgcgccgacgaggatgaactcacttctcttcattactactgtaaacacatatccacgttctacgaaagcaattattacaagttaagtcacactaagatgcgagccgagaagcgattcatctacgcgataatagattatggagcaaacattaacgcggttacacacttaccttcaacagtataccaaacatagtcctcgtgtggtgtatgctcttttatctcgaggatacgtaataatcttgattgtacacccatcatggaacgattgtgcaacaggtcatattctcataatgttactcaattggcacgaacaaaaggaagaaggacaacatctactttatctattcataaaacataatcaaggatacactctcaatatactacggtatctattagataggttcgacattcagaaagacgaatactataataccgcctttcaaaattgtaacaacaatgttgcctcatacatcggatacgacatcaaccttccgactaaagacggtattcgacttggtgtttgaaaacagaaacatcatatacaaggcggatgttgtgaatgacatcatccaccacagactgaaagtatctctacctatgattaaatcgttgttctacaagatgtctctccctacgacgattactacgtaaaaaagatactagcctactgcctattaagggacgagtcattcgcggaactacatagtaaattctgtttaaacgaggactataaaagtgtatttatgaaaaatatatcattcgataagatagattccatcatcgtgacataagtcgcctcaaagagattcgaatctccgacaccgacctgtatacggtatcacagctatcttaaagccatacattcagacagtcacatttcatttcccatgtacgacgatctcatagaacagtgccatctatcgatggagcgtaaaagtaaactcgtcgacaaagcactcaataaattagagtctaccatcggtcaatctagactatcgtatttgcctccggaaattatgcgcaatatcatctaaacagtatgttgtacggaaagaaccattacaaatattatccatgatagaaagaaaatatctatatgattggagaagtaggaaacaggaacaagacaacgattactacattattaaatcatgaagtccgtattatactcgtatatattgtttctctcatgtataataataaacggaagagatatagcaccgcatgcaccatccgatggaaagtgtaaagacaacgaatacaaacgccataatttgtgtccgggaacatacgcttccagattatgcgatagcaagactaacacacgatgtacgccgtgtggttcgggtaccttcacatctcgcaataatcatttacccgcttgtctaagttgtaacggaagacgcgatcgtgtaacacgactcacaatagaatctgtgaatgctctcccggatattattgtcttctcaaaggatcatccggatgcaaggcatgtgtttcccaaacaaaatgtggaataggatacggagtatccggagacgtcatctgttctccgtgtggtctcggaacatattctcacaccgtctcttccgcagataaatgcgaacccgtacccagaaatacgtttaactatatcgatgtggaaattaacctgtatccagttaacgacacgtcgtgtactcggacgaccactaccggtctcagcgaatccatctcaacgtcggaactaactattactatgaatcataaagactgtaatcccgtatttcgtgatggatacttctccgttcttaataaggtagcgacttcaggtttctttacaggagaaaggtgtgcactctgaatttcgagattaaatgcaataacaaagattcttcctccaaacagttaacgaaagcaaagaatgatactatcatgccgcattcggagacagtaactctagtgggcgacatctatatactatatagtaataccaatactcaagactacgaaactgatacaatctcttatcatgtgggtaatgttctcgatgtcgatagccatatgcccggtagttgcgatatacataaactgatcactaattccaaacccacccactttttatagtaagtttttcacccataaataataaatacaataattaatttctcgtaaaagtagaaaatatattctaatttattgcacggtaaggaagtagaatcataaagaacagtactcaatcaatagcaattatgaaacaatatatcgtcctggcatgcatgtgcctggcggcagctgctatgcctgccagtcttcagcaatcatcctcatcctcctcctcgtgtacggaagaagaaaacaaacatcatatgggaatcgatgttattatcaaagtcacaaagcaagaccaaacaccgaccaatgataagatttgccaatccgtaacggaaattacagagtccgagtcagatccagatcccgaggtggaatcagaagatgattccacatcagtcgaggatgtagatcctcctaccacttattactccatcatcggtggaggtctgagaatgaactttggattcaccaaatgtcctcagattaaatccatctcagaatccgctgatggaaacacagtgaatgctagattgtccagcgtgtccccaggacaaggtaaggactctcccgcgatcactcatgaagaagctcttgctatgatcaaagactgtgaagtgtctatcgacatcagatgtagcgaagaagagaaagacagcgacatcaagacccatccagtactcgggtctaacatctctcataagaaagtgagttacgaagatatcatcggttcaacgatcgtcgatacaaaatgcgtcaagaatctagagtttagcgttcgtatcggagacatgtgcaaggaatcatctgaacttgaggtcaaggatggattcaagtatgtcgacggatcggcatctgaaggtgcaaccgatgatacttcactcatcgattcaacaaaactcaaagcgtgtgtctgaatcgataactctattcatctgaaattggatgagtagggttaatcgaacgattcaggcacaccacgaattaaaaaagtgtaccggacactatattccggtttgcaaaacaaaaatgttcttaactacattcacaaaaagttacctctcgcgacttcttctttttctgtctcaatagtgtgatacgattatgacactattcctattcctattcctatttcctttcagagtatcacaaaaatattaaacctctttctgatggtctcataaaaaaagttttacaaaaatatttttattctctttctctctttgatggtctcataaaaaaagttttacaaaaatatttttattctctttctctctttgatggtctcataaaaaaagttttacaaaaatatttttattctctttctctctttgatggtctcataaaaaaagttttacaaaaatatttttattctctttctctctttgatggtctcataaaaaaagttttacaaaaatatttttattctctttctctctttgatggtctcataaaaaaagttttacaaaaatatttttattctctttctctctttgatggtctcataaaaaaagttttacaaaaatatttttattctctttctctctttgatggtctcataaaaaaagttttacaaaaatatttttattctctttctctctttgatggtctcataaaaaaagttttacaaaaatatttttattctctttctctctttgatggtctcataaaaaaagttttacaaaaatatttttattctctttctctctttgatggtctcataaaaaaagttttacaaaaatatttttattctctttctctctttgatggtctcataaaaaaagttttacaaaaatatttttattctctttctctctttgatggtctcataaaaaaagttttacaaaaatatttttattctctttctctctttgatggtctcataaaaaaagttttacaaaaatatttttattctctttctctctttgatggtctcataaaaaaagttttacaaaaatatttttattctctttctctctttgatggtctcataaaaaaagttttacaaaaatatttttattctctttctctctttgatggtctcataaaaaaagttttacaaaaatatttttattctctttctctctttgatggtctcataaaaaaagttttacaaaaatatttttattctctttctctctttgatggtctcataaaaaagttttacaaaaatatttttattctctttctctctttgat

SEQ ID NO: 62 - DNA, 194711 bp, Vaccinia virus
  Western Reserve (WR) strain
atttaaaatataatattaatgtactaaaacttatatattattaatttatctaactaaagttagtaaattatatatataattttataattaatttaattttactaattttatttagtgtctagaaaaaaatgtgtgacccatgactgtaggaaactctagagtgtaagaaagatcgatcgctttatagagaccatcagaaagaggtttaatatttttgtgagaccatcgaagagagaaagagataaaacttttttacgactccatcagaaagaggtttaatatttttgtgagaccatcgaagagagaaagagataaaacttttttacgactccatcagaaagaggtttaatatttttgtgagaccatcgaaggagaaagagataaaacttttttacgactccatcagaaagaggtttaatatttttgtgagaccatcgaaggagaaagagataaaacttttttacgactccatcagaaagaggtttaatatttttgtgagaccatcgaagagagaaagagataaaacttttttacgactccatcagaaagaggtttaatatttttgtgagaccatcgaagagagaaagagataaaacttttttacgactccatcagaaagaggtttaatatttttgtgagaccatcgaaggagaaagagataaaacttttttacgactccatcagaaagaggtttaatatttttgtgagaccatcgaagagagaaagagataaaacttttttacgactccatcagaaagaggtttaatatttttgtgagaccatcgaagagagaaagagataaaacttttttacgactccatcagaaagaggtttaatatttttgtgagaccatcgaagagagaaagagataaaacttttttacgactccatcagaaagaggtttaatatttttgtgagaccatcgaagagagaaagagataaaacttttttacgactccatcagaaagaggtttaatatttttgtgagaccatcgaagagagaaagagataaaacttttttacgactccatcagaaagaggtttaatatttttgtgagaccatcgaagagagaaagagaaagagatagttgatctagatatttttcttagtacaaaagtcaatgttttaaaatatatggacaagaatttgtctgtataaaaacttgtgtgaaattttgtaccaaagaaaaaatgtgagcagtatcccctacatggattttactagatcatttatataccaaaaaatattatacgatctacgttttattatatgattttaacgtgtaaattataaacattattttatgatatacaattgtctggtaacctagatgggcataggggatgttgataagctcgacgagtatatgttgttggacgttattgtttaagaaatagttgatgcatcagaaagagaataaaaaatattttagtgagaccatcgaagagagaaagagataaaacttttttacgactccatcagaaagaggtttaatatttttgtgagaccatcgaagagagaaagagataaaacttttttacgactccatcagaaagaggtttaatatttttgtgagaccatcgaagagagaaagagataaaacttttttacgactccatcagaaagaggtttaatatttttgtgagaccatcgaagagagaaagagataaaacttttttacgactccatcagaaagaggtttaatatttttgtgagaccatcgaagagagaaagagataaaacttttttacgactccatcagaaagaggtttaatatttttgtgagaccatcgaagagagaaagagataaaacttttttacgactccatcagaaagaggtttaatatttttgtgagaccatcgaagagagaaagagataaaacttttttacgactccatcagaaagaggtttaatatttttgtgagaccatcgaagagagaaagagataaaacttttttacgactccatcagaaagaggtttaatatttttgtgagaccatcgaagagagaaagagataaaacttttttacgactccatcagaaagaggtttaatatttttgtgagaccatcgaagagagaaagagataaaacttttttacgactccatcagaaagaggtttaatatttttgtgagaccatcgaagagagaaagagataaaacttttttacgactccatcagaaagaggtttaatatttttgtgagaccatcgaagagagaaagagataaaacttttttacgactccatcagaaagaggtttaatatttttgtgagaccatcgaagagagaaagagataaaacttttttacgactccatcagaaagaggtttaatatttttgtgagaccatcgaagagagaaagagataaaacttttttacgactccatcagaaagaggtttaatatttttgtgagaccatcgaagagagaaagagataaaacttttttacgactccatcagaaagaggtttaatatttttgtgagaccatcgaagagagaaagagataaaacttttttacgactccatcagaaagaggtttaatatttttgtgagaccatcgaagagagaaagagataaaacttttttacgactccatcagaaagaggtttaatatttttgtgagaccatcgaagagagaaagagataaaacttttttacgactccatcagaaagaggtttaatatttttgtgagaccatcgaagagagaaagagaataaaaatattttatgactccattgaagagagaaagagaaaatgagaatgagaataaaaatattttagtgacaccatcagaaagaggtttaatatttttgtgagaccatcgaagagagaaagagaataaaaatattttatgactccattgaagagagaaagagaaaatgagaatgagaataaaaatattttagtgacaccatcagaaagaggtttaatattttttatgagaccatcaaagagagaaagagaataaaaatatttttgtaaaactttttttatgagaccatcaaagagagaaagagaataaaaatatttttgtaaaactttttttatgagaccatcaaagagagaaagagaataaaaatatttttgtaaaactttttttatgagaccatcaaagagagaaagagaataaaaatatttttgtaaaactttttttatgagaccatcaaagagagaaagagaataaaaatatttttgtaaaactttttttatgagaccatcaaagagagaaagagaataaaaatatttttgtaaaactttttttatgagaccatcaaagagagaaagagaataaaaatatttttgtaaaactttttttatgagaccatcaaagagagaaagagaataaaaatatttttgtaaaactttttttatgagaccatcagaaagaggtttaatatttttgtgataccctgaaaggaaataggaataggaataggaatagtgtcataatcgtatcacactattgagacagaaaaagaagaagtcgcgagaggtaactttttgtgaatgtagttaagaacatttttgttttgcaaaccggaatatagtgtccggtacacttttttaattcgtggtgtgcctgaatcgttcgattaaccctactcatccaatttcagatgaatagagttatcgattcagacacacgctttgagttttgttgaatcgatgagtgaagtatcatcggttgcaccttcagatgccgatccgtcgacatacttaaatccatccttgacctcaagttcagatgattccttgcacatgtctccgatacgaacgctaaactctagattcttgacacattttgtatcgacgatcgttgaaccgatgatatcttcgtaactcactttcttatgagagatgttagacccgagtactggatgggtcttgatgtcgctgtctttctcttcttcgctacatctgatgtcgatagacacctcacagtctttgatcatagccagagcttcttcatgagtgatcgcgggagagtccttaccttgtcctggggacacgctggacaatctagcattcactgtgtttccatcagcggattctgagatggatttaatctgaggacatttggtgaatccaaagttcattctcagacctccaccgatgatggagtaataagtggtaggaggatctacatcctcgactgatgtggaatcatcttctgattccacctcgggatctggatctgactcggactctgtaatttccgttacggattggcaaatcttatcattggtcggtgtttggtcttgctttgtgactttgataataacatcgattcccatatgatgtttgttttcttcttccgtacacgaggaggaggatgaggatgattgctgaagactggcaggcacatgcatgccaggacgatatattgtttcatgattgctattgattgagtactgttctttatgattctacttccttaccgtgcaataaattagaatatattttctacttttacgagaaattaattattgtatttattatttatgggtgaaaaacttactataaaaagcgggtgggtttggaattagtgatcagtttatgtatatcgcaactaccgggcatatggctatcgacatcgagaacattacccacatgataagagattgtatcagtttcgtagtcttgagtattggtattactatatagtatatagatgtcgacgctagatagacagtctccgaatgcggcatgataccgtcatcattctttgctttcgttaactgtttggaggaaaaatttttgttattgcatttaatctcgaaattcagagtgcacacctttctcctgtaaagaaacctgaagttgctaccttattaaggacggagaagtattcctcacgaaatacgggattacagtctttatgattcatagtaatagttagttccgacgttgagatggattcgctgagaccggtagtggtcgttaactggatacagattaatttccacatcgatatagttaaaggtattactgggtacgggttcgcatttatctgcggaagagacggtgtgagaatatgttccgagaccacacggagaacagatgacgtctccggatactccgtatcctattccacattttgtttgggaaacacatgccttgcatccggatgatcctttgagaagacaataatatccgggagagcattcacagattctattgtgagtcgtgttacacggtcgcgtcttccgttacaacttagacaagcgggtaaatgattattgcgagatgtgaaggtacccgaaccacacggcgtacattgtgtgttagtcttgctatcgcataatctggaagcgtatgttcccggacacaaattatggcgtttgtattcgttgtctttacactttccatcggatggtgcatgcggtgctatatctcttccgtttattattatacatgagagaaacaatatatacgagtataatacggacttcatgatttaataatgtagtaatcgtcgtcttgttcctgtttcctacttctccaatcatatagatattttctttctatcatggataatatttgtaatggttcttttcgtacaacatactgtttagatgatattgcgcataatttccggaggcaaatacgatagtctagattgaccgatggtagactctaatttattgagtgctttgtcgacgagtttacttttacgctccatcgatagatggcactgttctatgagatcgtcgtacatgggaaatgaaatgtgactgtctgaatgtatggctttaagatagctgtgataccgtatacaggtcggtgtcggagattcgaatctctttaaggcgacttatgtcacgatgatggaatctatcttatcgaatgatatatttttcataaatacacttttatagtcctcgtttaaacagaatttactatgtagttccgcgaatgactcgtcccttaataggcagtaggctattatcttctttacgtagtaatcgtcgtagggagagacatcttgtagaacaacgatttaatcataggtagagatactttcagtctgtggtggatgatgtcattcacaacatccgccttgtatatgatgtttctgttttcaaacaccaagtcgaataccgtctttagtcggaaggttgatgtcgtatccgatgtatgaggcaacattgttgttacaattttgaaaggcggtattatagtattcgtctttctgaatgtcgaacctatctagtagataccgtagtatattgagagtgtatccttgattatgttttatgaatagataaagtagatgttgtccttcttccttttgttcgtgccaattgagtaacattatgagaatatgacctgttgcacaatcgttccatgatgggtgtacaatcaagattattacgtatcctcgtatcggctcctcgagataaaagagcatacaccacacgaggactatgtttggtatactgttgaaggtaagtgtgtaaccgcgttaatgtttgctccataatctattatcgcgtagatgaatcgcttctcggctcgcatcttagtgtgacttaacttgtaataattgcttttgtagaacgtggatatgtgtttacagtagtaatgaagagaagtgagttcatcctcgtcggatcctttgtacagaacgtaatagtttaagctcccattgaatttatatctaagataacacagcaatagatcggatgatttactaaagtcatcaatggtgtccgttagtatatcaaagatcttgttatcgattgatagtggtgtcctttttcatccttgctatcaaagttacgcatgccgtggtgtaacaatatctttaatacagatggattaaatcgtgtattcatcgtatagcaatgtaatggagagttacctcgtttattcagatcgcagtgtttaataactagcttaaacagatgagacgatgtatccacatcaaagaacgtgaaatacatatgacagacattgttgacagaaacgtgaccttcattcttaccgtcgtccataaatacgttaggtatgtaccacatactgtcgcgaacgatgcgtacaatctcgtccatctcataatgatttactttttcataattaaagatgtgaaagaaaaacagaacaatatatttttttagtaatgtttatgcgagacatataaaataaactccgtgtttatgatcatttttaacagcaacacattcaatattgtattgttatttttatattatttacacaattaacaatatattattagtttatattactgaattaataatataaaattcccaatcttgtcataaacacacactgagaaacagcataaacacaaaatccatcaaaaatgtcgatgaaatatctgatgttgttgttcgctgctatgataatcagatcattcgccgatagtggtaacgctatcgaaacgacatcgccagaaattacaaacgctacaacagatattccagctatcagattatgcggtccagagggagatggatattgtttacacggtgactgtatccacgctagagatattgacggtatgtattgtagatgctctcatggttatacaggcattagatgtcagcatgtagtattagtagactatcaacgttcagaaaacccaaacactacaacgtcatatatcccatctcccggtattatgcttgtattagtaggcattattattattacgtgttgtctattatctgtttataggttcactcgacgaactaaactacctatacaagatatggttgtgccataatttttataaatttttttatgagtatttttacaaaaaaaatgtataaagtgtatgtcttatgtatatttataaaaatgctaagtatgcgatgtatctatgttatttgtatttatctaaacaatacctctacctctagatattatacaaaaattttttatttcggcatattaaagtaaaatctagttaccttgaaaatgaatacagtgggtggttccgtatcaccagtaagaacataatagtcgaatacagtatccgattgagattttgcatacaatactagtctagaaagaaatttgtaatcatcttctgtgacgggagtccatatatctgtatcatcgtctagtttatcagtgtcccatgctatattcctgttatcatcattagttaatgaaaataactctcgtgcttcagaaaagtcaaatattgtatccatacatacatctccaaaactatcgcttatacgtttatctttaacgatacctatacctagatggttatttactaacagacattttccagatctattgactataactcctatagtttccacatcaaccaagtaatgatcatctattgttatataacaataacataactcttttccatttttatcagtatgtatatctatatcaacgtcgtcgttgtagtgaatagtagtcattgatctattatatgaaacggatatgtctagaacggcaattgttttacgtccagttaacactttctttgatttaaagtctagagtctttgcaaacataatatccttatccgactttatatttcctgtagggtggtataattttattttgcctccacatatcggtgtttccaaatatattactagacaatattccatatagttattagttaagggtacccaattagaacacgtacgcttattatcatcatttggatcgtatttcataaaagttattgtactatcgatgtcaacacattctacattttttaatcgtctatatagtatttttctgatattttctataatatcagaattgtcttccatcggaagttgtatactatcggaatcagttacatgtttaaataattctctgatgtcattccttatacaatcaaattcattattaaacagtttaatagtctgtagacctttatcgtcgtaaatatccattgtcttattagttacgcttatttttatgtgttttacgttgctttattatattttataagaatgattgtttgacgaatcacgagaactattaagacacattattaggtatatattataaaaaagtttttgattacgatgttataagaggaaagaggacacattaacatcatacatcaattaactacattcttataacatcgtaatcaaaagaattgcaattttgatgtataacaactgtcaatgggttatggaattgtatattacatattatacggtatgttggtaacgacaaataccgatcggtaattgtctgccggtgtaatagaattatatatatctatctattacaccggctgagtatgcataataataagttgtggtagtatgatctccatatttataatttaggactttgtattcagtatttttggaatcataaaaaataaaaaaaagttttactaatttaaaatttaaaaagtatttacatttttttcactgtttagtcgcggatatggaattcgatcctgccaaaatcaatacatcatctatagatcatgtaacaatattacaatacatagatgaaccaaatgatataagactaacagtatgcattatccgaaatattaataacattacatattatatcaatatcacaaaaataaatacacatttggctaatcaatttcgggcttggaaaaaacgtatcgccggaagggactatatgactaacttatctagagatacaggaatacaacaatcaaaacttactgaaactatacgtaactgtcaaaaaaatagaaacatatatggtctatatatacactacaatttagttattaatgtggttattgattggataaccgatgtgattgttcaatcaatattaagagggttggtaaattggtacatagctaataatacctatacacccaataatacaacaaccatttctgagttggatatcatcaaaatactggataaatacgaggacgtgtatagagtaagtaaagaaaaagaatgtggaatttgctatgaagttgtttactcaaaacgatagatactttggtttattggattcgtgtactcatatattttgcataacatgcatcaatatatggcataaaacacgaagagaaaccggtgcgtcggataattgtcctatatgtcgtacccgttttagaaacataacaatgagcaagttctataagctagttaactaataaataaaaagtttaatttgttgacgacgtatgtcgttatttttctcgtatgaaagattaaattcaattcaattcgttgtttctaatataatctgccgtattggatggattctcaagacaattgcatttagattatattatcatgaataaaaatagtagcacgcactacttcagccaaatattcttttttgaaacgccatctatcgtagtgaggacacaagtgaacctataattatcaaatttattagtatcagtcacatgaaggactttctgtagagtgacgattctaccatctatggtactaacggtttcatcctccttgataccctcacccaaatgttctataaatttagcatcctcgtccgatctcatatcctttgccaaccaatacatgtagctaaaattaggcataaatttcacacatccagtgcaacgaaattctccagaagatgttacgatgtttaggttaggacatttgatttcgtcggcattaacatatgggtgaacacacccatacatgaaagcgatgagaaataggattctcatcttgccaaaatatcactagaaaaaatttatttatcaattttaaaggtataaaaaatacttattgttgctcgaatattttgtatttgatggtatacggaagattagaaatgtaggtattatcatcaactgattctatggttttatgtattctatcatgtttcactattgcgtcggaaataatatcatatgcttccacatatattttattttgttttaactcataatactcacgtaattctggattattggcatatctatgaataattttagctccatgatcagtaaatattaatgagaacatagtattaccacctaccattatttttttcatttcgttcaattcttgattgcaaagatctatataatcattatagcgttgacttatggactctggaatcttagacgatgtacagtcatctataatcatggcatatttaatacattgttttatagcatagtagttatctacgatgttagatatttctctcaatgaatcaatcacacaatctaatgtaggtttatgacataatagcattttcagcagttcaatgtttctagattcgttgatggcaatggctatacatgtatatccgttatttgatctaatgttgacatctgaaccggattctagcagtaaagatactagagattgtttattatatctaacagccttgtgaagaagtgtttctcctcgtttgtcaatcatgttaatgtctttaagataaggtaggcaaatgtttatagtactaagaattgggcaagcataagacatgtcacaaagaccctttttgtatgtataagtgtaaaaattataacattcatagttggatttacataggtgtccaatcgggatctctccatcatcgagataattgatggcatctcccttccttttttagtagatatttcatcgtgtaagaatcaatattaatatttctaaagtattcgtgtatagcctctttatttaccacagttccatattccactagagggatatcgccgaatgtcatatactcaattagtatatgttggaggacatccgagttcattgttttcaatatcaaaaagatggtttccttatcatttctccatagtggtacaatactacacattattccgtgcggctttccattttccaaaaacaatttgaccaaatctaaatctacatctttattgtatctataatcactatttagataatcagccataattactcgagtgcaacatgttagatcgtctatatatgaataagcagtgttatctattcctttcattaacaatttaacgatgtctatatctatatgagatgacttaatataatattgaagagctgtacaatagtttttatctatagaagacggcttgattccgtgattaattagacatttaacaacttccggacgcacatatgctctcgtatccgactttgaatacagatgagagatgatatacagatgcaatacggtaccgcaatttcgtagttgataatcatcatacgcgtatcagtactcgtcctcataaagaacactgcagccattttctatgaacaaatcaataattttaggaacaggatcattgtcattacataattttctataactgaacgatggttttcacatttaacactcaagtcaaatccatgttctaccaacacctttatcaagtcaacgtctacatttttggatttcatatagctgaatatattaaagtcatttatgttgctaaatccagtggcttctagtagagccatcgctatatcctttaactttaacatgtctactatttgtgtattcttctaatggggtagctgtctccaatttttgcgtaatggattagtgccactgtctagtagtagtttgacgacctcgacattattacaatgctcattaaaaaggtatgcgtgtaaagcattattcttgaattggttcctggtatcattaggatctctgtctctcaacatctgtttaagttcatcgagagccacctcctcattttccagatagtcaaacattttgactgaatgagctactgtgaactctatacacccacacaactaatgtcattaaatattatttttttgaatgtatttataccatgtcaaaaacttgtacaattattaataaaaataatttagtgtttaaattttaccagttccagattttacacctccgttaaccccactttttacaccactggacgatcctcctccccacattccaccgccaccagatgtataagttttagatcctttattactaccatcatgtccatggataaagacactccacatgccgccactactaccccctttagaagacatattaataagacttaaggacaagtttaacaataaaattaatcacgagtaccctactaccaacctacactattatatgattatagtttctatttttacagtaccttaactaaagtctctagtcacaagagcaatactaccaacctacactattatatgattatagtttctatttttataggaacgcgtacgagaaaatcaaatgtctaatttctaacggtagtgttgataaacgattatcgtcaatggatacctcctctatcatgtcgtctattttcttactttgttctattaacttattagcattatatattatttgattataaaacttatattgcttattagcccaatctgtaaatatcggattattaacatatcgtttctttgtaggtttatttaacatgtacatcactgtaagcatgtccgtaccatttattttaatttgacgcatatccgcaatttctttttcgcagtcggttataaattctatatatgatggatacatgctacatgtgtacttataatcgactaatatgaagtacttgatacatattttcagtaacgatttattattaccacctatgaataagtacctgtgatcgtctaggtaatcaactgttttcttaatacattcgatggttggtaatttactcagaataatttccaatatcttaatatataattctgctatttctgggatatatttatctgccagtataacacaaatagtaatacatgtaaacccatattttgttattatattaatgtctgcgccattatctattaaccattctactaggctgacactatgcgacttaatacaatgataaagtatactacatccatgtttatctattttgtttatatcatcaatatacggcttacaaagttttagtatcgataacacatccaactcacgcatagagaaggtagggaataatggcataatatttattaggttatcatcattgtcattatctacaactaagtttccattttttaaaatatactcgacaactttaggatctctattgccaaatttttgaaaatatttatttatatgcttaaatctatataatgtagctccttcatcaatcatacatttaataacattgatgtatactgtatgataagatacatattctaacaatagatcttgtatagaatctgtatatcttttaagaattgtggatattaggatattattacgtaaactattacacaattctaaaatataaaacgtatcacggtcgaataatagttgatcaactatataattatcgattttgtgatttttcttcctaaactgtttacgtaaatagttagatagaatattcattagttcatgaccactatagttactatcgaataacgcgtcaaatatttcccgtttaatatcgcatttgtcaagataataatagagtgtggtatgttcacgataagtataataacgcatctcttttttgtgtgaaattaaatagtttatcacgtccaaagatgtagcataaccatcttgtgacctagtaataatataataatagagaactgttttacccattctatcatcataatcagtggtgtagtcgtaatcgtaatcgtctaattcatcatcccaattataatattcaccagcacgtctaatctgttctattttgatcttgtatccatactgtatgttgctacatgtaggtattcctttatccaataatagtttaaacacatctacattgggatttgatgttgtagcgtatttctctacaatattaataccatttttgatactatttatttctatacctttcgaaattagtaatttcaataagtctatatcgatgttatcagaacatagatattcgaatatatcaaaatcattgatatttttatagtcgactgacgacaataacaaaatcacaacatcgtttttgatattattatttttcttggtaacgtatgcctttaatggagtttcaccatcatactcatataatggatttgcaccactttctatcaatgattgtgcactgctggcatcgatgttaaatgttttacaactatcatagagtatcttatcgttaaccatgattggttgttgatgctatcgcattttttggtttctttcatttcagttatgtatggatttagcacgtttgggaagcatgagctcatatgatttcagtactgtagtgtcagtactattagtttcgatcagatcaatgtctagatctatagaatcaaaacacgataggtcagaagataatgaatatctgtacgcttctttttgtactgtaacttctggttttgttagatggttgcatcgtgctttaacatcaatggtacaaattttatcctcgctttgtgtatcatattcgtctctagtataaaattctatattcagattatcatgcgatgtgtatacgctaacggtatcaataaacggagcacaccatttagtcataacagtaatccaaaattttttaaagtatatcttaacgaaagaagttgtgtcattgtctacggtgtatggtactagatcctcataagtgtatatatctagagtaatgtttaatttattaaatggttgataatatggatcctcatgacaatttccgaagatggaaatgagatatagacatgcaataaatctaatcgaagacatggttactccttaaaaaaatacgaataatcaccttggctatttagtaagtgtcatttaacactatactcatattaatccatggactcataatctctatacgggattaacggatgttctatatacggggatgagtagttttcttctttaactttatactttttactaatcatatttagactgatgtatgggtaatagtgtttaaagagttcgttctcatcatcagaataaatcaatatctctgtttttttgttatacagatgtattacagcctcatatattacgtaatagaacgtgtcatctaccttattaactttcaccgcatagttgtttgcaaatacggttaatcctttgacctcgtcgatttccgaccaatctgggcgtataatgaatctaaactttaatttcttgtaatcattcgaaataatttttagtttgcatccgtagttatcccctttatgtaactgtaaatttctcaacgcgatatctccattaataatgatgtcgaattcgtgctgtatacccatactgaatggatgaactaacgaatatcaacggcgttaatagtaatttactttttcatctttacatattgggtactagttttactatcataagtttataaattccacaagctactatggaataagccaaccatcttagtataccacacatgtcttaaagtttattaattaattacatgttgttttatatatatcgctacgaatttaaagagaaatcagtttaggaagaaaaaaattatctatctacatcatcacgtctctgtattctacgatagagtgctactttaagatgagacatatccgtgtcatcaaaaatatactccattaaaatgattattccggcagcgaacttgatattggatatatcacaacctttgttaatatctacgacaatagacagcagtcccatggttccataaacagtgagtttatctttctttgaagcgatagtttgtagagatcttataaaaccgtcaaacgacatcgcatttatatctttagctaattcatatatgttaccatcgtaatatctaaccgcgtctatcttaaacgtttccatcgctttaaagacgtttccgatagatggtctcatttcatcagtcatactgagccaacaaatataatcgtgtataacatctttgatagaatcagactctaaagaaaacgaatcggctttattatacgcattcatgataaacttaatgaaaaatgtttttcgttgtttaagttggatgaatagtatgtcttaataattgttattatttcattaattaatatttagtaacgagtacactctataaaaacgagaatgacataactagttatcaaagtgtctaggacgcgtaattttcatatggtatagatcctgtaagcattgtctgtattctggagctattttctttatcgcattagtaagttcagaatatgttataaatttaaatcgaataacgaacatgactttagtaaagtcgtctatattaactcttttattttctagccatcgtaataccatgtttaagatagtatattctctagttactacgatctcatcgttgtctagaatatcacatactgaatctacatccaattttagaaattggtctgtgttacatatctcttctatattattgttgatgtattgtcgtagaaaactattacgtagaccattttctttataaaacgaatatatagtactccaattatctttaccgatatatttgcacacataatccattctctcaatcactacatctttaagattttcgttgttaagatatttggctaaactatataattctattagatcatcaacagaatcagtatatatttttctagatccaaagacgaactctttggcgtcctctataatattcccagaaaagatattttcgtgttttagtttatcgagatctgatctgttcatatacgccatgattgtacggtacgttatgataaccgcataaaataaaaatccattttcatttttaaccaatactattcataattgagattgatgtaatactttgttactttgaacgtaaagacagtacacggatccgtatctccaacaagcacgtagtaatcaaatttggtgttgttaaacttcgcaatattcatcaatttagatagaaacttatactcatcatctgttttaggaatccatgtattattaccactttccaacttatcattatcccaggctatgtttcgtccatcatcgttgcgcagagtgaataattcttttgtattcggtagttcaaatatatgatccatgcatagatcggcaaagctattgtagatgtgatttttcctaaatctaatataaaactcgtttactagcaaacactttcctgatttatcgaccaagacacatatggtttctaaatctatcaagtggtggggatccatagttatgacgcagtaacatagattattacattcttgactgtcgctaatatctaaatatttattgttatcgtattggattctgcatatagatggcttgtatgtcaaagatatagaacacataaccaatttatagtcgcgctttacattctcgaatctaaagttaagagatttagaaaacattatatcctcggatgatgttatcactgtttctggagtaggatatattaaagtctttacagatttcgtccgattcaaataaatcactaaataatatcccacattatcatctgttagagtagtatcattaaatctattatattttatgaaagatatatcactgctcacctctatatttcgtacatttttaaactgtttgtataatatctctctgatacaatcagatatatctattgtgtcggtagacgataccgttacatttgaattaatggtgttccattttacaacttttaacaagttgaccaattcatttctaatagtatcaaactctccatgattaaatattttaatagtatccattttatatcactacggacacaaagtagctgacataaaccattgtataatttttatgttttatgtttattagcgtacacattttggaagttccggcttccatgtatttcctggagagcaagtagatgatgaggaaccagatagtttatatccgtacttgcacttaaagtctacattgtcgttgtatgagtatgatcttttaaacccgctagacaagtatccgtttgatattgtaggatgtggacatttaacaatctgacacgtgggtggatcggaccattctcctcctgaacacaggacaccagagttaccaatcaacgaatatccactattgcaactataagttacaacgctcccatcggtataaaaatcctcgtatccgttatgtcttccgttggatatagatggaggggattggcatttaacagattcacaaataggtgcctcgggattccataccatagatccagtagatcctaattcacaatacgatttagattcaccgatcaaatgatatccgctattacaagagtacgttatactagagccaaagtctactccaccaatatcaagttggccattatcgatatctcgaggcgatgggcatctccgtttaatacattgattaaagagtgtccatccagtacctgtacatttagcatatataggtcccattttttgctttctgtatccaggtagacatagatattctatagtgtctcctatgttgtaattagcattagcatcagtctccacactattcttaaatttcatattaatgggtcgtgacggaatagtacagcatgatagaacgcatcctattcccaacaatgtcaggaacgtcacgctctccaccttcatatttatttatccgtaaaaatgttatcctggacatcgtacaaataataaaaagcccatatatgttcgctattgtagaaattgtttttcacagttgctcaaaaacgatggcagtgacttatgagttacgttacactttggagtctcatctttagtaaacatatcataatattcgatattacgagttgacatatcgaacaaattccaagtatttgattttggataatattcgtattttgcatctgctataattaagatataatcaccgcaagaacacacgaacatctttcctacatggttaaagtacatgtataattctatccatttgtcttccttaactatatatttgtatagataattacgagtctcgtgagtaattccagtaattacatagatgtcgccgtcgtactctacagcataaactatactatgatgtctaggcatgggagacttttttatccaacgatttttagtgaaacattccacatcgtttaatactacatatttttcatacgtggtataaactccacccattacatatatatcatcgtttacgaataccgacgcgcctgaatatctaggagtaattaagtttggaagtcttatccatttcgaagtgccgtgtttcaaatattctgccacacccgttgaaatagaaaattctaatcctcctattacatataactttccatcgttaacacaagtactaacttctgattttaacgacgacatattagtaaccgttttccattttttcgtttcaagatctacccgcgatacggaataaacatgtctattgttaatcatgccgccaataatgtatagacaattatgtaaaacatttgcattatagaattgtctatctgtattaccgactatcgtccaatattctgttctaggagagtaatgggttattgtggatatataatcagagtttttaatgactactatattatgttttataccatttcgtgtcactggctttgtagatttggatatagttaatcccaacaatgatatagcattgcgcatagtattagtcataaacttgggatgtaaaatgttgatgatatctacatcgtttggatttttatgtatccactttaataatatcatagctgtaacatcctcatgatttacgttaacgttttcgtgggataagatagttgtcagttcatcctttgataattttccaaattctggatcggatgtcaccgcagtaatattgttgattatttctgacatcgacgcattatatagttttttaattccatatcttttagaaaagttaaacatccttatacaatttgtggaattaatattatgaatcatagtttttacacatagatctactacaggcggaacatcaattattatggcagcaactagtatcatttctacattgtttatggtgatgtttatcttcttccagcgtatatagtctaatagcgattcaaacgcgtgatagtttataccattcaatataatcgcttcatcctttagatggtgatcctgaattcgtttaaaaaaattatacggagatgccgtaataatttccttattcacttgtataatttccccattgatagaaaatatcacgctttccattcttgaagtactataagtaattatagtataatgtaaaggtttatatattcaatattttttataaaaaaatcattttgacattaattcctttttaaatttccgtctatcatctatagaaacgtattctatgaatttataaaatgcttttacgtgtcctatcgtaggcgatagaaccgctaaaaagcctatcgaatttctacaaaagaatctgttatatggtatagggagagtataaaacattaaatgtccgtacttattaaagtattcagtagccaatcctaactctttcgaatacttattaatggctcttgttctgtacgaatctatttttttgaacaacggacctagtggtatatcttgttctatgtatctaaaataatgtctgactagatccgttagtttaatatcctcagtcatcttgtctagaatggcaaatctaactgcgggtttaggctttagtttagtttttatatctacatctatgtctttatctaacaccaaaaatataatagctaatattttattacaatcatccggatattcttctacgatctcactaactaatgtttctttggttatactagtatagtcactatcggacaaataaagaaaatcagatgatcgatgaataatacatttaaattcatcatctgtaagatttttgagatgtctcattaaaatattattagggtcagtactcattatcattcggcagctattacttattttatttttctgtattttattatttttcaccatatagatcaatcattagatcatcaaaatatgtttcaatcatcctaaagagtatggtgaatgactcttcccatctaatttctgaacgttcaccaatgtctctagccactttggcactaatagcgatcattcgcttagcgtcttctatattattaactggttgattcaatctatctagcaatggaccgtcggacagcgtcattctcatgttcttaatcaatgtacatacatcgccgtcatctaccaattcatccaacaacataagctttttaaaatcatcattataataggtttgatcgttgtcatttctccaaagaatatatctaataagtagagtcctcatgcttagtaatttaactattttagttaacaactattttttatgttaaatcaattagtacaccgctatgtttaatacttattcatattttagtttttaggattgagaatcaatacaaaaaattaatgcatcattaattttagaaatacttagtttccacgtagttaatgaaacatttgaactcatcgtacaggacgttctcgtacaggacgtaactataaaccggtttatatttgttcaagatagatacaaatccgataactttttttacgaattctacgggatccactttaaaagtgtcataccgggttctttttattcttttaaacagatcaatggtgtgatgttgattaggtcttttacgaatttgatatagaatagcgttcacatatcctccataatggtcaatcgccatttgttcgtatgtcataaattctttaattatatgacactgtgtattatttagttcatccttgttcatcattaggaatctatccaaaatggcaattatactagaactataggtgcgttgtatacacatattgatgtgtctgtttatacaatccatgatatttggatccatgctactaccttcgggtaaaattgtagcatcatataccatttctagtactttaggttcattattatccattgcagaggacgtcatgatcgaatcctaaaaaaatatattatttttatgttattttgttaaaaataatcatcgaatacttcgtaagatactccttcatgaacataatcagttacaaaacgtttatatgaagtaaagtatctacgatttttacaaaagtccggatgcataagtacaaagtacgcgataaacggaataataatagatttatctagtctatctttttctatagctttcatagttagatacatggtctcagaagtaggattatgtaacatcagcttcgataaaatgactgggttatttagtcttacacattcgctcatacatgtatgaccgttaactacaaagtctacactaaaatgattgaacaatagatagtctaccattgtttcgtattcagatagtacagcgtagtacatagcatcttcacaaattatatcattgtctaatagatatttgacgcatcttatggatcccacttcaacagccatcttaaaatcggtagaatcatattgctttcctttatcattaataatttctaaaacatcatctctatcataaaagatacaaatattaactgtttgatccgtaataacattgctagtcgatagcaatttgttaataagatgcgctgggctcaatgtcttaataagaagtgtaagaggactatctccgaatttgttttgtttattaacatccgttgatggaagtaaaagatctataatgtctacattcttgactgttttagagcatacaatatggagaggtgtatttccatcatgatctggttttgagggactaattcctagtttcatcatccatgagattgtagaagcttttggattgtctgacataagatgtctatgaatatgatttttgccaaatttatccactatcctggcttcgaatccgatggacattatttttttaaacactctttctgaaggatctgtacacgccaacaacggaccacatccttcttcatcaaccgagttgttaatcttggctccatactgtaccaataaatttattctctctatgacttcatcatctgttcccgagagataatatagaggtgttttattatgtttatcacacgcgtttggatctgcgccgtgcgtcagcagcatcgcgactattctattattattaattttagaagctatatgcaatggataatttccatcatcatccgtctcatttggagagtatcctctatgaagaagttcttcgacaaatcgttcatctagtcctttaattccacaatacgcatgtagaatgtgataattatttccagaaggttcgatagcttgtagcatattcctaaatacatctaaatttttactattatatttggcataaagagatagataatactcggccgacataatgttgtccattgtagtataaaaattaatatttctatttctatttctgtatatttgcaacaatttactctctataacaaatatcataacttagttcttttatgtcaagaaggcactggtttagttcatctataaatgtcacgccataactaccacgcatgctatactcagaattatgataaagatatttatccttggggtgtaggtaatggggattaatctttgttggatcagtctctaagttaacacatgtcacacatgatccatttatagttatatcacacgatgatgatttatgaattgattccggaagatcgctatcgtattttgtggttccacaattcatttccatacatgttattgtcacactaatattatgatgaactttatctagccgctgagtggtaaacaacagaacagatagtttattatctttaccaacaccctcagccgctgccacaaatctctgatccgtatccatgatggtcatgtttatttctagtccgtatccagtcaacactatgttagcatttctgtcgatatagctttcactcatatgacactcaccaataatagtagaattaatgtcgtaatttacaccaatagtgagttcggcggcaaagtaccaataccggtaatcttgtcgaggaggacatatagtattcttgtattctaccgaatacccgagagatgcgatacaaaagagtaagactaatttgtaaaccatcttactcaaaatatgtaacaatagtacgatgcaatgagtaagacaataggaaatctatcttatatacacataattattctatcaattttaccaattagttagtgtaatgttaacaaaaatgtgggagaatctaattagtttttctttacacaattgacgtacatgagtctgagttccttgtttttgctaattatttcatccaatttattattcttgactatatcgagatcttttgtataggagtcagacttgtattcaacatgcttttctataatcattttagctatttcggcatcatccaatagtacattttccagattagcagaatagatattaatgtcgtatttgaacagagcctgtaacatctcaatgtctttattatctatagccaatttaatgtccggaatgaagagaagggaattattggtgtttgtcgacgtcatatagtcgagcaagagaatcatcatatccacgtgtccattttttatagtgatgtgaatacaactaaggagaatagccagatcaaaagtagatggtatctctgaaagaaagtaggaaacaatacttacatcattaagcatgacggcatgataaaatgaagttttccatccagttttcccatagaacatcagtctccaatttttcttaacaaacagttttaccgtttgcatgttaccactatcaaccgcataatacaatgcggtgtttcccttgtcatcaaattgtgaatcatccagtccactgaatagcaaaatctttactattttggtatcttccaatgtggctgcctgatgtaatggaaattcattctctagaagatttttcaatgctccagcgttcaacaacgtacatactagacgcacgttattatcagctattgcataatacaaggcactatgtccatggacatccgccttaaatgcatctttgctagagagaaagcttttcagctgcttagacttccaagtattaattcgtgacagatccatgtctgaaacgagacgctaattagtgtatattttttcattttttataattttgtcatattgcaccagaattaataatatctctaatagatctgattagtagatacatggctatcgcaaaacaacatatacacatttaataaaaataatatttattaagaaaattcagatttcacgtacccatcaatataaataaaataatgattccttacaccgtacccatattaaggagattccaccttacccataaacaatataaatccagtaatatcatgtctgatgatgaacacaaatggtgtattaaattccagtttttcaggagatgatctcgccgtagctaccataatagtagatgcctctgctacagttccttgttcgtcgacatctatctttgcattctgaaacattttataaatatataatgggtccctagtcatatgtttaaacgacgcattatctggattaaacatactaggagccatcatttcggctatcgacttaatatccctcttattttcgatagaaaatttagggagtttaagattgtacactttattccctaattgaaacgaccaatagtctaattttgcagccgtaatagaatctgtgaaatgggtcatattatcacctattgccaggtacatactaatattagcatccttatacggaaggcgtaccatatcatattcttcgtcatcgattgtgattgtatttccttgcaatttagtaactacgttcatcatgggaaccgttttcgtaccgtacttattagtaaaactagcattgcgtgttttagtgatatcaaacggatattgccatatacctttaaaatatatagtattaatgattgcccatagagtattattgtcgagcatattagaatctactacattagacataccggatctacgttctactatagaattaattttattaaccgcatctcgtctaaagtttaatctatataggccgaatctatgatattgttgataatacgacggtttaatgcacacagtattatctacgaaactttgataagttagatcagtgtacgtatatttagatgttttcagcttagctaatcctgatattaattctgtaaatgctggacccagatctctttttctcaaatccatagtcttcaataattctattctagtattacctgatgcaggcaatagcgacataaacatagaaaacgaataaccaaacggtgagaagacaatattatcatcttgaatatttttatacgctactataccggcattggtaaatccttgcagacgataggtagacactgaacacgttaacgatagtatcaataacgcaatcatgattttatggtattaataattaaccttatttttatgttcggtataaaaattattgatgtctacacatccttttgtaattgacatctatatatccttttgtataatcaactctaatcactttaacttttacagttttccctaccagtttatccctatattcaacatatctatccatatgcatcttaacactctctgccaagatagcttcaaagtgaggatagtcaaaaagataaatatatagagcataatccttctcgtatactctgccctttattacatcacccgcattgggcaacgaataacaaaatgcaagcatcttgttaacgggctcgtaaattgggataaaaattatgtttttatatctattttattcaagagaatattcaggaatttctttttccggttgtatctcatcgcagtatatatcatttgtacattgtttcatattttttaatagtctacaccttttagtaggactagtatcgtacaattcatagctgtattttgaattccaatcacgcataaaaatatcttccaattgttgacgaagacctaatccatcatccggtgtaatattaatagatgctccacatgtatccgtaaagtaatttcctgtccaatttgaggtacctatatacgccgttttatcggttaccatatatttggcatggtttaccctagaatacggaatgggaggatcagcatctggtacaataaatagctttacttctatatttatgtttttagattttagcatagcgatagatcttaaaaagtttctcatgataaacgaagatcgttgccagcaactaatcaatagcttaactgacacttgtctgtctatagcggctcttcttaattcatcttctatataaggccaaaacaaaatattgcctgccttcgaataaataatagggataaagttcataacagatacataaacgaatttactcgcatttctgatacatgacaataaagcggttaaatcattggttctttccatagtacatagttgttgcggtgcagaagcaataaatacagagtgtggaacgccgcttacgttaatactaagaggatgatctgtattataatacgacggataaaagtttttccaattatatggtagattgttaactccaagataccagtatacctcaaaaatttgagtgagatccgctgccaagttcctattattgaagatcgcaatacccaattctttgacctgagttagtgatctccaatccatgttagcgcttcctaaataaatatgtgtattatcagatatccaaaattttgtatgaagaactcctcctaggatatttgtaatatctatgtatcgtacttcaactccggccatttgtagtctttcaacatcctttaatggtttgttagatttattgacggctactctaactcgtactcctcttttgggtaattgtacaatcttgtttaatattatcgtgccgaaattcgtacccacttcatccgataaactccaataaaaagatgatatatctagtgtttttgtggtattggatagaatttccctccacatgttaaatgtagacaaatatactttatcaaattgcatacctataggaatagtctctgtaatcactgcgattgtattatccggattcattttatttgttaaaagaataatcctatatcacttcactctattaaaaatccaagtttctatttctttcatgactgattttttaacttcatccgtttccttatgaagatgatgtttggcaccttcataaatttttatttctctattacaatttgcatgttgcatgaaataatatgcacctaaaacatcgctaatcttattgtttgttccctggagtatgagagtcggggggtgttaatcttggaaattatttttctaaccttgttggtagccttcaagacctgactagcaaatccagccttaattttttcatgattgattaatgggtcgtattggtatttataaactttatccatatctctagatactgattctggacatagctttccgactggcgcatttagtgtgatggttcccataagtttggcagctagcagattcagttttgaaacagcatctgcattaactagaggagacattagaatcattgctgtaaacaagtttggattatcgtaagaggctagctcccatggaatgacccaataagtagatttaatagttaccacgtgctgtaccaaagtcatcaatcatcattttttcaccattacttcttccatgtccaatatgatcatgtgagaatactaaaattcctaacgatgatatgttttcagctagttcgtcataacgtccagaatgtttaccagctccatgacttatgaatactaatgccttaggatatgtaataggtttccaatatatgtaatcattgtccagattgaacatacagtttgcactcatgattcacgttatataactatcaatattaacagttcgtttgatgatcatattatttttatgttttattgataattgtaaaaacatacaattaaatcaatatagaggaaggagacggctactgtcttttgtgagatagtcatggcgactaaattagattatgaggatgctgttttttactttgtggatgatgataaaatatgtagtcgcgactccatcatcgatctaatagatgaatatattacgtggagaaatcatgttatagtgtttaacaaagatattaccagttgtggaagactgtacaaggaattgatgaagttcgatgatgtcgctatacggtactatggtattgataaaattaatgagattgtcgaagctatgagcgaaggagaccactacatcaattttacaaaagtccatgatcaggaaagtttattcgctaccataggaatatgtgctaaaatcactgaacattggggatacaaaaagatttcagaatctagattccaatcattgggaaacattacagatctgatgaccgacgataatataaacatcttgatactttttctagaaaaaaaattgaattgatgatataggggtcttcataacgcataattattacgttagcattctatatccgtgttaaaaaaaattatcctatcatgtatttgagagttttatatgtagcaaacatgatagctgtgatgccaataagctttagatattcacgcgtgctagtgttagggatggtattatctggtggtgaaatgtccgttatataatctacaaaataatcatcgcatatagtatgcgatagtagagtaaacatttttatcgtttctactgggttcatacatcgtctacccaattcggttataaatgaaattgtcgccaatcttacacccaaccccttgttatccattagtatagtattaacttcgttatttatgtcataaactgtaaatgattttgtagatgccatatcatacatgatattcatgtccctattataatcattactaactttatcacaatatatgttgataatatctatatatgatctagtctttgtgggcaactgtctatacaagtcgtctaaacgttgtttactcatatagtatcgaacagccatcattacatggtcccgttccgttgatagataatcgagtatgttagtggacttgtcaaatctatataccatattttctggaagtggatatacatagtcgtgatcaacattattgctagcctcatcttctatatcctgtactataccattatctatatcatctacataatctacgatattattacacataaacatcgacaacatactattgtttattatctaagtcctgttgatccaaacccttgatctcctctatttgtactatctagagattgtacttcttccagttctggataatatatacgttgatagattagctgagctattctatctccagtatttacattaaacgtacattttccattattaataagaatgactcctatgtttcccctataatcttcgtctattacaccgcctcctatatcaatgccttttagggacagaccagacctaggagctattctaccatagcagaacttaggcatggacatactaatatctgtcttaattaactgtcgttctcctggagggatagtataatcgtaagcgctatataaatcatatccggcggcgtaaggtgattgcctagtaggagatttagctctgttagtttccttaacaaatctaactggtgagttaatattcatgttgaacataaaactaatattttatttcaaaattatttaccatcccatatattccatgaataagtgtgatgattgtacacttctatagtatctatatacgattcacgataaaatcctcctatcaatagcagtttattatccactatgatcaattctggattatccctcggataaataggatcatctatcagagtccatgtattgctggattcacaataaaattccgcatttctaccaaccaagaataaccttctaccgaacactaacgcgcatgatttataatgaggataataagtggatggtccaaactgccactgatcatgattgggtagcaaatattctgtagttgtatcagtttcagaatgtcctcccattacgtatataacattgtttatggatgccactgctggattacatctaggtttcagaagactcggcatattaacccaagcagcatccccgtggaaccaacgctcaacagatgtgggatttggtagacctcctactacgtataatttattgttagcgggtatcccgctagcatacagtctggggctattcatcggaggaattggaatccaattgtttgatatataatttaccgctatagcattgttatgtatttcattgttcatccatccaccgatgagatatactacttctccaacatgagtacttgtacacatatggaatatatctataatttgatccatgttcataggatactctatgaatggatacttgtatgatttgcgtggttgtttatcacaatgaaatattttggtacagtctagtatccattttacattatttatacctctgggagaaagataatttgacctgattacatttttgataaggagtagcagatttcctaatttatttcttcgctttatataccacttaatgacaaaatcaactacataatcctcatctggaacatttagttcatcgctttctagaataagtttcatagatagataatcaaaattgtctatgatgtcatcttccagttccaaaaagtgtttggcaataaagtttttagtatgacataagagattggatagtccgtattctatacccatcatgtaacactcgacacaatattcctttctaaaatctcgtaagataaagtttatacaagtgtagatgataaattctacagaggttaatatagaagcacgtaataaattgacgacgttatgactatctatatatacctttccagtatacgagtaaataactatagaagttaaactgtgaatgtcaaggtctagacaaacccttgtaactggatctttatttttcgtgtatttttgacgtaaatgtgtgcgaaagtaaggagataactttttcaatatcgtagaattgactattatattgccacctatagcatcaataattgttttgaatttcttagtcatagacaatgctaatatattcttacagtacacagtattaacaaatatcggcatttatgtttctttaaaagtcaacatctaaagaaaaatgattatcttcttgagacataactcccattttttggtattcacccacacgtttttcgaaaaaattagtttttccttccaatgatatattttccatgaaatcaaacggattggtaacattataaatttttttaaatcccaattcagaaatcaatctatccgcgacgaattctatatatgttttcatcatttcacaattcattcctataagtttaactggaagagccgcagtaagaaattcttgttcaatggataccgcatctgttataatagatctaacggtttcttcactcggtggatgcaataaatgtttaaacatcaaacatgcgaaatcgcagtgcagaccctcgtctctactaattagttcgttggaaaacgtgagtccgggcattaggccacgctttttaagccaaaatatggaagcgaatgatccagaaaagaagattccttctactgcagcaaaggcaataagtctctctccataaccggcgctgtcatgtatccacttttgagcccaatcggccttcttttttacacaaggcatcgtttctatggcattaaagagatagtttttttcattactatctttaacataagtatcgatcaaaagactatacatttccgaatgaatgttttcaatggccatctgaaatccgtagaaacatctagcctcggtaatctgtacttctgtacaaaatcgttccgccaaattttcattcactattccgtcactggctgcaaaaaacgccaatacatgttttataaaatatttttcgtctggtgttagtttattccaatcattgatatctttagatatatctacttcttccactgtccaaaatgatgcctctgcctttttatacatgttccagatgtcataatattggattgggaaaataacaaatctatttggatttggtgcaaggatgggttccataactaaattaacaataacaataaattttttttcagttatctatatgcctgtacttggatcttttgtacatcgatatcgccgcaatcactacaataattacaagtattattgatagcattgttattagtactatcataattaaattatcgacattcatgggtgctgaataatcgttattatcatcattatcattttgtaattgtgacatcatactagataaatcgtttgcgagattgttgtgggaagcgggcatggaggatgaattatcgttattattatttaacgcctcccattcggattcacaaatgttacgcacattcaacattttatggaaactataattttgtgaaaacagataacaagaaaactcgtcatcgttcaaatttttaacgatagtaaaccgattaaacgtcgagctaatttctaacgctagcgactctgttggatatgggtttccagatatatatcttttcagttcccctacgtatctataatcatctgtaggaaatggaagatatttccatttatctactgttcctaatatcatatgtggtggtgtagtagaaccattaagcgcgaaagatgttatttcgcatcgtattttaacttcgcaataatttctggttagataacgcactctaccagtcaagtcaatgatattagcctttacagatatattcatagtagttgtaacgatgactccatcttttagatgcgatactcctttgtatgtaccagaatcttcgtaccgcaaactcgatatatttaaacaagttaatgagatattaacgcgttttatgaatgatgatatataaccagaagttttatcctcggtggctagcgctataaccttatcattataataccaactagtgtgattaatatgtgacacgttagtgtgggtacaaatatgtacattatcgtctacgtcgtattcgatacatccgcatacagccaacaaatataaaatgacaaatactctaacgccgttcgtacccatcttgatgcggtttaataaatgttttgatttcaatttattgtaaaaaaagattcggttttatactgttcgatattctcattgcttatattttcatctatcatctccacacagtcaaatccgtggttagcatgcacctcatcaaccggtaaaagactatcggactcttctatcattataactctagaatatttaatttggtcattattaatcaagtcaattatcttatttttaacaaacgtgagtattttactcattttttataaaaacttttagaaatatacagactctatcgtgtgtctatatcttctttttatatccaatgtatttatgtctgatttttcttcatttatcatatataatggtccaaattctacacgtgcttcggattcatccagatcattaaggttcttataattgtaacatccttctcttccctcttctacatcttccttcttattcttattcttagcgtcacagaatctaccacagcaggatcccatgacgagcgtcatattaaactaatccattttcaattataatatacgattagtaatgaccattaaaataaaaaatattcttcataaccggcaagaaagtgaaaagttcacattgaaactatgtcagtagtatacatcatgaaatgatgatatatatatactctattttggtggaggattatatgatataattcgtggataatcattcttaagacacatttcttcattcgtaaatcttttcacgttaaatgagtgtccatattttgcaatttcttcatatgatggcggtgtacgtggacgaagctgctcctgttcttgttgtagtcgccgactgtcgtgtttgcgtttagatccctccattatcgcgattgcgtagatggagtactattatataccttgtaattaaatttttttattaattaaacgtataaaaacgttccgtatctgtatttaagagccagatttcgtctaatagaacaaatagctacagtaaaaataactagaataattgctacacccactagaaaccacggatcgtaatacggcaatcggttttcgataataggtggaacgtatattttatttaaggacttaacaattgtctgtaaaccacaatttgcttccgcggatcctgtattaactatctgtaaaagcatatgttgaccgggcggagccgaacattctccgatatctaatttctgtatatctataatattattaacctccgcatacgcattacagttcttttctagcttggataccgcactaggtacatcgtctagatctattcctatttcttcagcgatagctcttctatccttttccggaagcaatgaaatcacttcaataaatgattcaaccatgagtgtgaaactaagtcgagaattactcatgcatttgttagttattcggagcgcgcaatttttaaactgtcctataacctctcctatatgaatagcacaagtgacattagtagggatagaatgttgagctaatttttgtaaataactatctataaaaagattatacaaagttttaaactctttagtttccgccatttatccagtctgagaaaatgtctctcataataaatttttccaagaaactaattgggtgaagaatggaaacctttaatctatatttatcacagtctgttttggtacacatgatgaattcttctaatgctgtactaaattcgatatctttttcgatttctggatatgtttttaataaagtatgaacaaagaaatggaaatcgtaataccagttatgttcaactttgaaattgttttttattttcttgttaatgattccagccacttgggaaaagtcaaagtcgtttaatgccgatttaatacgttcattaaaaacaaactttttatcctttagatgaattattattggttcattggaatcaaaaagtaagatattatcgggtttaagatctgcgtgtaaaaagttgtcgcaacagggtagttcgtagattttaatgtataacagagccatctgtaaaaagataaactttatgtattgtaccaaagatttaaatcctaatttgatagctaactcggtatctactttatctgccgaatacagtgctaggggaaaaattataatatttcctctttcgtattcgtagttagttctcttttcatgttcgaaaaagtgaaacatgcggttaaaatagtttataacattaatattactgttaataactgccggataaaagtgggatagtaatttcacgaatttgatactgtcctttctctcgttaaacgcctttaaaaaaactttagaagaatatctcaatgagagttcctgaccatccatagtttgtatcaataatagcaacatatgaagaacccgtttatacagagtatgtaaaaatgttaatttatagtttaatcccatggcccacgcacacacgattaattttttttcatctccctttagattgttgtatagaaatttgggtactgtgaactccgccgtagtttccatgggactatataattttgtggcctcgaatacaaattttactacatagttatctatcttaaagactataccatatcctcctgtagatatgtgataaaaatcgtcgtttataggataaaatcgtttatccttttgttggaaaaaggatgaattaatgtaatcattctcttctatctttagtagtgtttccttattaaaattcttaaaataatttaacaatctaactgacggagcccaattttggtgtaaatctaattgggacattatgttgttaaaatacaaacagtctcctaatataacagtatctgataatctatggggagacatccattgatattcaggggatgaatcattggcaacacccatttattgtacaaaaagccccaatttacaaacgaaagtccaggtttgatagagacaaacaattaactattttgtctctgtttttaatttctttggtaatgaaattattcacaatatcagtatcttctttatctaccagagattttactaacttgataaccttggctgtctcattcaatagggtagtaatatttgtatgtgtgatattgatatctttttgaattgtttcttttagaagtgattctttgatggtgccagcatacgaattacaataatgcagaaactcagttaacatgcaggaattatagtaagccaattccaattgttgcctgtattgtattagagtattaatatgcgcaatggtgtccttgcgtttctctgatagaatgcgagcagcgattttggcgttatcatttgacgatatttctggaatgacgaatcctgtttctactaactttttggtaggacaaagtgaaacaatcaagaagatagcttctcctcctatttgtggaagaaattgaactcctctagatgatctactgacgatagtatctccttgacagatattggaccgaattacagaagtacctggaatgtaaagccctgaaaccccctcattttttaagcagattgttgccgtaaatcctgcactgtgaccaagatagagagctcctttggtgaatccatctctatgtttcagtttaaccaagaaacagtcagctggtctaaaatttccatctctatctaatacagcatctaacttgatgtcaggaactatgaccggtttaatgttatatgtaacattgagtaaatccttaagttcataatcatcactgtcatcagttatgtacgatccaaacaatgtttctactggcatagtggatacgaagatgctatccatcagaatgtttccctgattagtattttctatatagctattcttctttaaacgattttccaaatcagtaactatgttcatttttttaggagtaggacgcctagccagtatggaagaggattttctagatcctctcttcaacatctttgatctcgatggaatgcaaaaccccatagtgaaacaaccaacgataaaaataatattgtttttcactttttataattttaccatctgactcatggattcattaatatctttataagagctactaacgtataattctttataactgaactgagatatatacaccggatctatggtttccataattgagtaaatgaatgctcggcaataactaatggcaaatgtatagaacaacgaaattatactagagttgttaaagttaatattttctatgagctgttccaataaattatttgttgtaactgcgttcaagtcataaatcatcttgatactatccagtaaaccgtgtttaagttctggaatattatcatcccattgtaaagcccctaattcgactatcgaatatcctgctctgatagcagtttcaatatcgacggacgtcaatactgtaataaaggtggtagtattgtcatcatcgtgataaactacgggaatatggtcgttagtaggtacggtgactttacacaacgcgatatataactttccttttgtaccatttttaacgtagttgggacgtcctgcagggtattgttttgaagaaatgatatcgagaacagatttgatacgatatttgttggattcctgattattcactataatataatctagacagatagatgattcgataaatagagaaggtatatcgttggtaggataatacatccccattccagtattctcggatactctattgatgacactagttaagaacatgtcttctattctagaaaacgaaaacatcctacatggactcattaaaacttctaacgctcctgattgtgtctcgaatgcctcgtacaaggatttcaaggatgccatagattctttgaccaacgatttagaattgcgtttagcatctgatttttttattaaatcgaatggtcggctctctggtttgctaccccaatgataacaatagtcttgtaaagataaaccgcaagaaaatttatacgcatccatccaaataaccctagcaccatcggatgatattaatgtattattatagattttccatccacaattattgggccagtatactgttagcaacggtatatcgaatagattactcatgtaacctactagaatgatagttcgtgtactagtcataatatctttaatccaatctaagaaatttaaaattagattttttacactgttaaagttaacaaaggtattacccggatacgtggatatcatatatggcattggtccattatcagtaatagctccataaactgatacggcgatggtttttatatgtgtttgatctaacgaggaagaaattcgcgcccacaattcatctctagatatgtatttaatatcaaacggtaacacatcaatttcgggacgcgtatatgtttctaaatttttaatccaaatataatgatgacctatatgccctattatcatactgtcaactatagtacacctagagaacttacgatacatctgtttcctataatcgttaaattttacaaatctataacatgctaaaccttttgacgacagccattcattaatttctgatatggaatctgtattctcgataccgtattgttctaaagccagtgctatatctccctgttcgtgggaacgctttcgtataatatcgatcaacggataatctgaagtttttggagaataatatgactcatgatctatttcgtccataaacaatctagacataggaattggaggcgatgatcttaattttgtgcaatgagtcgtcaatcctataacttctaatcttgtaatattcatcatcgacataatactatctatgttatcatcgtatattagtataccacggccttcttcatttcgtgccaaaataatatacagtcttaaataattacgcaatatctcaatagtttcataattgttagctgttttcatcaagatttgtaccctgtttaacatgatggcgttctatacgtctctattttcttttttttaaatttttaacgatttactgtggctagatacccaatctctctcaaatatttttttagcctcgcttacaagctgtttatctatactattaaaactgacgaatccgtgattttggtaatgggttccgtcgaaatttgccgaagtgatatgaacatattcgtcgtcgactatcaacaattttgtattattctgaatagtgaaaaccttcacagatagatcattttgaacacacaacgcgtctagacttctggcggttgccatagaatatacgtcgttcttatcccaattaccaactagaagtctgatcttaactcctctattaatggctgcttctataatggagttgtaaatgtcgggccaatagtagctattaccgtcgacacgtgtagtgggaactatggccaaatgttcaatatctatactagtcttagccgacttgagtttatcaataactacatcggtatctagatctctagaatatcccaataggtgttccggagaatcagtaaagaacactccacctataggattcttaatatgatacgcagtgctaactggcaaacaacaagccgcagagcataaattcaaccatgaattttttgcgctattaaaggctttaaaagtatcaaatcttctacgaagatctgtggccagcgggggataatcagaatatacacctaacgttttaatcgtatgtatagatcctccagtaaatgacgcgtttcctacataacatctttcatcatctgacacccaaaaacaaccgagtagtagtcccacattattttttttatctatattaacggttataaaatttatatccgggcagtgactttgtagctctcccagatttcttttccctcgttcatctagcaaaactattattttaatccctttttcagatgcctcttttagtttatcaaaaataagcgctcccctagtcgtactcagaggattacaacaaaaagatgctatgtatatatatttcttagctagagtgataatttcgttaaaacattcaaatgttgttaaatgatcggatctaaaatccatattttctggtagtgtttctaccagcctacattttgctcccgcaggtaccgatgcaaatggccacatttagttaacataaaaacttatacatcctgttctatcaacgattctagaatatcatcggctatatcgctaaaattttcatcaaagtcgacatcacaacctaactcagtcaatatattaagaagttccatgatgtcatcttcgtctatttctatatccgtatccattgtagattgttgaccgattatcgagtttaaatcattactaatactcaatccttcagaatacaatctgtgtttcattgtaaatttataggcggtgtatttaagttggtagattttcaattatgtatcaatatagcaacagtagttcttgctcctccttgattctagcatcctcttcattattttcttctacgtacataagcatgtccaatacgttagacaacacaccgacgatggcggccgccacagacacgaatatgactagaccgatgaccatttaaaaacccctctctagctttcacttaaactgtatcgattattcttttagaacatgtataatataaaaacattattctatttcgaatttaggcttccaaaaatttttcatccgtaaaccgataataatatatatagacttgttaatagtcggaataaatagattaatgcttaaactatcatcatctccacgattagagatacaatatttacattttttttgctgtttcgaaactttatcaatacacgttaatacaaacccaggaaggagatattgaaactgaggctgttgaaaatgaaacggtgaatacaataattcagataatgtaaaatcatgattccgtattctgatgatattagaactgctaatggatgtcgatggtatgtatctaggagtatctattttaacaaagcatcgatttgctaatatacaattatccttttgattaattgttattttattcatattcttaaaaggtttcatatttatcaattcttctacattaaaaatttccatttttaatttatgtagcccccgcaatactcctcattacgtttcattttttgtctataatatccattttgttcatctcggtacatagattatccaattgagaagcgcatttagtagttttgtacattttaagtttattgacgaatcgtcgaaaactagttatagttaacattttattatttgataccctgatattaatacccctgccgttactattatttataactgatgtaatccacgtaacattagaattaattatcgatagtaatgcatcgacgcttccaaaattgtctattataaactcaccgataatttttttattgcatgttttcatattcattaggattatcaaatctttaatcttactacgattgtatgcgttgatattgcaagacgtcattctaaaagacggaggatctccatcaaatgccagacaatcacgtacaaagtacatggaaataggttttgttctattgcgcatcatagatttatatagaacacccgtagaaatactaatttgttttactctataaaatactaatgcatctatttcatcgttttgtataacgtctttccaagtgtcaaattccaaatttttttcattgatagtaccaaattcttctatctctttaactacttgcatagataggtaattacagtgatgcctacatgccgttttttgaaactgaatagatgcgtctagaagcgatgctacgctagtcacaatcaccactttcatatttagaatatatgtatgtaaaaatatagtagaatttcattttgtttttttctatgctataaatgaattctcattttgcatctgctcatactccgttttatatcaataccaaagaaggaagatatctggttctaaaagccgttaaagtatgcgatgttagaactgtagaatgcgaaggaagtaaagcttcctgcgtactcaaagtagataaaccctcatcgcccgcgtgtgagagaagaccttcgtccccgtccagatgcgagagaatgaataaccctggaaaacaagttccgtttatgaggacggacatgctacaaaatatgttcgcggctaatcgcgacaacgtggcgtcgagacttttgaactaaaatacaattatatccttttcgatattaataaatccgtgtcgtccaggttttttatctctttcagtatgtgaatagataggtattttatctctattcatcatcgaatttaagagatccgataaacattgtttgtattctccagatgtcagcatctgatacaacaatatatgtgcacataaacctctggcacttatttcatgtaccttccccttatcactaaggagaatagtatttgagaaatatgtatacatgatattatcatgaattagatatacagaatttgtaacactctcgaaatcacacgatgtgtcggcgttaagatctaatatatcactcgataacacattttcatctagatacactagacattttttaaagctaaaatagtctttagtagtgacagtaactatgcgattattttcatcgatgatacatttcatcggcatattattacgcttaccatcaaagactataccatgtgtatatctaacgtattctagcatggttgccatacgcgcattaaacttttcaggatctttggatagatcttccaatctatctatttgagaaaacatttttatcatgttcaatagttgaaacgtcggatccactatatagatattatctataaagattttaggaactacgttcatggtatcctggcgaatattaaaactatcaatgatatgattatcgttttcatcttttatcaccatatagtttctaagatatgggattttacttaatataatattatttcccgtgataaattttattagaaaggccaaatctataagaaaagttctagaattagtctgaagaatatctatatcgccgtaccgtatatttggattaattagatatagagaatatgatccgtaacatatacaacttttattatggcgtctaagatattcttccatcaacttattaacatttttgactagggaagatacattatgacgtcccattacttttgccttgtctattactgcgacgttcatagaatttagcatatctcttgccaattcttccattgatgttacattataagaaattttagatgaaattacatttggagctttaatagtaagaactcctaatatgtccgtgtatgtggtcactaatacagattgtagttctataatcgtaaataatttacctatattatatgtttgagtctgtttagaaaagtagctaagtatacgatcttttatttctgatgcagatgtattaacatcggaaaaaaatctttttttattcttttttactaaagatacaaatatgtctttgttaaaaacagttattttttgaatatttctagcttgtaattttaacatatgatattcgttcacactaggtactctgcctaaataggtttctataatctttaatgtaatattaggaagagtattctgatcaggattcctattcattttgaggatttaaaactctgattattgtctaatatggtctctacgcaaactttttcacagagcgatagagtttttgataactcgtttttcttaagaaatataaaactactgtctccagagctcgctctatcttttattttatttaattcgatacaaactcctgatactggttcagaaagtaattcattaattttcagtcctttatagaagatatttaatatagataatacaaaattttcagttcttgatatcgatctgattgatcctagaactagatatattaataacgtgctcattaggcagtttatggcagcttgataattagatatagtatattccagttcatatttattagataccgcattgcccagattttgatattctatgaattcctctgaaaataaatccaaaataactaaacattctattttttgtggattagtgtactctcttccctctatcatgttcactactggtgtccacgatgataaatatctagagggaatataatatagtccataggatgccaatctagcaatgtcgaataactgtaatttgattcttcgttcttcattatgaattgattcttgaggtataaacctaacacaaattatattattagacttttcgtatgtaatgtctttcatgttataagtttttaatcctggaatagaatctattttaatgaggcttttaaacgcagagttctccaacgagtcaaagcataatactctgttgtttttcttatatacgatgttacgattttcttctttgaatggaataggtttttgaattagtttataattacaacataatagataaggaagtgtgcaaatagtacgcggaaaaaacataatagctcccctgttttcatccatggttttaagtaaatgatcactggcttctttagtcaatggatattcgaacattaaccgtttcatcatcattggacagaatccatatttcttaatgtaaagagtgatcaaatcattgtgtttattgtaccatcttgttgtaaatgtgtattcggttatcggatctgctcctttttctattaaagtatcgatgtcgatctcgtctaagaattcaactatatcgacatatttcatttgtatacacataaccattactaacgtagaatgtataggaagagatgtaacgggaacagggtttgttgattcgcaaactattctaatacataattcttctgttaatacgtcttgcacgtaatctattatagatgccaagatatctatataattattttgtaagatgatgttaactatgtgatctatataagtagtgtaataattcatgtatttcgatatatgttccaactctgtctttgtgatgtctagtttcgtaatatctatagcatcctcaaaaaatatattcgcatatattcccaagtcttcagttctatcttctaaaaaatcttcaacgtatggaatataataatctattttacctcttctgatatcattaatgatatagtttttgacactatcttctgtcaattgattcttattcactatatctaagaaacggatagcgtccctaggacgaactactgccattaatatctctattatagcttctggacataattcatctattataccagaattaatgggaactattccgtatctatctaacatagttttaagaaagtcagaatctaagacctgatgttcatatattggttcatacatgaaatgatctctattgatgatagtgactatttcattctctgaaaattggtaactcattctatatatgctttccttgttgatgaaggatagaatatactcaatagaatttgtaccaacaaactgttctcttatgaatcgtatatcatcatctgaaataatcatgtaaggcatacatttaacaattagagacttgtctcctgttatcaatatactattcttgtgataatttatgtgtgaggcaaatttgtccacgttctttaattttgttatagtagatatcaaatccaatggagctacagttcttggcttaaacagatatagtttttctggaacgaattctacaacattattataaaggactttgggtagataagtgggatgaaatcctattttaattaatgcgatagccttgtcctcgtgcagatatccaaacgcttttgtgatagtatggcattcattgtctagaaacgctctacgaatatctgtgacagatatcatctttagagaatatactagtcgcgttaatagtactacaatttgtattttttaatctatctcaataaaaaaattaatatgtatgattcaatgtataactaaactactaactgttattgataactagaatcagaatctaatgatgacgtaaccaagaagtttatctactgccaatttagctgcattatttttagcatctcgtttagattttccatctgccttatcgaatactcttccgtcgatgtctacacaggcataaaatgtaggagagttactaggccccactgattcaatacgaaaagaccaatctctcctagtaatttggcagtactcattaataacggtgacagggttagcacctttccaatcaataatttttttagccggaataacatcatcaaaagacttatgatcctctctcattgatttttcgcgggatacatcatctattatgacgtcagccatagcatcagcatccggcttatccgcctccgttgtcataaaccaacgaggaggaatatcgtcggagctgtacaccatagcactacgttgaagatcgtacagagctttattaacttctcgcttctccatattaagttgtctagttagttgtgcagcagtagctccttcgattccaatggttttaatagcctcacacacaatctctgcgttagaacgctcgtcgatatagattttagacatttttagagagaactaacgcaatcagtaataaaactaatttattttatcattttttttattcatcatcctctggtggttcgtcgtttctatcgaatgtagctctgattaacccgtcatctataggtgatgctggttctggagattctggaggagatggattattatctggaagaatctctgttatttccttgttttcatgtatcgattgcgttgtaacattaagattgcgaaatgctctaaatttgggaggcttaaagtgttgtttgcaatctctacacgcgtgtctaactagtggaggttcgtcagcggctctagtttgaatcatcatcggcgtagtattcctacttttacagttaggacacggtgtattgtatttctcgtcgagaacgttaaaataatcgttgtaactcacatcctttattttatctatattgtattctactcctttcttaatgcattttataccgaataagagatagcgaaggaattctttttcggtgccgctagtacccttaatcatatcacatagtgttttatattccaaatttgtggcaatagacggtttatttctatacgatagtttgtttctggaatcctttgagtattctataccaatattattctttgattcgaatttagtttcttcgatattagattttgtattacctatattcttgatgtagtactttgatgatttttccatggcccattctattaagtcttccaagttggcatcatccacatattgtgatagtaattctcggatatcagtagcggttaccgccattgatgtttgttcattggatgagtaactactaatgtatacattttccatttataacacttatgtattaactttgttcatttatattttttcattattatgttgatattaacaaaagtgaatatatatatgttaataattgtattgtggttatacggctacaattttataattagtgaaagtcagtgtccgatgatcaatgacgatagctttactctgaaaagaaagtatcaaatcgatagtgcggagtcaacaataaaaatggataagaagaggacaaagtttcagaatagagccaaaatggtaaaagaaataaatcagacaataagagcagcacaaactcattacgagacattgaaactaggatacataaaatttaagagaatgattaggactactactctagaagatatagcaccatctattccaaataatcagaaaacttataaactattctcggacatttcagccatcggcaaagcatcacggaatccaagtaagatggtatatgctctgctgctttacatgtttcccaatttgtttggagatgatcatagattcattcgttatagaatgcatccaatgagtaaaatcaaacacaagatcttctctcctttcaaacttaatcttattagaatattagtggaagaaagattctataataatgaatgcagatctaataaatggagaataattggaacacaagttgataaaatgttgatagctgaatctgataaatatacaatagatgcaaggtataacctaaaacccatgtatagaatcaagggaaaatctgaagaagataccctctttatcaaacagatggtagaacaatgtgtgacatcccaggaattggtggaaaaagtgttgaagatactgtttagagatttgttcaagagtggagaatacaaagcgtacagatacgatgatgatgtagaaaatggatttattggattggatacactaaaattaaacattgttcatgatatagttgaaccatgtatgcctgttcgtaggccagtggctaagatactgtgtaaagaaatggtaaataaatactttgagaatccgctacatattattggtaaaaatcttcaagagtgcattgactttgttagtgaataggcatttcatctttctccaatactaattcaaattgttaaattaataatggatagtataaatagttattagtgataaaatagtaaaaataattattagaataagagtgtagtatcatagataactctcttctataaaaatggattttattcgtagaaagtatcttatatacacagtagaaaataatatagattttttaaaggatgatacattaagtaaagtaaacaattttaccctcaatcatgtactagctctcaagtatctagttagcaattttcctcaacatgttattactaaggatgtattagctaataccaatttttttgttttcatacatatggtacgatgttgtaaagtgtacgaagcggttttacgacacgcatttgatgcacccacgttgtacgttaaagcattgactaagaattatttatcgtttagtaacacaatacaatcgtacaaggaaaccgtgcataaactaacacaagatgaaaaatttttagaggttgccaaatacatggacgaattaggagaacttataggcgtaaattatgacttagttcttaatccattatttcacggaggggaacccatcaaagatatggaaatcatttttttaaaactgtttaagaaaacagacttcaaagttgttaaaaaattaagtgttataagattacttatttgggcttacctaagcaagaaagatacaggcatagagtttgcggataatgatagacaagatatatatactctatttcaacaaactggtagaatcgtccatagcaatctaacagaaacgtttagagattatatctttcccggagataagactagctattgggtgtggttaaacgaaagtatagctaatgatgcggatattgttcttaatagacacgccattaccatgtatgataaaattcttagttatatatactctgagataaaacaaggacgcgttaataaaaacatgcttaagttagtttatatctttgagcctgaaaaagatatcagagaacttctgctagaaatcatatatgatattcctggagatatcctatctattattgatgcaaaaaacgacgattggaaaaaatattttattagtttttataaagctaattttattaacggtaatacatttattagtgatagaacgtttaacgaggacttattcagagttgttgttcaaatagatcccgaatatttcgataatgaacgaattatgtctttattctctacgagtgctgcggacattaaacgatttgatgagttagatattaataacagttatatatctaatataatttatgaggtgaacgatatcacattagatacaatggatgatatgaagaagtgtcaaatctttaacgaggatacgtcgtattatgttaaggaatacaatacatacctgtttttgcacgagtcggatcccatggtcatagagaacggaatactaaagaaactgtcatctataaaatccaagagtagacggctgaacttgtttagcaaaaacattttaaaatattatttagacggacaattggctcgtctaggtcttgtgttagatgattataaaggagacttgttagttaaaatgataaaccatcttaagtctgtggaggatgtatccgcattcgttcgattttctacagataaaaaccctagtattcttccatcgctaatcaaaactattttagctagttataatatttccatcatcgtcttatttcaaaggtttttaagagataatctatatcatgtagaagaattcttggataaaagcatccatctaaccaagacggataagaaatatatacttcaattgataagacacggtagatcatagaacagaccaaatatattattaataatttgtatatacatagatataattatcacatattaaaaattcacacatttttgataaatgggaactgctgcaacaattcagactcccaccaaattaatgaataaagaaaatgcagaaatgattttggaaaaaattgttgatcatatagttatgtatattagtgacgaatcaagtgattcagaaaataatcctgaatatattgattttcgtaacagatacgaagactatagatctctcattataaaaagtgatcacgagtttgtaaagctatgtaaaaatcatgcagagaaaagttctccagaaacgcaacaaatgattatcaaacacatatacgaacaatatcttattccagtatctgaagtactattaaaacctataatgtccatgggtgacataattacatataacggatgtaaagacaatgaatggatgctagaacaactctctaccctaaactttaacaatctccgcacatggaactcatgtagcataggcaatgtaacgcgtctgttttatacattttttagttatctgatgaaagataaactaaatatataagtataatcccattctaatactttaacctgatgtattagcatcttattagaatattaacctaactaaaagacataacataaaaactcattacatagttgataaaaagcggtaggatataaatattatggctgccaccgttccgcgttttgacgacgtgtacaaaaatgcacaaagaagaattctagatcaagaaacattttttagtagaggtctaagtagaccgttaatgaaaaacacatatctatttgataattacgcgtatggatggataccagaaactgcaatttggagtagtagatacgcaaacttagatgcaagtgactattatcccatttcgttgggattacttaaaaagttcgagtttctcatgtctctatataaaggtcctattccagtatacgaagaaaaagtaaatactgaattcattgctaatggatcgttctctggtagatacgtatcatatcttcgaaagttttctgctcttccaacaaacgagtttattagttttttgttactgacttccattccaatctataatatcttgttctggtttaaaaatactcagtttgatattactaaacacacattattcagatacgtctatacagataatgccaaacacctggcgttggctaggtatatgcatcaaacaggagactataagcctttgtttagtcgtctcaaagagaattatatatttaccggtcccgttccaataggtatcaaagatataaatcaccctaatcttagtagagcaagaagtccatccgattatgagacattagctaatattagtactatattgtactttaccaagtatgatccggtattaatgtttttattgttttacgtacctgggtattcaattactacaaaaattactccagccgtagaatatctaatggataaactgaatctaacaaagagcgacgtacaactgttgtaaattattttatgcttcgtaaaatgtaggttttgaaccaaacattctttcaaagaatgagatgcataaaactttattatccaatagattgactatttcggacgtcaatcgtttaaagtaaacttcgtaaaatattctttgatcactgccgagtttaaaacttctatcgataattgtttcatatgttttaatatttacaagttttttggtccatggtacattagccggacaaatatatgcaaaataatatcgttctccaagttctatagtttctggattatttttattatattcagtaaccaaatacatattagggttatctgcggatttataatttgagtgatgcattcgactcaacataaataattctagaggagacgatctactatcaaattcggatcgtaaatctgtttctaaagaacggagaatatctatacatacctgattagaattcatccgtccttcagacaacatctcagacagtctggtcttgtatgtcttaatcatattcttatgaaacttggaaacatctcttctagtttcactagtacctttattaattctctcaggtacagattttgaattcgacgatgccgagtatttcatcgttgtatatttcttcttcgattgcataatcagattcttatataccgcctcaaactctattttaaaattattaaacaatactctattattaatcagtcgttctaactcctttgctatttctatggacttatctacatcttgactgtctatctctgtaaacacggagtcggtatctccatacacgctacgaaaacgaaatctgtaatctataggcaacgatgttttcacaatcggattaatatctctatcgtccatataaaatggattacttaatggattggcaaaccgtaacataccgttagataactctgctccatttagtaccgattctagatacaagatcattctacgtcctatggatgtgcaactcttagccgaagcgtatgagtatagagcactatttctaaatcccatcagaccatatactgagttggctactatcttgtacgtatattgcatggaatcatagatggccttttcagttgaactggtagcctgttttaacatctttttatatctggctctctctgccaaaaatgttcttaatagtctaggaatggttccttctatcgatctatcgaaaattgctatttcagagatgaggttcggtagtctaggttcacaatgaaccgtaatatatctaggaggtggatatttctgaagcaagagctgattatttatttcttcttccaatctattggtactaacaacgacaccgactaatgtttccggagatagatttccaaagatacacacattaggatacagactgttataatcaaagattaatacattattactaaacattttttgttttggagcaaataccttaccgccttcataaggaaacttttgttttgtttctgatctaactaagatagttttagtttccaacaatagctttaacagtggacccttgatgactgtactcgctctatattcgaataccatggattgaggaagcacatatgttgacgcacccgcgtctgtttttgtttctactccataatactcccacaaatactgacacaaacaagcatcatgaatacagtatctagccatatctaaagctatgtttagattataatccttatacatctgagctaaatcaacgtcatcctttccgaaagataatttatatgtatcattaggtaaagtaggacataatagtacgactttaaatccattttcccaaatatctttacgaattactttacatataatatcctcatcaacagtcacataattacctgtggttaaaacctttgcaaatgcagcggctttgcctttcgcgtccgtagtatcgtcaccgatgaacgtcatttctctaactcctctatttaatactttacccatgcaactgaacgcgttcttggatatagaatccaatttgtacgaatccaatttttcagatttttgaatgaatgaatatagatcgaaaaatatagttccattattgttattaacgtgaaacgtagtattggccatgccgcctactcccttatgactagactgatttctctcataaatacagagatgtacagcttcctttttgtccggagatctaaagataatcttctctcctgttaataactctagacgattagtaatatatctcagatcaaagttatgtccgttaaaggtaacgacatagtcgaacgttagttccaacaattgtttagctattcgtaacaaaactatttcagaacataaaactagttctcgttcgtaatccatttccattagtgactgtatcctcaaacatcctctatcgacggcttcttgtatttcctgttccgttaacatctcttcattaatgagcgtaaacaataatcgtttaccacttaaatcgatataacagtaacttgtatgcgagattgggttaataaatacagaaggaaacttcttatcgaagtgacactctatatctagaaataagtacgatcttgggatatcgaatctaggtatttttttagcgaaacagttacgtggatcgtcacaatgataacatccattgttaatctttgtcaaatattgctcgtccaacgagtaacatccgtctggagatatcccgttagaaatataaaaccaactaatattgagaaattcatccatggtggcattttgtatgctgcgtttctttggctcttctatcaaccacatatctgcgacggagcattttctatctttaatatctagattataacttattgtctcgtcaatgtctatagttctcatctttcccaacggcctcgcattaaatggaggaggagacaatgactgatatatttcgtccgtcactacgtaataaaagtaatgaggaaatcgtataaatacggtctcaccatttcgacatctggatttcagatataaaaatctgttttcaccgtgactttcaaaccaattaatgcaccgaacatccatttatagaatttagaaatatattttcatttaaatgaatcccaaacattggggaagagccgtatggaccattatttttatagtactttcgcaagcgggtttagacggcaacatagaagcgtgtaaacgaaaactatatactatagttagcactcttccatgtcctgcatgtagacggcacgcgactatcgctatagaggacaataatgtcatgtctagcgatgatctgaattatatttattattttttcatcagattatttaacaatttggcatctgatcccaaatacgcgatcgatgtgacaaaggttaaccctttataaacttaacccattataaaacttatgattagtcacgactgaaataaccgcgtgattattttttggtataattctacacggcatggtttctgtgactatgaattcaacccccgttacattagtgaaatctttaacaaacagcaagggttcgtcaaagacataaaactcattgtttacaatcgaaatagaccccctatcacacttaaaataaaaaatatccttatcctttaccaccaaataaaattctgattggtcaatgtgaatgtattcacttaacagttccacaaatttatttattaactccgaggcacatacatcgtcggtattttttatggcaaactttactcttccagcatccgtttctaaaaaaatattaacgagttccatttatatcatccaatattattgaaatgacgttgatggacaaatgatacaaataagaaggtacggtacctttgtccaccatctcctccaattcatgctctattttgtcattaactttaatgtatgaaaacagtacgccacatgcttccatgacagtgtgtaacactttggatacaaaatgtttgacattagtataattgttcaagactgtcaatctataatagatagtagctataatatattctatgatggtattgaagaagatgacaaccttggcatattgatcatttaacacagacatggtatcaacagatagcttgaatgaaagagaatcagtaattggaataagcgtcttctcgatggagtgtccgtataccaacatgtctgatattttgatgtattccattaaattatttagttttttctttttattctcgttaaacagcatttctgtcaacggaccccaacatcgttgaccgattaagttttgattgatttttccgtgtaaggcgtatctagtcagatcgtatagcctatccaataatccatcgtctgtgtgtagatcacatcgtacactttttaattctctatagaagagcgacagacatctggagcaattacagacagcaatttctttattctctacagatgtaagatacttgaagacattcctatgatgatgcagaattttggataacacggtattgatggtatctgttaccataattcctttgatggctgatagtgtcagagcacaagatttccaatctttgacaatttttagcaccattatctttgttttgatatctatatcagacagcatggtgcgtctgacaacacaaggattaagacggaaagatgaaatgattctctcaacatcttcaatggataccttgctattttttctggcattatctatatgtgcgagaatatcctctagagaatcagtatcctttttgatgatagtggatctcaatgacatgggacgtctaaaccttcttattctatcaccagattgcatggtgatttgtcttctttcttttatcataatgtaatctctaaattcatcggcaaattgtctatatctaaaatcataatatgagatgtttacctctacaaatatctgttcgtccaatgttagagtatttacatcagttttgtattccaaattaaacatggcaacggatttaattttatattcctctattaagtcctcgtcgataataacagaatgtagataatcatttaatccatcgtacatggttggaagatgctcgttgacaaaatctttaattgtcttgatgaaggtgggactatatctaacatcttgattaataaaatttataacattgtccataggatactttgtaactagttttatacacatctcttcatcggtaagtttagacagaatatcgtgaacaggtggtatattatattcatcagatatacgaagaacaatgtccaaatctatattgtttaatatattatatagatgtagtgtagctcctacaggaatatctttaactaagtcaatgatttcatcaaccgttagatctattttaaagttaatcatataggcattgatttttaaaaggtatgtagccttgactacattctcattaattaaccattccaagtcactgtgtgtaagaagattatattctatcataagcttgactacatttggtcccgataccattaaagaattcttatgatataaggaaacagattttaggtactcatctactctacaagaattttggagagccttaacgatatcagtgacgtttattatttcaggaggaaaaaacctaacattgagaatatcggaattaatagcttccagatacagtgattttggcaatagtccgtgtaatccataatccagtaacacgagctggtgcttgctagacaccttttcaatgtttaatttttttgaaataagctttgataaagccttcctcgcaaattccggatacatgaacatgtcggcgacatgattaagtattgttttttcattatttttatattttctcaacaagttctcaataccccaatagatgatagaatatcacccaatgcgtccatgttgtctatttccaacaggtcgctatatccaccaatagaagttttcccaaaaaagattctaggaacagttctaccaccagtaatttgttcaaaatagtcacgcaattcattttcgggtttaaattctttaatatcgacaatttcatacgctcctcttttgaaactaaacttatttagaatatccagtgcatttctacaaaaaggacatgtatacttgacaaaaattgtcactttgttattggccaacctttgttgtacaaattcctcggccattttaatatttaagtgatataaaactatctcgacttatttaactctttagtcgagatatatggacgcagatagctatatgatagccaactacagaaggcaaacgctataaaaaacataattacgacgagcatatttataaatatttttattcagcattacttgatatagtaatattaggcacagtcaaacattcaaccactctcgatacattaactctctcattttctttaacaaattctgcaatatcttcgtaaaaagattcttgaaactttttagaatatctatcgactctagatgaaatagcgttcgtcaacatactatgttttgtatacataaaggcgcccattttaacagtttctagtgacaaaatgctagcgatcctaggatcctttagaatcacatagattgacgattcgtctctcttagtaactctagtaaaataatcatacaatctagtacgcgaaataatattatccttgacttgaggagatctaaacaatctagttttgagaacatcgataagttcatcgggaatgacatacatactatctttaatagaactcttttcatccagttgaatggattcgtccttaaccaactgattaatgagatcttctattttatcattttccagatgatatgtatgtccattaaagttaaattgtgtagcgcttctttttagtctagcagccaatactttaacatcactaatatcgatatacaaaggagatgatttatctatggtattaagaattcgtttttcgacatctgtcaaaaccaattcctttttgcctgtatcatccagttttccatcctttgtaaagaaattattttctactagactattaataagactgataaggattcctccataattgcacaatccaaactttttcacaaaactagactttacaagatctacaggaatgcgtacttcaggtttcttagcttgtgattttttcttttgtggacattttcttgtgaccaactcatctaccatttcattgattttagcagtgaaataagctttcaatgcacgggcactgatactattgaaaacgagttgatcttcaaattccgccatttaagttcaccaaacaacttttaaatacaaatatatcaatagtagtagaataagaactataaaaaaaataataattaaccaataccaaccccaacaaccggtattattagttgatgtgactgttttctcatcacttagaacagatttaacaatttctataaagtctgtcaaatcatcttccggagaccccataaatacaccaaatatagcggcgtacaacttatccatttatacattgaatattggcttttctttatcgctatcttcatcatattcatcatcaatatcaacaagtcccagattacgagccagatcttcttctacattttcagtcattgatacacgttcactatctccagagagtccgataacgttagccaccacttctctatcaatgattagtttcttgagtgcgaatgtaatttttgtttccgttccggatctatagaaaactacaggtgtgataattgccttggccaattgtctttctcttttactgagtgattctagttcaccttctatagatctgagaatggatgattctccagtcgaaacatattctaccatggctccgtttaatttgttgatgaagatggattcatccttaaatgttttctctgtaatagtttccaccgaaagactatgcaaagaatttggaatgcgttccttgtgcttaatgtttccatagacggcttctagaagttgatacaacataggactagccgcggtaacttttatttttagaaagtatccatcgcttctatcttgtttagatttatttttataaagtttagtctctccttccaacataataaaagtggaagtcatttgactagataaactatcagtaagttttatagagatagacgaacaattagcgtattgagaagcatttagtgtaacgtattcgatacattttgcattagatttactaatcgattttgcatactctataacacccgcacaagtctgtagagaatcgctagatgcagtaggtcttggtgaagtttcaactctcttcttgattaccttactcatgattaaacctaaataattgtactttgtaatataatgatatatattttcactttatctcatttgagaataaaaatgtttttgtttaaccactgcatgatgtacagatttcggaatcacaaaccaccggtggttttattttatccttgtccaatgtgaattgaatgggagcggatgcgggtttcgtacgtagatagtacattcccgtttttagaccgagactccatccgtaaaaatgcatactcgttagtttggaataactcggatctgctatatggatattcatagattgactttgatcgatgaaggctcccctgtctgcagccatttttatgatcgtcttttgtggaatttcccaaatagttttataaactcgcttaatatcttctggaaggtttgtattctgaatggatccaccatctgccataatcctattcttgatctcatcattccataattttctctcggttaaaactctaaggagatgcggattaactacttgaaattctccagacaatactctccgagtgtaaatattactggtatacggttccaccgactcattatttcccaaaatttgagcagttgatgcagtcggcataggtgccaccaataaactatttctaagaccgtatgttctgattttatcttttagaggttcccaattccaaagatccgacggtacaacattccaaagatcatattgtagaataccgttactggcgtacgatcctacatatgtatcgtatggtccttccttctcagctagttcacaactcgcctctaatgcaccgtaataaatggtttcgaagatcttcttatttagatcttgtgcttccaggctatcaaatggataatttaagagaataaacgcgtccgctaatccttgaacaccaataccgataggtctatgtctcttattagagatttcagcttctggaataggataataattaatatctataattttattgagatttctgacaattactttgaccacatccttcagtttgagaaaatcaaatcgcccatctattacaaacatgttcaaggcaacagatgccagattacaaacggctacctcattagcatccgcatattgtattatctcagtgcaaagattactacacttgatagttcctaaattttgttgattactctttttgttacacgcatccttataaagaatgaatggagtaccagtttcaatctgagattctataatcgctttccagacgactcgagcctttattatagatttgtatctcctttctctttcgtatagtgtatacaatcgttcgaactcgtctccccaaacattgtccaatccaggacattcatccggacacatcaacgaccactctccgtcatccttcactcgtttcataaagagatcaggaatccaaagagctataaatagatctctggttctatgttcctcgtttcctgtattctttttaagatcgaggaacgccataatatcagaatgccacggttccaagtatatggccataactccaggccgtttgtttcctccctgatctatgtatctagcggtgttattataaactctcaacattggaataataccgtttgatataccattggtaccggagatatagcttccactggcacgaatattactaattgatagacctattccccctgccattttagagattaatgcgcatcgttttaacgtgtcatagataccctctatgctatcatcgatcatgttaagtagaaaacagctagacatttggtgacgactagttcccgcattaaataaggtaggagaagcgtgcgtaaaccatttttcagaaagtagattgtacgtctcaatagctgagtctatatcccattgatgaattcctactgcgacacgcattaacatgtgctgaggtctttcaacgatcttgttgtttattttcaacaagtaggatttttccaaagttttaaaaccaaaatagttgtatgaaaagtctcgttcgtaaataataaccgagttgagtttatccttatatttgttaactatatccatggtgatacttgaaataatcggagaatgtttcccatttttaggattaacatagttgaataaatcctccatcacttcactaaatagtttttttgtttccttgtgtagatttgatacggctattctggcggctagaatggcataatccggatgttgtgtagtacaagtggctgctatttcggctgccagagtgtccaattctaccgttgttactccattatatattccttgaataaccttcatagctattttaataggatctatatgatccgtgtttaagccataacataattttctaatacgagacgtgattttatcaaacatgacattttccttgtatccatttcgtttaatgacaaacatttttgttggtgtaataaaaaaattatttaacttttcattaatagggatttgacgtacgtagcgtacaaaatgattgttcctggtatatagataaagagtcctatatatttgaaaatcgttacggctcgattaaactttaatgattgcatagtgaatatatcattaggatttaactccttgactatcagggcggcaccagaaattaccatcaaaagcattaatacagttatgcctatcgcagttagaacggttatagcatccaccatttatatctaaaaattagatcaaagaatatgtgacaaagtcctagttgtatattgagaattgacaaaacaatgtttcttacatattttttttttattagtaaccgacttaatagtaggaactggaaaactagacttgattattctataagtatagatacccttccaaataatattctctttgataaaagttccagaaaatgtagaattttttaaaaagttatcttttgctattaccaagattgtgtttagacgcttattattaatatgagtgatgaaatccacaccgcctctagatatcgcctttatttccacattagatggtaaatccaatagtgaaactatctttttaggaatgtatggactcgcgtttagaggagtgaacgtcttgggcgtcggaaaggatgattcgtcaaacgaataaacaatttcacaaatggatgttaatgtattagtaggaaattttttgacgctagtggaattgaaaattctaatggatgatgttctacctatttcatccgataacatgttaatttccgacaccaacggttttaatatttcgatgatatacggtagtctctctttcggacttatatagcttattccacaatacgagtcattatatactccaaaaaacaaaataactagtataaaatctgtatcgaatgggaaaaacgaaattatcgacataggtatagaatccggaacattgaacgtattaatacttaattctttttctgtggtaagtaccgataggttattgacattgtatggttttaaatattctataacttgagacttgatagatattagtgatgaattgaaaattatttttatcaccacgtgtgtttcaggatcatcgtcgacgcccgtcaaccaaccgaacggagtaaaataaatatcattaatatatgctctagatattagtatttttatcaatcctttgattatcatcttctcgtaggcgaatgattccatgatcaagagtgatttaagaacatcctccggagtattaatgggcttagtaaacagtccatcgttgcaataataaaagttatccaagttaaaggatattatgcattcgtttaaagatatcacctcatctgacggagacaattttttggtaggttttagagactttgaagctacttgtttaacaaagttattcatcgtcgtttactattctatttaattttgtagttaatttatcacatatcacattaattgactttttggtccatttttccatacgtttatattcttttaatcctgcgttatccgtttccgttatatccagtgatagatcgtgcaggttaaatagaatgctcttaaataatgtcatttttttatccgctaaaaatttaaagaatgtataaacttttttcaaagatttaaaacttttaggtggtgtcctagtacacaatatcataaacaaactaataaacatcccgcattcagattccaacagctgattaacttccacattaatacagcctattttcgctccaaatgtacattcgaaaaatctgaataaaacatcaatgtcgcaatttgtattatccaatacagaatgtttgtgattcgtgttaaaaccatcggagaaggaatagaaataaaaattattatagtggtggaattcagttggaatattgcctccggagtcataaaaggatactaaacattgttttttatcataaattacacatttccaatgagacaaataacaaaatccaaacattacaaatctagaggtagaacttttaattttgtctttaagtatatacgataagatatgtttattcataaacgcgtcaaatttttcatgaatcgctaaggagtttaagaatctcatgtcaaattgtcctatataatccacttcggatccataagcaaactgagagactaagttcttaatacttcgattgctcatccaggctcctctctcaggctctattttcatcttgacgacctttggattttcaccagtatgtattcctttacgtgataaatcatcgattttcaaatccatttgtgagaagtctatcgccttagatactttttcccgtagtcgaggtttaaagaaatacgctaacggtatactagtaggtaactcaaaaacatcatatatagaatggtaacgcgtctttaactcgtcggttaactctttcttttgatcgagttcgtcgctactattgggtctgctcaggtgccccgactctactagttccaacatcataccgataggaatacaagacactttgccggcggttgtagatttatcatatttttccactacatatccgttacaatttgttaaaaatttagatacatctatattgctacataatccagctagtgaatatatatgacataataaattggtaaatcctagttctggtattttactaattactaaatctgtatatctttccatttatcatggaaaagaatttaccagatatcttcttttttccaaactgcgttaatgtattctcttacaaatattcacaagatgaattcagtaatatgagtaaaacggaacgtgatagtttctcattggccgtgtttccagttataaaacatagatggcataacgcacacgttgtaaaacataaaggaatatacaaagttagtacagaagcacgtggaaaaaaagtatctcctccatcactaggaaaacccgcacacataaacctaaccgcgaagcaatatatatacagtgaacacacaataagctttgaatgttatagttttctaaaatgtataacaaatacagaaatcaattcgttcgatgagtatatattaagaggactattagaagctggtaatagtttacagatattttccaattccgtaggtaaacgaacagatactataggtgtactagggaataagtatccatttagcaaaattccattggcctcattaactcctaaagcacaacgagagatattttcagcgtggatttctcatagacctgtagttttaactggaggaactggagtgggtaagacgtcacaggtacccaagttattgctttggtttaattatttatttggtggattctctactctagataaaatcactaactttcacgaaagaccagtcattctatctcttcctaggatagctttagttagattgcatagcaataccattttaaaatcattgggatttaaggtactagatggatctcctatttctttacggtacggatctataccggaagaattaataaacaaacaaccaaaaaaatatggaattgtattttctacccataagttatctctaacaaaactatttagttatggcactcttattatagacgaagttcatgagcatgatcaaataggagatattattatagcagtagcgagaaagcatcatacgaaaatagattctatgtttttaatgactgccacgttagaggatgaccgagaacggctaaaagtatttttacctaatcccgcatttatacatattcctggagatacactgtttaaaattagcgaggtatttattcataataagataaatccatcttccagaatggcatacatagaagaagaaaagagaaatttagttactgctatacagatgtatactcctcctgatggatcatccggtatagtctttgtggcatccgttgcacagtgtcacgaatataaatcatatttagaaaaaagattaccgtatgatatgtatattattcatggtaaggtcttagatatagacgaaatattagaaaaagtgtattcatcacctaatgtatcgataattatttctactccttatttggaatccagcgttactatacgcaatgttacacacatttatgatatgggtaaagtttttgtccccgctccttttggaggatcgcaagaatttatttctaaatctatgagagatcaacgaaaaggaagagtaggaagagttaatcctggtacatacgtctatttctatgatctgtcttatatgaagtctatacagcgaatagattcagaatttctacataattatatattgtacgctaataagtttaatctaacactccccgaagatttgtttataatccctacaaatttggatattctatggcgtacaaaggaatatatagactcgttcgatattagtacagaaacatggaataaattattatccaattattatatgaagatgatagagtatgctaaactttatgtactaagtcctattctcgctgaggagttggataactttgagaggacgggagaattaactagtattgtacgagaagccattttatctctaaatttacgaattaagattttaaattttaaacataaagatgatgatacgtatatacacttttgtaaaatattattcggtgtctataacggaacaaacgctactatatattatcatagacctctaacgggatatatgaatatgatttcagatactatatttgttcctgtagataataactaaaaatcaaactctaatgaccacatctttttttagagatgaaaaattttctacatctccttttgtagacacgactaaacattttgcaaaaaaaagtttattagtgtttagataatcgtatacttcatcagtgtagatagtaaatgtgaacaaataaaaggtattcttactcaatagattggtaaattccatagaatatattaatcctttcttcttgagatcccacatcatttcaaccagagacgttttatccaatgatttacctcgtactataccacatacaaaactagattttgcagtgacgtcgtacctggtattcctaccaaacaaaattttacttttagttcttttagaaaattctaaggtagaatctctatttgccaatatgtcatctatggaattaccactagcaaaaaatgatagaaatatatattgatacatcgcagctggttttgatctactatactttaaaaacgaatcagattccataattgcctgtatatcatcagctgaaaaactatgttttacacgtattccttcggcatttctttttaatgatatatcttgtttagacaatgataaagttatcatgtccatgagagacgcgtctccgtatcgtataaatatttcattagatgttagacgcttcattaggggtatacttctataaggtttcttaatcagtccatcattggttgcgtcaagaactactatcggatgttgttgggtatctctagtgttacacatggccttactaaagtttgggtaaataactatgatatctctattaattatagatgcatatatttcattcgtcaaggatattagtatcgacttgctatcgtcattaatacgtgtaatgtaatcatataaatcatgcgatagccaaggaaaattcaaatagatgttcatcatataatcgtcgctataattcatattaatacgttgacattgactaatttgtaatatagcctcgccacgaagaaagctctcgtattcagtttcatcgataaaggataccgttaaatataactggttgccgatagtctcatagtctattaagtggtaagtttcgtacaaatacagaatccctaaaatattatctaatgttggattaatctttaccataactgtataaaatggagacggagtcataactattttaccgtttgtacttactggaatagacgaaggaataatctccggacatgctggtaaagacccaaatgtctgtttgaagaaatccaatgttccaggtcctaatctcttaacaaaaattacgatattcgatcccgatatcctttgcattctatttaccagcatatcacgaactatattaagattatctatcatgtctattctcccaccgttatataaatcgcctccgctaagaaacgttagtatatccatacaatggaatacttcatttctaaaatagtattcgttttctaattctttaatgtgaaatcgtatactagaaagggaaaaattatctttgagttttccgttagaaaagaaccacgaaactaatgttctgattgcgtccgattccgttgctgaattaatggatttacaccaaaaactcatataacttctagatgtagaagcattcgctaaaaaattagtagaatcaaaggatataagtagatgttccaacaagtgagcaattcccaagatttcatctatatcattctcgaatccgaaattagaaattcccaagtagatatcctttttcatccgatcgttgatgaaaatacgaactttattcggtaagacaatcatttactaaggagtaaaataggaagtaatgttcgtatgtcgttatcatcgtataaattaaaggtgtgttttttaccattaagtgacattataattttaccaatattggaattataatataggtgtatttgcgcactcgcgacggttgatgcatcggtaaatatagctgtatctaatgttctagtcggtatttcatcatttcgctgtctaataatagcgttttctctatctgtttccattacagctgcctgaagtttattggtcggataatatgtaaaataataagaaatacatacgaataacaaaaataaaataagatataataaagatgccatttagagatctaattttgttcaacttgtccaaattcctacttacagaagatgaggaatcgttggagatagtgtcttccttatgtagaggatttgaaatatcttatgatgacttgataacttactttccagataggaaataccataaatatatttctaaagtatttgaacatgtagatttatcggaggaattaagtatggaattccatgatacaactttgcgagatttagtctatcttagattgtacaagtattccaagtgtatacggccgtgttataaattaggagataatctaaaaggcatagttgttataaaggacaggaatatttatattagggaagcaaatgatgacttgatagaatatctcctcaaggaatacactcctcagatttatacatattctaatgagcgcgtccccataactggttcaaaattaattctttgtggattttctcaagttacatttatggcgtatacaacgtcgcatataacaacaaataaaaaggtagatgttctcgtttccaaaaaatgtatagatgaactagtcgatccaataaattatcaaatacttcaaaatttatttgataaaggaagcggaacaataaacaaaatactcaggaagatattttattcggtaacaggtggccaaactccataggtagctttttctatttcggattttagaatttccaaattcaccagcgatttatctgttttggtgaaatccaaggatttattaatgtccacaaatgccatttgttttgtctgtggattgtatttgaaaatggaaacgatgtagttagatagatgcgctgcgaagtttcctattagggttccgcgcttcacgtcacccagcatacttgaatcaccatcctttaaaaaaaatgataagatatcaacatggagtatatcatactcggattttaattcttctactgcatcactgacattttcacaaatactacaatacggtttaccgaaaataatcagtacgttcttcatttatgggtatcaaaaacttaaaatcgttactgctggaaaataaatcactgacgatattagatgataatttatacaaagtatacaatggaatatttgtggatacaatgagtatttatatagccgtcgccaattgtgtcagaaacttagaagagttaactacggtattcataaaatacgtaaacggatgggtaaaaaagggagggcatgtaaccctttttatcgatagaggaagtataaaaattaaacaagacgttagagacaagagacgtaaatattctaaattaaccaaggacagaaaaatgctagaattagaaaagtgtacatccgaaatacaaaatgttaccggatttatggaagaagaaataaaggcagaaatgcaattaaaaatcgataaactcacatttcaaatatatttatctgattctgataacataaaaatatcattgaatgagatactaacacatttcaacaataatgagaatgttacattattttattgtgatgaacgagacgcagaattcgttatgtgtctcgaggctaaaacacatttctctaccacaggagaatggccgttgataataagtaccgatcaggatactatgctatttgcatctgctgataatcatcctaagatgataaaaaacttaactcaactgtttaaatatgttccatctgcagaggataactatttagcaaaattaacggcgttagtgaatggatgtgatttctttcctggactctatggggcatctataacacccaacaacttaaacaaaatacaattgtttagtgattttacaatcgataatatagtcactagtttggcaattaaaaattattatagaaagactaactctaccgtagacgtgcgtaatattgttacgtttataaacgattacgctaatttagacgatgtctactcgtatattcctccttgtcaatgcactgttcaagaatttatattttccgcattagatgaaaaatggaatgaatttaaatcatcttatttagaaagcgtgccgttaccctgccaattaatgtatgcgttagaaccacgcaaggagattgatgtttcagaagttaaaactttatcatcttatatagatttcgaaaatactaaatcagatatcgatgttataaaatctatatcctcgatcttcggatattctaacgaaaactgtaacacgatagtattcggcatctataaggataatttactactgagtataaatagttcattttactttaacgatagtctgttaataaccaatactaaaagtgataatataataaatataggttactagattaaaaatggtgttccaactcgtgtgctctacgtgcggcaaagatatttctcacgaacgatataaattgattatacgaaaaaaatcattaaaggatgtactcgtcagtgtaaagaacgaatgttgtaggttaaaattatctacacaaatagaacctcaacgtaacttaacagtgcaacctctattggatataaactaatatggatccggttaattttatcaagacatatgcgcctagaggttctattatttttattaattataccatgtcattaacaagtcatttgaatccatcgatagaaaaacatgtgggtatttattatggtacgttattatcggaacacttggtagttgaatcaacatatagaaaaggagttcgaatagtcccattggatagtttttttgaaggatatcttagtgcaaaagtatacatgttagagaatattcaagttatgaaaatagcagctgatacgtcattaactttattgggtattccgtatggatttggtcatgatagaatgtattgttttaaattggtagctgactgttataaaaatgccggtattgatacatcgtctaaacgaatattaggtaaagatatttttctgagccaaaacttcacagacgataatagatggataaagatatatgattctaataatttaacattttggcaaattgattaccttaaagggtgagttaatatgcataactactcctccgttgttttttccctcgttctttttcttaacgttgtttgccatcactctcataatgtaaagatattctaaaatggtaaacttttgcatatcggacgcagaaattggtataaatgttgtaattgtattatttcccgtcaatggactagtcacagctccatcagttttatatcctttagagtatttctcactcgtgtctaacattctagagcattccatgatctgtttatcgttgatattggccggaaagatagattttttattttttattatattactattggcaattgtagatataacttctggtaaatatttttctaccttttcaatctcttctattttcaagccggctatatattctgctatattgttgctagtatcaataccttttctggctaagaagtcatatgtggtattcactatatcagttttaactggtagttccattagcctttccacttctgcagaataatcagaaattggttctttaccagaaaatccagctactataataggctcaccgatgatcattggcaaaatcctatattgtaccagattaatgagagcatatttcatttccaataattctgctagttcttgagacattgatttatttgatgaatctagttggttctctagatactctaccatttctgccgcatacaataacttgttagataaaatcagggttatcaaagtgtttagcgtggctagaatagtgggcttgcatgtattaaagaatgcggtagtatgagtaaaccgttttaacgaattatatagtctccagaaatctgtggcgttacatacatgagccgaatgacatcgaagattgtccaatatttttaatagctgctctttgtccattatttctatatttgactcgcaacaattgtagataccattaatcaccgattcctttttcgatgccggacaatagcacaattgtttagctttggactctatgtattcagaattaatagatatatctcttaatacagattgcactatacattttgaaactatgtcaaaaattgtagaacgacgctgttctgcagccatttaactttaaataatttacaaaaatttaaaatgagcatccgtataaaaatcgataaactgcgccaaattgtggcatatttttcagagttcagtgaagaagtatctataaatgtagactcgacggatgagttaatgtatatttttgccgccttgggcggatctgtaaacatttgggccattatacctctcagtgcatcagtgttctaccgcggagccgaaaatattgtgtttaatcttcctgtgtccaaggtaaaatcgtgtttgtgtagttttcacaatgatgccatcatagatatagaacctgatctggaaaataatctagtaaaactttctagttatcatgtagtaagtgtcgattgtaataaggaactgatgcctattaggacagatactactatttgtctaagtatagatcaaaagaaatcttacgtgtttaattttcacaagtatgaagaaaaatgttgtggtagaaccgtcattcatttagaatggttgttgggctttatcaagtgtattagtcagcatcagcatttggctattatgtttaaagatgacaatattattatgaagactcctggtaatactgatgcattttccagggaatattctatgactgaatgttctcaagaactacaaaagttttctttcaaaatagctatctcgtctctcaacaaactacgaggattcaaaaagagagtcaatgtttttgaaactagaatcgtaatggataatgacgataacattttaggaatgttgttttcggatagagttcaatcctttaagatcaacatctttatggcgtttttagattaatactttcaatgagataaatatgggtggcggagtaagtgttgagctccctaaacgggatccgcctccgggagtacccactgatgagatgttattaaacgtggataaaatgcatgacgtgatagctcccgctaagcttttagaatatgtgcatataggaccactagcaaaagataaagaggataaagtaaagaaaagatatccagagtttagattagtcaacacaggacccggtggtctttcggcattgttaagacaatcgtataatggaaccgcacccaattgctgtcgcacttttaatcgtactcattattggaagaaggatggaaagatatcagataagtatgaagagggtgcagtattagaatcgtgttggccagacgttcacgacaccggaaaatgcgatgttgatttattcgactggtgtcagggggatacgttcgatagaaacatatgccatcagtggatcggttcagcctttaataggagtaatagaactgtagagggtcaacaatcgttaataaatctgtataataagatgcaaacattatgtagtaaagatgctagtgtaccaatatgtgaatcatttttgcatcatttacgcgcacacaatacagaagatagcaaagagatgatcgattatattctaagacaacagtctgcggactttaaacagaaatatatgagatgtagttatcccactagagataagttagaagagtcattaaaatatgcggaacctcgagaatgttgggatccagagtgttcgaatgccaatgttaatttcttgctaacacgtaattataataatttaggactttgcaatattgtacgatgtaatactagcgtgaacaacttacagatggataaaacttcctcattaagattgtcatgtggattaagcaatagtgatagattttctactgttcccgtcaatagagcaaaagtagttcaacataatattaaacactcgttcgacctaaaattgcatttgatcagtttattatctctcttggtaatatggatactaattgtagctatttaaatgggtgccgcggcaagcatacagacgacggtgaatacactcagcgaacgtatctcgtctaaattagaacaagaagcgaatgctagtgctcaaacaaaatgtgatatagaaatcggaaatttttatatccgacaaaaccatggatgtaacctcactgttaaaaatatgtgctctgcggacgcggatgctcagttggatgctgtgttatcagccgctacagaaacatatagtggattaacaccggaacaaaaagcatacgtgccagctatgtttactgctgcgttaaacattcagacgagtgtaaacactgttgttagagattttgaaaattatgtgaaacagacttgtaattctagcgcggtcgtcgataacaaattaaagatacaaaacgtaatcatagatgaatgttacggagccccaggatctccaacaaatttggaatttattaatacaggatctagcaaaggaaattgtgccattaaggcgttgatgcaattgacgactaaggccactactcaaatagcacctaaacaagttgctggtacaggagttcagttttatatgattgttatcggtgttataatattggcagcgttgtttatgtactatgccaagcgtatgttgttcacatccaccaatgataaaatcaaacttattttagccaataaggaaaacgtccattggactacttacatggacacattctttagaacttctccgatggttattgctaccacggatatgcaaaactgaaaatatattgataatattttaatagattaacatggaagttatcactgatcgtctagacgatatagtgaaacaaaatatagcggatgaaaaatttgtagattttgttatacacggtctagagcatcaatgtcctgctatacttcgaccattaattaggttgtttattgatatactattatttgttatagtaatttatatttttacggtacgtctagtaagtagaaattatcaaatgttgttggcgttggtggcgctagtcatcacattaactattttttattactttatactataatagtactagactgacttctaacaaacatctcacctgccataaataaatgcttgatattaaagtcttctatttctaacactattccatctgtggaaaataatactctgacattatcgctaattgacacatcggtgagtgatatgcctataaagtaataatcttctttgggcacatataccagtgtaccaggttctaacaacctatttactggtgctcctatagcatactttttctttaccttgagaatatccatcgtttgcttggtcaatagcgatatgtgattttttatcaaccactcgaaaaagtaattggagtgttcatatcctctacgggctattgtctcatggccgtgtatgaaatttaagtaacacgactgtggtagatttgttctatagagccggttgccgcaaatagatagaactaccaatatgtctgtacaaatgttaaacattaattgattaacagaaaaaacaatgttcgttctgggaatagaaaccagatcaaaacaaaattcgttagaatatatgccacgtttatacattgaatataaaataactacagtttgaaaaataacagtatcatttaaacatttaacttgcggggttaatctcacaactttactgtttttgaactgttcaaaatatagcatagatccgtgagaaatacgtttagccgcctttaatagaggaaatcccaccgcctttctggatctcaccaacgacgatagttctgaccagcaactcatttcttcatcatccacctgttttaacatataataggcaggagatagatatccgtcattgcaatattccttctcgtaggcacacaatctaatattgataaaatctccattctcttctctgcatttattatcttgtttcggtggctgattaggctgtagtcttggtttaggctttggtatatcgttgttgaatctattttggtcattaaatctttcatttcttcctggtatatttttatcacctcgtttggttggatttttgtctatattatcgtttgtaacatcggtacgggtattcatttatcacaaaaaaaacttctctaaatgagtctactgctagaaaacctcatcgaagaagataccatattttttgcaggaagtatatctgagtatgatgatttacaaatggttattgccggcgcaaaatccaaatttccaagatctatgctttctatttttaatatagtacctagaacgatgtcaaaatatgagttggagttgattcataacgaaaatatcacaggagcaatgtttaccacaatgtataatataagaaacaatttgggtctaggagatgataaactaactattgaagccattgaaaactatttcttggatcctaacaatgaagttatgcctcttattattaataatacggatatgactgccgtcattcctaaaaaaagtggtaggagaaagaataagaacatggttatcttccgtcaaggatcatcacctatcttgtgtattttcgaaactcgtaaaaagattaatatttataaagaaaatatggaatccgcgtcgactgagtatacacctatcggagacaacaaggctttgatatctaaatatgcgggaattaatatcctaaatgtgtattctccttccacatccataagattgaatgccatttacggattcaccaataaaaataaactagagaaacttagtactaataaggaactagaatcgtatagttctagccctcttcaagaacccattaggttaaatgattttctgggactattggaatgtgttaaaaagaatattcctctaacagatattccgacaaaggattgattactataaatggagaatgttcctaatgtatactttaatcctgtgtttatagagcccacgtttaaacattctttattaagtgtttataaacacagattaatagttttatttgaagtattcgttgtattcattctaatatatgtattttttagatctgaattaaatatgttcttcatgcctaaacgaaaaatacccgatcctattgatagattacgacgtgctaatctagcgtgtgaagacgataaattaatgatctatggattaccatggatgacaactcaaacatctgcgttatcaataaatagtaaaccgatagtgtataaagattgtgcaaagcttttgcgatcaataaatggatcacaaccagtatctcttaacgatgttcttcgcagatgatgattcattttttaagtatttggctagtcaagatgatgaatcttcattatctgatatattgcaaatcactcaatatctagactttctgttattattattgatccaatcaaaaaataaattagaagccgtgggtcattgttatgaatctctttcagaggaatacagacaattgacaaaattcacagactttcaagattttaaaaaactgtttaacaaggtccctattgttacagatggaagggtcaaacttaataaaggatatttgttcgactttgtgattagtttgatgcgattcaaaaaagaatcctctctagctaccaccgcaatagatcctgttagatacatagatcctcgtcgcaatatcgcattttctaacgtgatggatatattaaagtcgaataaagtgaacaataattaattctttattgtcatcatgaacggcggacatattcagttgataatcggccccatgttttcaggtaaaagtacagaattaattagacgagttagacgttatcaaatagctcaatataaatgcgtgactataaaatattctaacgataatagatacggaacgggactatggacgcatgataagaataattttgaagcattggaagcaactaaactatgtgatgtcttggaatcaattacagatttctccgtgataggtatcgatgaaggacagttctttccagacattgttgaattctgtgagcgtatggcaaacgaaggaaaaatagttatagtagccgcactcgatgggacatttcaacgtaaaccgtttaataatattttgaatcttattccattatctgaaatggtggtaaaactaactgctgtgtgtatgaaatgctttaaggaggcttccttttctaaacgattgggtgaggaaaccgagatagaaataataggaggtaatgatatgtatcaatcggtgtgtagaaagtgttacatcgactcataatattatattttttatctaaaaaactaaaaataaacattgattaaattttaatataatacttaaaaatggatgttgtgtcgttagataaaccgtttatgtattttgaggaaattgataatgagttagattacgaaccagaaagtgcaaatgaggtcgcaaaaaaactgccgtatcaaggacagttaaaactattactaggagaattattttttcttagtaagttacagcgacacggtatattagatggtgccaccgtagtgtatataggatctgctcccggtacacatatacgttatttgagagatcatttctataatttaggagtgatcatcaaatggatgctaattgacggccgccatcatgatcctattttaaatggattgcgtgatgtgactctagtgactcggttcgttgatgaggaatatctacgatccatcaaaaaacaactgcatccttctaagattattttaatttctgatgtgagatccaaacgaggaggaaatgaacctagtacggcggatttactaagtaattacgctctacaaaatgtcatgattagtattttaaaccccgtggcgtctagtcttaaatggagatgcccgtttccagatcaatggatcaaggacttttatatcccacacggtaataaaatgttacaaccttttgctccttcatattcagctgaaatgagattattaagtatttataccggtgagaacatgagactgactcgagttaccaaatcagacgctgtaaattatgaaaaaaagatgtactaccttaataagatcgtccgtaacaaagtagttgttaactttgattatcctaatcaggaatatgactattttcacatgtactttatgctgaggaccgtgtactgcaataaaacatttcctactactaaagcaaaggtactatttctacaacaatctatatttcgtttcttaaatattccaacaacatcaactgaaaaagttagtcatgaaccaatacaacgtaaaatatctagcaaaaattctatgtctaaaaacagaaatagcaagagatccgtacgcagtaataaatagaaacgtactactgagatatactaccgatatagagtataatgatttagttactttaataaccgttagacataaaattgattctatgaaaactgtgtttcaggtatttaacgaatcatccataaattatactccggttgatgatgattatggagaaccaatcattataacatcgtatcttcaaaaaggtcataacaagtttcctgtaaattttctatacatagatgtggtaatatctgacttatttcctagctttgttagactagatactacagaaactaatatagttaatagtgtactacaaacaggcgatggtaaaaagactcttcgtcttcccaaaatgttagagacggaaatagttgtcaagattctctatcgccctaatataccattaaaaattgttagatttttccgcaataacatggtaactggagtagagatagccgatagatctgttatttcagtcgctgattaatcaattagtagagatgagataagaacattataataatcaataatatatcttatatctcgtttagaaaaatgctaatattaaaatagctaacgctagtaatccaatcggaagccatttgatatctataatagggtatctaatttcctgattcagatagcggacagctatattctcggtagctactcgtttggaatcacaaacattatttacatctaatttactatctgtaatggaaacgtttcccaatgaaatggtacaatccgatacattgcattttgttatatttttttttaaagaggctggtaacaacgcatcgcttcgtttacatggctcgtaccaacaataatagggtaatcttgtatctattcctatccgtactatgcttttatcaggataaatacatttacatcgtatatcgtctttgttagcatcacagaatgcataaatttgttcgtccgtcatgataaaaatttaaagtgtaaatataactattatttttatagttgtaataaaaagggaaatttgattgtataccttcggttctttaaaagaaactgacttgataaaaatggctgtaatctctaaggttacgtatagtctatatgatcaaaaagagattaatgctacagatattatcattagtcatgttaaaaatgacgacgatatcggtaccgttaaagatggtagactaggtgctatggatggggcattatgtaagacttgtgggaaaacggaattggaatgtttcggtcactggggtaaagtaagtatttataaaactcatatagttaagcctgaatttatttcagaaattattcgtttactgaatcatatatgtattcactgcggattattgcgttcacgagaaccgtattccgacgatattaacctaaaagagttatcgggacacgctcttaggagattaaaggataaaatattatccaagaaaaagtcatgttggaacagtgaatgtatgcaaccgtatcaaaaaattactttttcaaagaaaaaggtttgtttcgtcaacaagttggatgatattaacgttcctaattctctcatctatcaaaagttaatttctattcatgaaaagttttggccattattagaaattcatcaatatccagctaacttattttatacagactactttcccatccctccgttgattattagaccggctattagtttttggatagatagtatacccaaagaaaccaatgaattaacttacttattaggtatgatcgttaagaattgtaacttgaatgctgatgaacaggttatccagaaggcggtaatagaatacgatgatattaaaattatttctaataacacttccagtatcaatttatcatatattacatccggcaaaaataatatgattagaagttatatcgtcgcccgacgaaaagatcagacggctagatctgtaattggtcccagtacatctatcaccgttaatgaggtaggaatgcccgcatatattagaaatacacttacagaaaagatatttgttaatgcctttacagtggataaagttaaacaactattagcatcaaaccaagttaaattttactttaataaacgattaaaccaattaacaagaatacgccaaggaaagtttatcaaaaataaaatacatttattgcctggtgattgggtagaagtagctgttcaagaatatacaagtattatttttggaagacagccgtctctacatagatacaacgtcatcgcttcatctatcagagctaccgaaggagatactatcaaaatatctcccggaattgccaactctcaaaatgctgatttcgacggagatgaagaatggatgatattagaacaaaatcctaaagctgtaattgaacaaagtattcttatgtatccgacgacgttactcaaacacgatattcatggagcccccgtttatggatctattcaagatgaaatcgtagcagcgtattcattgtttaggatacaagatctttgtttagatgaagtattgaacatcttggggaaatatggaagagagttcgatcctaaaggtaaatgtaaattcagcggtaaagatatctatacttacttgataggtgaaaagattaattatccgggtctcttaaaggatggtgaaattattgcaaacgacgtagatagtaattttgttgtggctatgaggcatctgtcattggctggactcttatccgatcataagtcgaacgtggaaggtatcaactttattatcaagtcatcttatgtttttaagagatatctatctatttacggttttggggtgacattcaaagatctgagaccaaattcgacgttcactaataaattggaggccatcaacgtagaaaaaatagaacttatcaaagaagcatacgccaaatatctcaacgatgtaagagacgggaaaatagttccattatctaaagctttagaggcggactatgtggaatccatgttatccaacttgacaaatcttaatatccgagagatagaagaacatatgagacaaacgctgatagatgatccagataataacctcctgaaaatggccaaagcgggttataaagtaaatcctacagaactaatgtatattctaggtacgtatggacaacaaaggattgatggtgaaccagcagagactcgagtattgggtagagtcttaccttactatcttccagactctaaggatccagaaggaagaggttacattcttaattctttaacaaaaggattaacaggttctcaatattacttttcgatgctggttgcaagatctcaatctactgatatcgtctgtgaaacatcacgtaccggaacactggctagaaaaatcattaaaaagatggaggatatggtggtcgacggatacggacaagtagttataggtaatacgctcatcaagtacgccgccaattataccaaaattctaggctcagtatgtaaacctgtagatcttatctatccagatgagtccatgacttggtatttggaaattagtgctctgtggaataaaataaaacagggattcgtttactctcagaaacagaaacttgcaaagaagacattggcgccgtttaatttcctagtattcgtcaaacccaccactgaggataatgctattaaggttaaggatctgtacgatatgattcataacgtcattgatgatgtgagagagaaatacttctttacggtatctaatatagattttatggagtatatattcttgacgcatcttaatccttctagaattagaattacaaaagaaacggctatcactatctttgaaaagttctatgaaaaactcaattatactctaggtggtggaactcctattggaattatttctgcacaggtattgtctgagaagtttacacaacaagccctgtccagttttcacactactgaaaaaagtggtgccgtcaaacaaaaacttggtttcaacgagtttaataacttgactaatttgagtaagaataagaccgaaattatcactctggtatccgatgatatctctaaacttcaatctgttaagattaatttcgaatttgtatgtttgggagaattaaatccagacatcactcttcgaaaagaaacagataggtatgtagtagatataatagtcaatagattatacatcaagagagcagaaattaccgaattagtcgtcgaatatatgattgaacgattcatctcctttagcgtcattgtaaaggaatggggtatggaaacattcattgaggacgaggataatattagatttactgtctatctaaatttcgttgaaccagaggaattgaatcttagtaagtttatgatggttcttccgggggcagccaacaagggaaagattagtaaattcaagattcctatctctgattatacgggttatgacgacttcaatcaaacaaaaaagctcaataagatgactgtagaactcatgaatctaaaagaattaggttctttcgatttggaaaacgtcaacgtgtatcctggagtatggaatacatacgatatcttcggtatcgaggccgctcgtgaatacttgtgcgaagccatgttaaacacctatggagaagggttcgattatctgtatcagccttgtgatcttctcgctagtttactatgtgctagttacgaaccagaatcagtgaataaattcaagttcggcgcagctagtactcttaagagagctacgttcggagacaataaagcattgttaaacgcggctcttcataaaaagtcagaacctattaacgataatagtagctgccacttttttagcaaggtccctaatataggaactggatattacaaatactttatcgacttgggtcttctcatgagaatggaaaggaaactatctgataagatatcttctcaaaagatcaaggaaatggaagaaacagaagacttttaattcttatcaataacatatttttctatgatctgtcttttaaacgatggattttccacaaatgcgcctctcaagtccctcatagaatgatacacgtataaaaaatatagcataggcaatgactccttatttttagacattagatatgccaaaatcatagccccgcttctatttactcccgcagcacaatgaaccaacacgggctcgtttcgttgatcacatttagataaaaaggcggttacgtcgtcaaaatatttactaatatcggtagttgtatcatctaccaacggtatatgaataatattaatattagagttaggtaatgtatatttatccatcgtcaaatttaaaacatatttgaacttaacttcagatgatggtgcatccatagcatttttataatttcccaaatacacattattggttacccttgtcattatagtgggagatttggctctgtgcatatctccagttgaacgtagtagtaagtatttatacaaacttttcttatccatttataacgtacaaatggataaaactactttatcggtaaacgcgtgtaatttagaatacgttagagaaaaggctatagtaggcgtacaagcagccaaaacatcaacacttatattctttgttattatattggcaattagtgcgctattactctggtttcagacgtctgataatccagtctttaatgaattaacgagatatatgcgaattaaaaatacggttaacgattggaaatcattaacggatagcaaaacaaaattagaaagtgatagaggtagacttctagccgctggtaaggatgatatattcgaattcaaatgtgtggatttcggcgcctattttatagctatgcgattggataagaaaacatatctgccgcaagctattaggcgaggtactggagacgcgtggatggttaaaaaggcggcaaaggtcgatccatctgctcaacaattttgtcagtatttgataaaacacaagtctaataatgttattacttgtggtaatgagatgttaaatgaattaggttatagcggttattttatgtcaccgcattggtgttccgattttagtaatatggaatagtgttagataaatgcggtaacgaatgttcctgtaaggaaccataacagtttagatttaacgttaaagatgagcataaacataataaacaaaattacaatcaaacctataacattaatatcaaacaatccaaaaaatgaaatcagtggagtagtaaacgcgtacataactcctggataacgtttagtagctgccgttcctattctagaccaaaaattcggtttcatgttttcgaaacggtgttctgcaacaagtcggggatcgtgttctacatatttggcggcattatccagtatctgcctattgatcttcatttcgttttcaattctggctatttcaaaataaaatcccgatgatagacctccagactttataatttcatctacgatgttcagcgccgtagtaactctaataatataggctgataagctaacatcataccctcctgtatatgtgaatatggcatgatttttgtccattacaagctcggttttaactttattgcctgtaataatttctctcatctgtaggatatctatttttttgtcatgcattgccttcaagacgggacgaagaaacgtaatatcctcaataacgttatcgttttctacaataactacatattctacctttttattttctaactcggtaaaaaaattagaatcccatagggctaaatgtctagcgatatttcttttcgtttcctctgtacacatagtgttacaaaaccctgaaaagaagtgagtatacttgtcatcatttctaatgtttcctccagtccactgtataaacgcataatccttgtaatgatctggatcatccttgactaccacaacatttcttttttctggcataacttcgttgtcctttacatcatcgaacttctgatcattaatatgctcatgaacattaggaaatgtttctgatggaagtctatcaataactggcacaacaataacaggagttttcgccgccgccatttagttattgaaattaatcatatacaactctttaatacgagttatattttcgtctatccattgtttcacatttacatatttcgacaaaaagatataaaatgcgtattccaatgcttctctgtttaatgaattactaaaatatacaaacacgtcactgtctggcaataaatgatatcttagaatattgtaacaatttattttgtattgcacatgttcgtgatctatgagttcttcttcgaatggcataggatctccgaatctgaaaacgtataaataggagttagaataataatatttgagagtattggtaatatataaactctttagcggtataattagtttttttctctcaatttctatttttagatgtgatggaaaaatgactaattttgtagcattagtatcatgaactctaatcaaaatcttaatatcttcgtcacacgttagctctttgaagtttttaagagatgcatcagttggttcgaccgatggagtaggtgcaacaattttttgttcgatgtatgtatgtactggagccattgttttaactataatggtgcttgtatcgaaaaactttaatgcagatagcggaagctcttcgccgcgactttctacatcgtaattgggttctaacgccgatctctgaatggatactagttttctaagttctaatgtgattctctgaaaatgtaaatccaattcctccggcattatagatgtgtatacatcggtaaataaaactatagtatccaacgatcccttctcgcaaattctagtcttaaccaaaaaatcgtatataaccacggagatggcgtatttaagagtggattcttctaccgttttgttcttggatgtcatataggaaactataaagtccgcactactgttaagaatgattactaacgcaactatatagttcaaattaagcattttggaaacataaaataactctgtagacgatacttgactttcgaataagtttgcagacaaacgaagaaagaacagacctctcttaatttcagaagaaaactttttttcgtattcctgacgtctagagtttatatcaataagaaagttaagaattagtcggttaatgttgtatttcattacccaagtttgagatttcataatattatcaaaagacatgataatattaaagataaagcgctgactatgaacgaaatagctatatggttcgctcaaaaatatagtcttgttaaacgtggaaacgataactgtatttttaatcacgtcagcggcatctaaattaaatataggtatatttattccacacactctacaatatgccacaccatcttcataataaataaattcgttagcaaaattattaattttagtgaaatagttagcgtcaactttcatagcttccttcaatctaatttgatgctcacacggtgcgaattccactctaacatcccttttccatgcctcaggttcatcgatctctataatatctagttttttgcgtttcacaaacacaggctcgtctctcgcgatgagatctgtatagtaactatgtaaatgataactagatagaaagatgtagctatatagatgacgatcctttaagagaggtataataactttaccccaatcagatagactgttgttatggtcttcggaaaaagaatttttataaatttttccagtattttccaaatatacgtacttaacatctaaaaaatccttaatgataataggaatggataatccgtctattttataaagaaatacatatcgcacattatacttttttttggaaatgggaataccgatgtgtctacataaatatgcaaagtctaaatattttttagagaatcttaattggtccaaattcttttccaagtacggtaatagatttttcatattgaacggtatcttcttaatctctggttctagttccgcattaaatgatgaaactaagtcactatttttataactaacgattacatcacctctaacatcatcatttaccagaatactgatcttcttttgtcgtaaatacatgtctaatgtgttaaaaaaaagatcatacaagttatacgtcatttcatctgtggtattcttgtcattgaaggataaactcgtactaatctcttctttaacagcctgttcaaatttatatcctatatacgaaaaaatagcaaccagtgtttgatcatccgcgtcaatattctgttctatcgtagtgtataacaatcgtatatcttcttctgtgatagtcgatacgttataaaggttgataacgaaaatatttttatttcgtgaaataaagtcatcgtaggattttggacttatattcgcgtctagtagatatgcttttatttttggaatgatctcaattagaatagtctctttagagtccatttaaagttacaaacaactaggaaattggtttatgatgtataatttttttagtttttatagattctttattctatacttaaaaaatgaaaataaatacaaaggttcttgagggttgtgttaaattgaaagcgagaaataatcataaattatttcattatcgcgatatccgttaagtttgtatcgtaatggcgtggtcaattacaaataaagcggatactagtagcttcacaaagatggctgaaatcagagctcatctaaaaaatagcgctgaaaataaagataaaaacgaggatattttcccggaagatgtaataattccatctactaagcccaaaaccaaacgagccactactcctcgtaaaccagcggctactaaaagatcaaccaaaaaggaggaagtggaagaagaagtagttatagaggaatatcatcaaacaactgaaaaaaattctccatctcctggagtcagcgacattgtagaaagcgtggccgctgtagagctcgatgatagcgacggggatgatgaacctatggtacaagttgaagctggtaaagtaaatcatagtgctagaagcgatctctctgacctaaaggtggctaccgacaatatcgttaaagatcttaagaaaattattactagaatctctgcagtatcgacggttctagaggatgttcaagcagctggtatctctagacaatttacttctatgactaaagctattacaacactatctgatctagtcaccgagggaaaatctaaagttgttcgtaaaaaagttaaaacttgtaagaagtaaatgcgtgcacttttttataaagatggtaaactctttaccgataataattttttaaatcctgtatcagacgataatccagcgtatgaggttttgcaacatgttaaaattcctactcatttaacagatgtagtagtatatgaacaaacgtgggaggaggcgttaactagattaatttttgtgggaagtgattcaaaaggacgtagacaatacttttacggaaaaatgcatgtacagaatcgcaacgctaaaagagatcgtatttttgttagagtatataacgttatgaaacgaattaattgttttataaacaaaaatataaagaaatcgtccacagattccaattatcagttggcggtttttatgttaatggaaactatgttttttattagatttggtaaaatgaaatatcttaaggagaatgaaacagtagggttattaacactaaaaaataaacacatagaaataagtcccgatgaaatagttatcaagtttgtaggaaaggacaaagtttcacatgaatttgttgttcataagtctaatagactatataagccgctattgaaactgacggatgattctagtcccgaagaatttctgttcaacaaactaagtgaacgaaaggtatatgaatgtatcaaacagtttggtattagaatcaaggatctccgaacgtatggagtcaattatacgtttttatataatttttggacaaatgtaaagtccatatctcctcttccatcaccaaaaaagttaatagcgttaactatcaaacaaactgctgaagtggtaggtcatactccatcaatttcaaaaagagcttatatggcaacgactattttagaaatggtaaaggataaaaattttttagatgtagtatctaaaactacgttcgatgaattcctatctatagtcgtagatcacgttaaatcatctacggatggatgatatagatctttacacaaataattacaaaaccgataaatggaaatggataagcgtatgaaatctctcgcaatgaccgctttctttggggagctaagcacattagatattatggcattgataatgtctatatttaaacgccatccaaacaataccattttttcagtggataaggatggtcagtttatgattgatttcgaatacgataattataaggcttctcaatatttggatctgaccctcactccgatatctggagatgaatgcaagactcacgcatcgagtatagccgaacaattggcgtgtgtggatattattaaagaggatattagcgaatatatcaaaactactccccgtcttaaacgatttataaaaaaataccgcaatagatcagatactcgcatcagtcgagatacagaaaagcttaaaatagctctagctaaaggcatagattacgaatatataaaagacgcttgttaataagtaaatgaaaaaaaactagtcgtttataataaaacacgatatggatgccaacgtagtatcatcttctactattgcgacgtatatagacgctttagcgaagaatgcttcggaattagaacagaggtctaccgcatacgaaataaataatgaattggaactagtatttattaagccgccattgattactttgacaaatgtagtgaatatctctacgattcaggaatcgtttattcgatttaccgttactaataaggaaggtgttaaaattagaactaagattccattatctaaggtacatggtctagatgtaaaaaatgtacagttagtagatgctatagataacatagtttgggaaaagaaatcattagtgacggaaaatcgtcttcacaaagaatgcttgttgagactatcgacagaggaacgtcatatatttttggattacaagaaatatggatcctctatccgactagaattagtcaatcttattcaagcaaaaacaaaaaactttacgatagactttaagctaaaatattttctaggatccggtgcccagtctaaaagttctttattacacgctattaatcatccaaagtcaaggcctaatacatctctggaaatagaatttacacctagagacaatgaaacagttccatatgatgaactaataaaggaattgacgactctctcgcgtcatatatttatggcttctccagagaatgtaattctttctccgcctattaacgcgcctataaaaacctttatgttgcctaaacaagatatagtaggtttggatctggaaaatctatatgccgtaactaagactgacggcattcctataactatcagagttacatcaaacgggttgtattgttattttacacatcttggttatattattagatatcctgttaagagaataatagattccgaagtagtagtctttggtgaggcagttaaggataagaactggaccgtatatctcattaagctaatagagcctgtgaatgcaatcaatgatagactagaagaaagtaagtatgttgaatctaaactagtggatatttgtgatcggatagtattcaagtcaaagaaatacgaaggtccgtttactacaactagtgaagtcgtcgatatgttatctacatatttaccaaagcaaccagaaggtgttattctgttctattcaaagggacctaaatctaacattgattttaaaattaaaaaggaaaatactatagaccaaactgcaaatgtagtatttaggtacatgtccagtgaaccaattatctttggagagtcgtctatctttgtagagtataagaaatttagcaacgataaaggctttcctaaagaatatggttctggtaagattgtgttatataacggcgttaattatctaaataatatctattgtttggaatatattaatacacataatgaagtgggtattaagtccgtggttgtacctattaagtttatagcagaattcttagttaatggagaaatacttaaacctagaattgataaaaccatgaaatatattaactcagaagattattatggaaatcaacataatatcatagtcgaacatttaagagatcaaagcatcaaaataggagatatctttaacgaggataaactatcggatgtgggacatcaatacgccaataatgataaatttagattaaatccagaagttagttattttacgaataaacgaactagaggaccgttgggaattttatcaaactacgtcaagactcttcttatttctatgtattgttccaaaacatttttagacgattccaacaaacgaaaggtattggcgattgattttggaaacggtgctgacctggaaaaatacttttatggagagattgcgttattggtagcgacggatccggatgctgatgctatagctagaggaaatgaaagatacaacaaattaaactctggaattaaaaccaagtactacaaatttgactacattcaggaaactattcgatccgatacatttgtctctagtgtcagagaagtattctattttggaaagtttaatatcatcgactggcagtttgctatccattattcttttcatccgagacattatgctaccgtcatgaataacttatccgaactaactgcttctggaggcaaggtattaatcactaccatggacggagacaaattatcaaaattaacagataaaaagacttttataattcataagaatttacctagtagcgaaaactatatgtctgtagaaaaaatagctgatgatagaatagtggtatataatccatcaacaatgtctactccaatgactgaatacattatcaaaaagaacgatatagtcagagtgtttaacgaatacggatttgttcttgtagataacgttgatttcgctacaattatagaacgaagtaaaaagtttattaatggcgcatctacaatggaagatagaccatctacaagaaactttttcgaactaaatagaggagccattaaatgtgaaggtttagatgtcgaagacttacttagttactatgttgtttatgtcttttctaagcggtaaataataatatggtatgggttctgatctcccagttctaaatgcattaaataattccaatagagcgatttttgttcctataggaccttccaactgtggatactctgtattgttaatagatatattaatacttttgtcgggtaacagaggttctacgtcttttaaaaataaaagtttgataacatctggcctgttcataaataaaaacttggcgattctatatatactcttattatcaaatctagccattgtcttatagatgtgagctactgtaggtgtaccatttgattttctttctaatactatatatttctctcgaagaagttcttgcacatcatctgggaataaaatactactgttgagtaaatcagttattttttttatatcgatattgatggacatttttatagttaaggataataagtatcccaaagtagataacgacgataacgaagtatttatacttttaggaaatcacaatgactttatcagattaaaattaacaaaattaaaggagcatgtatttttttctgaatatattgtgactccagatacatatggatctttatgcgtcgaattaaatgggtctagttttcagcacggcggtagatatatagaggtggaggaatttatagatgctggaagacaagttagatggtgttctacatccaatcatatatctaaagatatacccgaagatatgcacactgataaatttgtcatttatgatatatacacttttgacgctttcaagaataaacgattggtattcgtacaggtacctccgtcgttaggagatgatagtcatttgactaatccgttattgtctccgtattatcgtaattcagtagccagacaaatggtcaatgatatgatttttaatcaagattcatttttaaaatatttattagaacatctgattagaagccactatagagtttctaaacatataacaatagttagatacaaggataccgaagaattaaatctaacgagaatatgttataatagagataagtttaaggcgtttgtattcgcttggtttaacggcgtttcggaaaatgaaaaggtactagatacgtataaaaaggtatctaatttgatataatgaattcagtgactgtatcacacgcgccatatactattacttatcacgatgattgggaaccagtaatgagtcaattggtagagttttataacgaagtagccagttggctgctacgagacgagacgtcgcctattcctgataagttctttatacagttgaaacaaccgcttagaaataaacgagtatgtgtgtgcggtatagatccgtatccgaaagatggaactggtgtaccgttcgaatcaccaaattttacaaaaaaatcaattaaggagatagcttcatctatatctagattaaccggagtaattgattataaaggttataaccttaatataatagacggggttataccctggaattattacttaagttgtaaattaggagaaacaaaaagtcacgcgatctactgggataagatttccaagttactgctgcagcatataactaaacacgttagtgttctttattgtttgggtaaaacagatttctcgaatatacgggccaagttagaatccccggtaactaccatagtcggatatcatccagcggctagagaccgccaattcgagaaagatagatcatttgaaattatcaacgttttactggaattagacaacaaggcacctataaattgggctcaagggtttatttattaatgctttagtgaaattttaacttgtgttctaaatggatgcggctattagaggtaatgatgttatctttgttcttaagactataggtgtcccgtcagcgtgcagacaaaatgaagatccaagatttgtagaagcatttaaatgcgacgagttagaaagatatattgagaataatccagaatgtacactattcgaaagtcttagggatgaggaagcatactctatagtcagaattttcatggatgtagatttagacgcgtgtctagacgaaatagattatttaacggctattcaagattttattatcgaggtgtcaaactgtgtagctagattcgcgtttacagaatgcggcgccattcatgaaaatgtaataaaatccatgagatctaatttttcattgactaagtctacaaatagagataaaacaagttttcatattatctttttagacacgtataccactatggatacattgatagctatgaaacgaacactattagaattaagtagatcatctgaaaatccactaacaagatcgatagacactgccgtatataggagaaaaacaactcttcgggttgtaggtactaggaaaaatccaaattgcgacactattcatgtaatgcaaccaccgcatgataatatagaagattacctattcacttacgtggatatgaacaacaatagttattacttttctctacaacaacgattggaggatttagttcctgataagttatgggaaccagggtttatttcattcgaagacgctataaaaagagtttcaaaaatattcattaattctataataaactttaatgatctcgatgaaaataattttacaacggtaccactggtcatagattacgtaacaccttgtgcattatgtaaaaaacgatcgcataaacatccgcatcaactatcgttggaaaatggtgctattagaatttacaaaactggtaatccacatagttgtaaagttaaaattgttccgttggatggtaataaactgtttaatattgcacaaagaattttagacactaactctgttttattaaccgaacgaggagaccatatagtttggattaataattcatggaaatttaacagcgaagaacccttgataacaaaactaattttgtcaataagacatcaactacctaaggaatattcaagcgaattactctgtccaagaaaacgaaagactgtagaagctaacatacgagacatgttagtagattcagtagagaccgatacctatccggataaacttccgtttaaaaatggtgtattggacctggtagacggaatgttttactctggagatgatgctaaaaaatatacgtgtactgtatcaaccggatttaaatttgacgatacaaagttcgtcgaagacagtccagaaatggaagagttaatgaatatcattaacgatatccaaccattaacggatgaaaataagaaaaatagagagctatatgaaaaaacattatctagttgtttatgcggtgctaccaaaggatgtttaacattcttttttggagaaactgcaactggaaagtcgacaaccaaacgtttgttaaagtctgctatcggtgacctgtttgttgagacgggtcaaacaattttaacagatgtattggataaaggacctaatccatttatcgctaacatgcatttgaaaagatctgtattctgtagcgaactacctgattttgcctgtagtggatcaaagaaaattagatctgacaatattaaaaagttgacagaaccttgtgtcattggaagaccgtgtttctccaataaaattaataatagaaaccatgcgacaatcattatcgatactaattacaaacctgtttttgataggatagataacgcattaatgagaagaattgccgtcgtgcgattcagaacacacttttctcaaccttctggtagagaggctgctgaaaataatgacgcgtacgataaagtcaaactattagacgaggggttagatggtaaaatacaaaataatagatatagattcgcatttctatacttgttggtgaaatggtacagaaaatatcatgttcctattatgaaactatatcctacacccgaagagattcctgactttgcattctatctcaaaataggtactctgttagtatctagctctgtaaagcatattccattaatgacggacctctccaaaaagggatatatattgtacgataatgtggtcactcttccgttgactactttccaacagaaaatatccaagtattttaattctagactatttggacacgatatagagagcttcatcaatagacataagaaatttgccaatgttagtgatgaatatctgcaatatatattcatagaggatatttcatctccgtaaatatatgctcatatatttatagaagatatcacatatctaaatgaataccggaatcatagatttatttgataatcatgttgatagtataccaactatattacctcatcagttagctactctagattatctagttagaactatcatagatgagaacagaagcgtgttattgttccatattatgggatcaggtaaaacaataatcgctttgttgttcgccttggtagcttccagatttaaaaaggtttacattctagtgcctaatatcaacattttgaaaatttttaattataatatgggtgtagctatgaacttgtttaatgacgaattcatagctgagaatatctttattcattccacaacaagtttttattctcttaattataacgataacgtcattaattataacggattatctcgctacaataactctatttttatcgttgatgaggcacataatatctttgggaataatactggagaacttatgaccgtgataaaaaataaaaacaagattccttttctactattgtctggatctcccattactaacacacctaatactctgggtcatattatagatttaatgtccgaagagacgatagattttggtgagattattagtcgtggtaagaaagtaattcagacacttcttaacgaacgcggtgtgaatgtacttaaggatttgcttaaaggaagaatatcatattacgaaatgcctgataaagatctaccaacgataagatatcacggacgtaagtttctagatactagagtagtatattgtcacatgtctaaacttcaagagagagattatatgattactagacgacagctatgttatcatgaaatgtttgataaaaatatgtataacgtgtcaatggcagtattgggacaacttaatctgatgaataatttagatactttatttcaggaacaggataaggaattgtacccaaatctgaaaataaataatggcgtgttatacggagaagaattggtaacgttaaacattagttccaaatttaaatactttattaatcggatacagacactcaacggaaaacattttatatacttttctaattctacatatggcggattggtaattaaatatatcatgctcagtaatggatattctgaatataatggttctcagggaactaatccacatatgataaacggcaaaccaaaaacatttgctatcgttactagtaaaatgaaatcgtctttagaggatctattagatgtgtataattctcctgaaaacgatgatggtagtcaattgatgtttttgttttcgtcaaacattatgtccgaatcctatactctgaaagaggtaaggcatatttggtttatgactatcccagatactttttctcaatacaaccaaattcttggacgatctattagaaaattctcttacgccgatatttctgaaccagttaatgtatatcttttagccgccgtatattccgatttcaatgacgaagtaacgtcattaaacgattacacacaggatgaattgattaatgttttaccatttgacatcaaaaagctgttatatctaaaatttaagactaaagaaacgaatagaatatactctattcttcaagagatgtctgaaacgtattctcttccaccacatccatcaattgtaaaagttttattgggagaattggtcagacaatttttttataataattctcgtattaagtataacgactccaagttacttaaaatggttacatcagttataaaaaataaagaagacgctaggaattacatagatgatattgtaaacggtcacttctttgtatcgaataaagtatttgataaatctcttttatacaaatacgaaaacgatattattacagtaccgtttagactttcctacgaaccatttgtttggggagttaactttcgtaaagaatataacgtggtatcttctccataaaactgatgaaatatataaagaaataaatgtcgagctttgttaccaatggataccttccagttacattggaaccacacgagctgacgttagacataaaaactaatattaggaatgccgtatataagacgtatctccatagagaaattagtggtaaaatggccaagaaaatagaaattcgtgaagacgtggaattacctctcggcgaaatagttaataattctgtagttataaacgttccgtgtgtaataacctacgcgtattatcacgttggggatatagtcagaggaacattaaacatcgaagatgaatcaaatgtaactattcaatgtggagatttaatctgtaaactaagtagagattcgggtactgtatcatttagcgattcaaagtactgcttttttcgaaatggtaatgcgtatgacaatggcagcgaagtcactgccgttctaatggaggctcaacaaggtatcgaatctagttttgtttttctcgcgaatatcgtcgactcataaaaaagagaatagcggtaagtataaacacgaatactatggcaataattgcgaatgttttattctcttcgatatatttttgataatatgaaaaacatgtctctctcaaatcggacaaccatctcataaaatagttctcgcgcgctggagaggtagttgctgctcgtataatctccccagaataatatacttgcgtgtcgtcgttcaatttatacggatttctatagttctctgttatataatgcggttttccatcatgattagacgacgacaatagtgttctgaatttagatagttgatcagaatgaatgtttattggcgttggaaaaattatccatacagcgtctgcagagtggttgatagttgttcctagatatgtaaaataatccaacttactaggcagcaaattgtctagataaaatactgaatcaaacggtgcagacgtattggcggatctaatggaatccaattgattaactatcttttgaaaatatacatttttatgatccaatacttgtaagaatatagaaataatgataagtccatcatcgtgtttttttgcctcttcataagaactatattttttcttattccaatgaacaagattaatctctccagagtatttgtacacatctatcaagtgattggatccataatcgtcttcctttccccaatatatatgtagtgatgataacacatattcattggggagaaaccctccacttatatatcctcctttaaaattaatccttactagttttccagtgttctggatagtggttggtttcgactcattataatgtatgtctaacggcttcaatcgcgcgttagaaattgcttttttagtttctatattaataggagatagttgttgcggcatagtaaaaatgaaatgataactgtttaaaaatagctcttagtatgggaattacaatggatgaggaagtgatatttgaaactcctagagaattaatatctattaaacgaataaaagatattccaagatcaaaagacacgcacgtgtttgctgcgtgtataacaagtgacggatatccgttaataggagctagaagaacttcattcgcgttccaggcgatattatctcaacaaaattcagattctatctttagagtatccactaaactattacggtttatgtactacaatgaactaagagaaatctttagacggttgagaaaaggttctatcaacaatatcgatcctcactttgaagagttaatattattgggtggtaaactagataaaaaggaatctattaaagattgtttaagaagagaattaaaagaggaaagtgatgaacgtataacagtaaaagaattcggaaatgtaattctaaaacttacaacgcgcgataaattatttaataaagtatatataggttattgcatggcgtgttttattaatcaatcgttggaggatttatcgcatactagtatttacaatgtagaaattagaaagattaaatcattaaatgattgtattaacgacgataaatacgaatatctgtcttatatttataatatgctagttaatagtaaatgaacttttacagatctagtataattagtcagattattaagtataatagacgactagctaagtctattatttgcgaggatgactctcaaattattacactcacggcattcgttaaccaatgcctatggtgtcataaacgagtatccgtgtccgctattttattaactactgataacaaaatattagtatgtaacagacgagatagttttctctattctgaaataattagaactagaaacatgtttagaaagaaacgattatttctgaattattccaattatttgaacaaacaggaaagaagtatactatcgtcatttttttctctagatccagctactgctgataatgatagaatagacgctatttatccgggtggcatacccaaaaggggtgagaatgttccagagtgtttatccagggaaattaaagaagaagttaatatagacaattcttttgtattcatagacactcggttttttattcatggcatcatagaagataccattattaataaattttttgaggtaatcttctttgtcggaagaatatctctaacgagtgatcaaatcattgatacatttaaaagtaatcatgaaatcaaggatctaatatttttagatccgaattcaggtaatggactccaatacgaaattgcaaaatatgctctagatactgcaaaactcaaatgttatggccatagaggatgttattacgaatcattaaaaaaattaactgaggatgattgattagaaaatataaattaatttaccatcgtgtatttttataacgggattgtccggcatatcatgtagatagttaccgtctacatcgtatactcgaccatctacgcctttaaatcctctatttattgacattaatctattagaattggaataccaaatattagtaccctcaattagtttattggtaatatttttgttagacgatagatcgatggctcttgaaaccaaggttttccaaccggactcattgtcgatcggtgagaagtctttttcattagcatgaatccattctaatgatgtatgtttaaacactctaaacaattggacaaattcttttgatttgctttgaatgatttcaaataggtcttcgtctacagtaggcataccattagataatctagccattataaagtgcacgtttacatatctacgttctggaggagtaagaacgtgactattgagacgaatggctcttcctactatctgacgaagagacgcctcgttccatgtcatatctaaaatgaagatatcattgattgagaagaagctaataccctcgcctccactagaagagaatacgcatgttttaatgcattctccgttagtgtttgattcttggttaaactcagccaccgccttgattctagtatcttttgttctagatgagaactctatattagagataccaaagactttgaaatatagtaataagatttctattcctgactgattaacaaatggttcaaagactagacatttaccatgggatgctaatattcccaaacatacatctataaatttgacgcttttctcttttaattcagtaaatagagagatatcagccgcactagcatcccctcccaatagttctccccttttaaaggtatctaatgcagatttagaaaattctctatctcttaatgaatttttaaaatcattatatagtgttgctatctcttgcgcgtattcgcccggatcacgattttgtctttcaggaaagctatcgaacgtaaacgtagtagccatacgtctcagaattctaaatgatgatatacctgtttttatttcagcgagtttagccttttgataaatttcttcttgctttttcgacatattaacgtatcgcattaatactgttttcttagcgaatgatgcagacccttctacgtcatcaaaaatagaaaactcgttattaactatgtacgaacataggcctcctagtttggagactaattctttttcatcaactagacgtttattctcaaatagcgattggtgttgtaaggatcctggtcgtagtaagttaaccaacatggtgaattcttgcacactattgacgataggtgtagccgataaacaaatcatcttatggttttttaatgcgatggtcttagataaaaaattatatactgaacgagtaggacggatcttaccatcttctttgattaatgatttagaaatgaagttatgacattcatcaataatgacgcatattctactcttggaattaatagttttgatattagtaaaaaatttatttctaaaattttgatcatcgtaattaataaaaatacaatccttcgttatctctggagcgtatctgagtatagtgttcatccaaggatcttctatcaaagcctttttcaccaataagataatagcccaattcgtataaatatccttaagatgtttgagaatatatacagtagtcattgttttaccgacacccgtttcatggaacaataaaagagaatgcatactgtctaatcctaagaaaactcttgctacaaaatgttgataatccttgaggcgtactacgtccgaccccatcatttcaacaggcatattagtagttctgcgcaatgcataatcgatataggccgcgtgtgatttactcatttatgagtgataagtaataactatgttttaaaaatcacagcagtagtttaactagtcttctctgatgtttgttttcgatactttttgaatcagaagtcatactagaataaagcaacgagtgaacgtaatagagagcttcgtatactctattcgaaaactctaagaacttattaatgaattccgtatccactggattgtttaaaatactaaattgaacactgttcacatccttccaagaagaagacttagtgacggacttaacatgagacataaataaatccaaattttttttacaaacatcactagccaccataatggcgctatcttttaaccagctatcgcttacgcattttagcagtctaacatttttaaagagactacaatatattctcatagtatcgattacacctctaccgaataaagttggaagtttaataatacaatatttttcgtttacaaaatcaaataatggtcgaaacacgtcgaaggttaacatcttataatcgctaatgtatagattgttttcagtgagatgattattagatttaatagcatctcgttcacgtttgaacagtttattgcgtgcgctgaggtcggcaactacggcgtccgctttagtactcctcccataatactttacgctattaatctttaaaatttcatagactttatctagatcgctttctggtaacatgatatcatgtgtaaaaagttttaacatgtcggtcggcattctatttagatcattaactctagaaatctgaagaaagtaattagctccgtattccagactaggtaatgggcttttacctagagacagattaagttctggcaatgtttcataaaatggaagaaggacatgcgttccctcccggatattttttacaatttcatccatttacaactctatagtttgttttcattattattagttattatctcccataatcttggtaatacttaccccttgatcgtaagataccttatacaggtcattacatacaactaccaattgtttttgtacataatagattggatggttgacatccatggtggaataaactactcgaacagatagtttatctttccccctagatacattagccgtaatagttgtcggcctaaagaatatctttggtgtaaagttaaaagttagggttcttgttccattattgctttttgtcagtagttcattataaattctcgagatgggtccgttctctgaatatagaacatcatttccaaatctaacttctagtctagaaataatatcggtcttattcttaaaatctattcccttgatgaagggatcgttaatgaacaaatccttggcctttgattcggctgatctattatctccgttatagacgttacgttgactagtccaaagacttacaggaatagatgtatcgatgatgttgatactatgtgatatgtgagcaaagattgttctcttagtggcatcactatatgttccagtaatggcggaaaactttttagaaatgttatatataaaagaattttttcgtgttccaaacattagcagattagtatgaagataaacactcatattatcaggaacattatcaatttttacatacacatcagcatcttgaatagaaacgataccatcttctggaacctctacgatctcggcagactccggataaccagtcggtggaccatcgctaacaataactagatcatccaacaatctactcacatatgcatctatataatctttttcatcttgtgagtaccctggatacgaaataaatttattatccgtatttccataataaggtttagtataaacagagagcgatgttgccgcatgaacttcagttacagtcgccgttggttggtttatttgacctattactctcctaggtttctctataaatgatggtttaatttgtacattcttaaccatatatccaataaagctcaattcaggaacataaacaaattctttgttgaacgtttcaaagtcgaacgaagagtcacgaataacgatatcggatactggattgaaggttaccgttacggtaatttttgaatcggatagtttaagactgctgaatgtatcttccacatcaaacggagttttaatataaacgtatactgtagatggttctttaatagtgtcattaggagttaggccaatagaaatatcattaagttcactagaatatccagagtgtttcaaagcaattgtattattgatacaattattatataattcttcgccctcaatttcccaaataacaccgttacacgaagagatagatacgtgattaatacatttatatccaacatatggtacgtaaccgaatcttcccatacctttaacttctggaagttccaaactcagaaccaaatgattaagcgcagtaatatactgatccctaatttcgaagctagcgatagcctgattgtctggaccatcgtttgtcataactccggatagagaaatatattgcggcatatataaagttggaatttgactatcgactgcgaagacattagaccgtttaatagagtcatccccaccgatcaaagaattaatgatagtattattcattttctatttaaaatggaaaaagcttacaataaactccgtagagaaatatctataatttgtgagttttccttaaagtaacagcttccgtaaacgccgtctttatctcttagtaagtttattgtatttataaccttttccttatcttcatagaatactaaaggcaacaaagaaatttttggttcttctctaagagctacgtgagacttaaccatagacgccaacgaatccctacatattttagaacagaaatacccaacttcaccacccttgaatgtctcaatactaataggtttaaaaaccaaatcttgattacaaaaccaacacttatcaattacactatttgtcttaatagacacatctgccatagatttataatactttggtagtatacaagcgagtgcttcttctttagcgggcttaaagactgctttaggtgctgaaataaccacatctggaaggcttactcgcttagccatttaattacggaactatttttttatacttctaatgagcaagtagaaaacctctcatctacaaaaacatactcgtgtccataatcctctaccatagttacacgttttttagatctcatatgtgctaaaaagttttcccatactaattggttactattatttttcgtataatttttaacagtttgaggttttagatttttagttacagaagtgatatcgaatattttatccaaaaagaatgaataattaattgtcttagaaggagtgttttcttggcaaaagaataccaagtgcttaaatatttctactacttcattaatcttttctgtactcagattcagtttctcatcttttacttgattgattatttcaaagactaacttataatcctttttatttattctctcgttagccttaagaaaactagatacaaaatttgcatctacatcatccgtggatatttgatttttttccatgatatccaagagttccgagataatttctccagaacattgatgagacaataatctccgcaatacatttctcaaatgaataagtttattagacacatggaagtttgactttttttgtacctttgtacatttttgaaataccgactcgcaaaaaatacaatattcatatccttgttcagatactataccgttgtgtctacaaccgctacataatcgtagattcatgttaacactctacgtatctcgtcgtccaatattttatataaaaacattttatttctagacgttgccagaaaatcctgtaatatttttagttttttgggctgtgaataaagtatcgccctaatattgttaccgtcttccgccaatatagtagttaaattatccgcacatgcaaaagaacaccgcttaggcggattcagtacaatgttatatttttcgtaccaactcatttaaatatcataatctaaaatagttctgtaatatgtctagcgctaatatattgatcataatcctgtgcataaattaagatacaacaatgtctcgaaatcatcgacatggcttcttccatagttagaagatcgtcgtcaaagttagcaacgtgattcatcaacatttgctgttttgaggcagcaaatactgaaccgtcgccattcaaccattcataaaaaccatcgtctgaatccattgataatttcttgtactggtttttgagagctcgcatcaatctagcatttctagctcccggattgaaaacagaaagaggatcgtacatccagggtccattttctgtaaatagaatcgtataatgtcccttcaagaagatatcagacgatccacaatcaaagaattggtctccgagtttgtaacaaactgcggactttaacctatacatgataccgtttagcatgatttctggtgatacgtcaatcggagtatcatctattagagatctaaagccggtgtaacattctccaccaaacatattcttattctgacgtcgttctacataaaacatcattgctccattaacgataacaggggaatgaacagcactacccatcacattagttcccaatggatcaatgtgtgtaactccagaacatcttccatatcctatgttaggaggagcgaacaccactcttccactattgccatcgaatgccatagaataaatatccttggaattgatagaaatcggactgtcggatgttgtgatcatcttcataggattaacaactatgtatggtgccgcctgaagtttcatatcgtaactgatgccgtttataggtctagccacagaaaccaacgtaggtctaaatccaactatagacaaaatagaagccaatatctgttcctcatctgtcataacttgagagcatccagtatgaataatcttcattagatggggatctaccgcatcatcatcgttacaataaaaaattcccattctaatgttcataattgcttttctaatcatggtatgcatgtttgctctctgaatctctgtggaaattagatctgatacacctgtaatcactatcggattatcctccgtaagacgattaaccaacaacatataattataagactttacttttctaaattcataaagttgctggattaggctataggtgtctccatgtacatacgcgttctcgagcgcaggaagtttaataccgaatagtgccatcagaataggatgaatatagtaattagtttctggttttctataaataaaagacaaatcttgtgaactagacatatcggtaaaatgcatggattggaatcgtgtagtcgacagaagaatatgatgattagatggagagtatattttatctaactctttgagttggtcaccgattctaggactagctcgagaatgaataagtactaaaggatgagtacatttcacagaaacactagcattgttcaatgtgctctttacatgggtaaggagttgaaatagctcgtttctatttgttctgacaatatttagtttattcataatgttaagcatatcctgaatagtaaagttagatgtgtcatacttgttagtagttagatatttagcaattgcattcccatcatttctcaatctcgtactccaatcatgtgtagatgctacttcgtcgatggaaaccatacaatcctttttgataggctgttgagattgattatttcctgcacgtttaggtttggtacgttgatttctagcccctgcggatataaagtcatcgtctacaatttgggacaatgaattgcatacactacaagacaaagatttatcagaagtgtgaatatgatcttcatctaccaaagaaagagtttgattagtataactagattttagtcctgcgttagatgttaaaaaaacatcgctattgaccacggcttccattatttatattcgtagtttttactcgaaagcgtgattttaatatccaatcttattacttttggaatcgttcaaaacctttgactagttgtagaatttgatctattgccctacgcgtatactcccttgcatcatatacgttcgtcaccagatcgtttgtttcggcctgaagttggtgcatatctctttcaacattcgacatgagatccttaagggccatatcgtctagattttgttgagatgctgctcctggatttggattttgttgtgctgttgtacatactgtaccaccagtaggtgtaggagtacatacagtggccacaataggaggttgaggaggtgtaaccgttggagtagtacaagaaatatttccatccgattgttgtgtacatgtagttgttggtaacgtctgagaaggttgggtagatggcggtgtcgtcgtcttttgatctttattaaatttagagataatatcctgaacagcattgctcggcgtcaacgctggaaggagtgaactcgccggcgcatcagtatcttcagacagccaatcaaaaagattagacatatcagatgatgtattagtttgttgtcgtggttttggtgtaggaacagtactactaggtagaagaataggagccggtgtagctgttggaaccggctgtggagttatatgaatagttggttgtagcggttggataggctgtctgctggcgaccgtcatattatctctagctagttgttctcgcaactgtctttgataatacgactcttgagactttagtcctatttcaatcgcttcatcctttttcgtatccggatccttttcttcagaataatagattgacgactttggtgtagaggattctgccagcccctgtgagaacttgttaaagaagtccatttaaggctttaaaattgaattgcgattataagattaaatggcagacacagacgatattatcgactatgaatccgatgatctcaccgaatacgaggatgatgaagaagaggaagaagatggagagtcactagaaactagtgatatagatcccaaatcttcttataagattgtagaatcagcatccactcatatagaagatgcgcattccaatcttaaacatatagggaatcatatatctgctcttaaacgacgctatactagacgtataagtctatttgaaatagcgggtataatagcagaaagctataacttgcttcaacgaggaagattacctctagtttcagaattttctgacgaaacgatgaagcaaaatatgctacatgtaattatacaagagatagaggagggttcttgtcctatagtcatcgaaaagaacggagaattgttgtcggtaaacgattttgacaaagatggtctaaaattccatctagactatattatcaaaatttggaaacttcaaaaacgatattagaatttatacgaatatcgttctctaaatgtcacaatcaagtctcgcatgttcagcaatttattgtcgtactttatatcgtgttcattaacgatatcttgcaaaatagtaatgattctatcttccttcgatagatattcttcagagattattgtcttatattttttcttgttatccgatatgaatttgataagactttgaacattattgatacccgtctgtttaattttttctacagatattttagttttggcagattctatcgtatctgtcaatagacatccaacatcgacattcgacgtcaattgtctataaatcaacgtataaattttagaaataacattagcgaattgttgtgcattgatgtcgttattctgaaacagtatgattttaggtagcattttcttaacaaagagaacgtatttattgttactcagttgaacagatgatatatccagattactaacgcatctgattccgtataccaaactttcagaagaaatggtgtacaattgtttgtattcattcaatgtctctttttcagaaattagtttagagtcgaatactgcaataattttcaagagatagttttcatcagataagattttatttagtgtagatatgataaaactattgttttgttggagaacttgatacgccgcgttctctgtagtcgacgctctcaaatgggaaacaatctccattatttttttggaatcggatactatatcttcggtatcttgacgcagtctagtatacatagagttaagagagattagagtttgtacattaagcaacatgtctctaaatgtggctacaaacttttcctttttcacataatctagtttattatataccgatttcacaacggcaccagatttaaggaaccagaatgaaaaactctgataactacaatatttcatcatagttacgattttatcatcttctatagttggtgtaatagcgcatacctttttctccaagactggaaccaacgtcataaaaatgtttaaatcaaaatccatatcaacatctgatgcgctaagaccagtctcgcgttcaagattatctttactaatggtgacgaactcatcatatagaactctaagtttgtccattatttatttacagatttagttgtttaatttatttgtgctcttccagagttgggatagtatttttctaacgtcggtattatattattaggatctacgttcatatgtatcataatattaatcatccacgttttgataaatctatctttagcttctgaaataacgtatttaaacaaaggagaaaaatatttagctacggcatcagacgcaataacattttttgtaaatgtaacgtatttagacgacagatcttcgttaaaaagttttccatctatgtagaatccatcggttgttaacaccattcccgcgtcagattgaataggagtttgaatagtttgttttggaaatagatccttcaataacttatagttgggtgggaaaaaatcgattttatcactagactctttcttttttactatcattacctcatgaactatttcttgaatgagtatatgtattttctttcctatatcggacgcgttcattggaaaatataccatgtcgttaactataagaatatttttatcctcgtttacaaactgaataatatcagatgtagttcgtaaacgaactatatcatcaccagcacaacatctaactatatgatatccactagtttcctttagccgtttattatcttgttccatattagcagtcattccatcatttaagaaggcgtcaaagataatagggagaaatgacattttggattctgttacgactttaccaaaattaaggatatacggacttactatctttttctcaacgtcgatttgatgaacacacgatgaaaatgtgcttctatgagattgatcatgtagaaaacaacaagggatacaatatttccgcatatcatgaaatatattaagaaatcccaccttattatatttccccaaaggatccatgcatgtaaacattatgccgttatcattaataaagacttctttctcatcggatttgtaaaagttgttactgatttttttcattccaggatctagataattaataatgatgggttttctattcttattctttgtattttggcatatcctagaccagtaaacagtttccactttggtaaaatcagcagacttttgaacgctattaaacatggcattaatggcaataactaaaaatgtaaaatatttttctatgttaggaatatggtttttcactttaatagatatatggtttttggccaaaatgatagatatttttttatccgaggatagtaaaatattattagtcgccgtctctataaaaatgaagctagtctcgatatccaattttattctagaattgataggagtcgccaaatgtaccttatacgttatatctcccttgatgcgttccatttgtgtatctatatcggacacaagatctgtaaatagttttacgttattaatcatcacggtatcgccgtcgctagataacgctaatgtaccatccaagtcccaaatggagagatttaactgttcatcgtttagaataaaatgattaccggtcatattaataaagtgttcatcgtatctagataacaacgacttataattaatgtccaagtcttgaactcgctgaatgatcttttttaacccagttagttttagattggtacgaaatatattgttaaactttgattctacagtaatgtccaaatctagttgtggaaatacttccatcaacattgtttcaaacttgataatattattatctacatcttcatacgatccaaattccggaatagatgtatcacatgctcttgccacccagataaccaaaaagtcacacgctccaggatatacattgtataaaaagctatcgttttttagtagtgtttttttctgagtatatacgaagggattaaaaatagtattatcaacgtaactatattccaaattattcttatgagaatagataataatatcgtccttaatatctaacaaatttcctaaatatccctttaattgagtcattcgaagcgtcaatagaatatgtctcttaactatttccggctgttgtatatttaaatgacttcgtaaaaaataatatatgggcgacttctcatctatgtaatcatatggagtgagatatagggctcgttctacctcctgccccttacccacctgtaataccaattgcggacttactatatatcgcatatttatatcgtggggtaaagtgaaaatctactaccgatgatgtaagtcttacaatgttcgaaccagtaccagatcttaatttggaggcctccgtagaactaggggaggtaaatatagatcaaacaacacctatgataaaggaaaatagcggttttatatcccgtagtagacgtctattcgcccatagatctaaggatgatgagagaaaactagcactacgattctttttacaaagactttattttttagatcatagagagattcattatttgttcagatgcgttgacgctgtaaaagacgtcactattaccaaaaaaaataacattatcgtggcgccttatatagcacttttaactatcgcatcaaaaggatgcaaacttacagaaacaatgattgaagcattttttccagaactatataatgaacatagtaagaaatttaaattcaactctcaagtatccatcatccaagaaaaactcggataccagtttggaaactatcacgtttatgattttgaaccgtattactctacagtagctctggctattcgagatgaacattcatctggcatttttaatatccgtcaagagagttatctggtaagttcattatctgaaataacatatagattttatctaattaatctaaaatctgatcttgttcaatggagtgctagtacgggcgctgtaattaatcaaatggtaaatactgtattgattacagtgtatgaaaagttacaactggtcatagaaaatgattcacaatttacatgttcattggctgtggaatcaaaacttccaataaaattacttaaagatagaaatgaattatttacaaaattcattaacgagttaaaaaagaccagttcattcaagataagcaaacgcgataaggatacgctactaaaatattttacttaggactggagttagaatttatagacgactcatttcgtttatcattgttactattattactattactatcattattagtgttggcattattagtattcttcttgtcatcttgttcagaaatatacagcaatgctatacctaatactaaatacattatcatgctcgcaatggctctaacaacaacgaaccaaaatgaatttggtcgtagcttttgttcacaaaaatacataaagaaatgtctacataaatctatggcgccattggctacttgaaatagcgccagtcctcctacagattttaatatagctgtataacatgacatttattcatcatcaaaagagacagagtcaccatctgtcatatttagattttttttcatgtgttcaaagtatcctctactcatttcattataatagtttatcatacttagaattttaggacggatcaatgagtaagacttgactagatcgtcagtagtaatttgtgcatcgtctattctgcatccgcttcgtcgaataatgtatagcatcgctttgagattctccatagctatcaagtctttatacaatgacatggaaatatctgtgaatactttatacttctccaacatcgatgccttaacatcatcgcctactttagcattgaaaatacgttctattgtgtagatggatgtagcaagatttttaaacaacaatgccatcttacacgatgattgcctcaagtctccaatcttttgtttagaacgattagctacagagttcaacgcttggctgactagcatattattatctttagaaattgtattcttcaatgaggcgtttatcatatctgtgatttcgttagtcatattacagtctgactgggttgtaatgttatccaacatatcacctatggatacggtacacgtaccagcatttgtaataatcctatctaagatgttgtatggcattgcgcagaaaatatcttctcctgtaatatctccactctcgataaatctactcagattattcttaaatgccttattctctggagaaaagatatcagtgtccatcatttcattaatagtatacgcagaaaagataccacgagtatcaattctatccaagatacttatcggttccgagtcacagataatggtttcctctccttcgggagatcctgcatagaaatatctaggacaatagtttctatactgtctgtaactctgataatctctaaagtcactaactgataccatgaaattgagaagatcaaacgctgaagtaatcaatttttctgcctcgtttttactacaactagttttcatcaatgtagcgacgatgtattgtttagttactcttggtctaatactgatgatagagatattattgcttcccataatggatcttctagtagtcaccttaaagcccattgatgcgaatagcagatagataaagtcttggtatgactcctttctaatatagtacggactacctttgtcacccaactttatacccacataagccataacaacctctttaatagccgtttcatgaggtttatcagccatgagcctgagtagttggaagaatctcatgaatcccgtctcagaaagtcctatatgcatgatagatttatctttcctgggaaactctcgtatagtcatagatgaaatactcttcaaagtttctgaaataagattagtaacagtcttacctccgactactctgggtaacaaacatactctaataggtgttttctctgcggagataatatcagaaaggatagagcaataagtagtattattgtgattataaagaccgaatacataacaggtagaatttataaacatcatgtcctgaaggtttttagacttgtattcctcgtaatccataccgtcccaaaacatggatttggtaactttgatagccgtagatctttgttccttcgccaacaggttaaagaaattaataaagaatttgttgtttctatttatgtccacaaattgcacgtttggaagcgccacggttacattcactgcagcattttgaggatcgcgagtatgaagtacgatgttattgtttactggtatatctggaaagaaatctaccagtctaggaataagagattgatatcgcatagaaatagtaaagtttataatctcatcatcgaagagcattttgttaccattgtaataaatatccactctgtcatatgtataaatgaagtactgttcaaacatgatgagatgtttatatgttggcatagtagtgagatcgacgtttggtaatggcaatgtattaagattaactccataatgtctagcagcatctgcgatgttataagcgtcgtcaaagcggggtcgatcttgtattgttatatattgtctaacacctataagattatcaaaatcttgtctgcttaatacaccgttaacaatttttgccttgaattcttttattggtgcattaataacatccttatagaggatgttaaacaaataagtgttatcaaagttaagatctggatatttcttttctgctagaacatccattgagtcggagccatctggtttaatataaccaccgataaatctagctctgtattctgtatccgtcaatctaatattaagaaggtgttgagtgaaaggtggaagatcgtaaaagctgtgagtattaatgataggattagtttccgaactaatgttaattggggtattaataatatctatatttccagcgttaagtgtaacattaaacagttttaattcacgtgacgtggtatcaattaaataattaatgcccaatttggatatagcagcctgaagctcatcttgtttagttacggatcctaatgagttattaagcaatatatcgaacggatgaacgaaggttgttttaagttggtcacatactttgtaatctagacatagatgcggaagaacggtagaaactatacgaaataaatattcagagtcctctaattgatcaagagtaactattgacttaataggcatcatttatttagtattaaatgacgaccgtaccagtgacggatatacaaaacgatttaattacagagttttcagaagataattatccatctaacaaaaattatgaaataactcttcgtcaaatgtctattctaactcacgttaacaacgtggtagatagagaacataatgccgccgtagtgtcatctccagaggaaatatcctcacaacttaatgaagatctatttccagatgatgattcaccggccactattatcgaacgagtacaacctcatactactattattgacgatactccacctcctacttttcgtagagagttattgatatcggaacaacgtcaacaacgagaaaaaagatttaatattacagtatcgaaaaatgctgaagcaataatggaatctagatctatgataacttctatgccaacacaaacaccatccttgggagtagtttatgataaagataaaagaattcagatgttggaggatgaagtggttaatcttagaaatcaacgatctaatacaaaatcatctgataatttagataattttaccaaaatactatttggtaagactccgtataaatcaacagaagttaataagcgtatagccatcgttaattatgcaaatttgaacgggtctcccttatcagtcgaggacttggatgtttgttcagaggatgaaatagatagaatctataaaacgattaaacaatatcacgaaagtagaaaacaaaaaattatcgtcactaacgtgattattattgtcataaacattatcgagcaagcattgctaaaactcggatttgaagaaatcaaaggactgagtaccgatatcacttcagaaattatcgatgtggagatcggagatgactgcgatgctgtagcatcaaaactaggaatcggtaacagtccggttcttaatattgtattgtttatactcaagatattcgttaaacgaattaaaattatttaatttaatacattcccatatccagacaacaatcgtctggattaatctgttcctgtcgtctcataccggacgacatattaatctttttattagtaggcatctttttagatggtttctttttcccagcattaactgagtcgatacctagaagatcgtgattgatctctccgaccattccacgaacttctaattggccgtctctaacggtaccataaactattttaccagcattagtaacagcttggacaatctgaccatccatcgcattgtacgatgtagtagtaactgttgttctacgtctaggagcaccagaagtatttttggagcccttggaggctgatgtagaagaagacgaggattttgattttggtttacatgtaatacattttgaactctttgattttgtatcacatgcgccggcagtcacatctgtttgagaattaagattattgttgcctcctttgacggctgcatctccaccgatttgcgctagtagatttttaagctgtggtgtaatcttattaactgtttcgatataatcatcgtaactgcttctaacggctaaattttttttatccgccatttagaagctaaaaatatttttatttatacagaagatttaactagattatacaatgaactaatatgatccttttccagattatttacaaacttggtattttttggttctggaggaggcgaatttaaattcggacttggattcggattttgtgagttcttgatcttattatacatcgagtataggatggcgacggtaactgctacacaaataccgatcaacaaaagaataccaatcatttattgacaataacttcactattgatcaagtatgcaatatatcatcttttcactaaataagtagtaataatgattcaacaatgtcgagatatatggacgataataatttagttcatggaaatatcgctatgattggtatgaatgactccgctaactctgtggggcgcgcagtgctttccccacatagaataaattagcattccgactgtgataataataccaagtataaacgccataatactcaatactttccatgtacgagtgggactggtagacttactaaagtcaataaaggcgaagatacacgaaagaatcaaaagaatgattccagcgattagcacgccggaaaaataatttccaatcataagcatcatgtccatttaactaataaaaattttaaatcgccgaatgaacaaagtggaatataaaccatataaaaacaatagtttgtactgcaaaaataatatctatttttgttttcgaagatatggtaaaattaaatagtagtacacagcatgttataactaacagcagcaacggctcgtaattacttatcatttactagacgaaaaggtggtgggatattttcttgctcaaataatacgaatatatcacccatccattttatgcgatgtttatatactctaatctttaatagatctatagacgacgggtttaccaacaatatagattttatcgattcatctaatttaaacccttccttaaacgtgaatgatctattatctggcataacgatgaccctacctgatgaatcggacaatgtactgggccatgtagaataaattatcaacgaattatcgtctacgaacatttatatcatttgttttaattttaggacgcgaataaatagatataaaatagaaaataacagatattacaaccagtgttatggccgcgcccaaccaggtaggcagttttattttatcttttactacaggttctcctggatgtacgtcaccaacggcggacgtagttctagtacaattagacgtaagttccgcttgggaattttttaacgctaaagagttaacgttaatcgtgcacccaacgtatttacatctagttctttgaacatcttgattataatataaccattttctatctctagattcgtcggtgcactcatgtaaccaacataccctaggtcctaaatatttatctccggaattagattttggataattcgcgcaccaacaatttctatttcctttatgatcgttacaaaagacgtataatgccgtatccccaaaagtaaaataatcaggacgaataattctaataaactcagaacaatatctcgcatccatatgtttggagcaaatatcggaataagtagacatagccggtttccgttttgcacgtaaccattctaaacaattggggtttccaggatcgtttctacaaaatccagtcatgaaatcgtcacaatgttctgtcttgtaattattattaaatatttttggacagtgtttggtatttgtcttagaacaacattttgccacgctatcactatcgcccaggagataatccttttttataaaatgacatcgttgcccggatgctatataatcagtagcgtgttttaaatccttaatatattcaggagttacctcgttctgataatagattaatgatccaggacgaaatttgaaagaactacatggttctccatgaattaatacatattgtttagcaaattcaggaactataaaactactacaatgatctatcgacataccatctatcaaacaaaacttgggtttaatttctcccggagatgtttcataatagtacgtataactttcttctgcaaacttaacagctctattatattcaggataattaaaacctaattccatatatttgtctcgtatatctgctattcctggtgctattttgattctattaagagtaacagctgcccccattcttaataatcgtcagtatttaaactgttaaatgttggtatatcaacatctaccttatttcccgcagtataaggtttgttgcaggtatactgttcaggaatggttacatttatacttcttctatagtcctgtctttcgatgttcatcacatatgcaaagaacagaataaacaaaataatgtaagaaataatattaaatatctgtgaattcgtaaatacattgattgccataataattacagcagctacaatacacacaatagacattcccacagtgttgccattacctccacgatacatttgagttactaagcaataggtaataactaagctagtaagaggcaatagaaaagatgagataaatatcatcaatatagagattagaggagggctatatagagccaagacgaacaaaatcaaaccgagtaacgttctaacatcattatttttgaagattcccaaataatcattcattcctccataatcgttttgcatcatacctccatctttaggcataaacgattgctgctgttcctctgtaaataaatctttatcaagcactccagcacccgcagagaagtcgtcaagcatattgtaatatcttaaataactcatttatatattaaaaaatgtcactattaaagatggagtataatctttatgccgaactaaaaaaaatgacttgtggtcaacccctaagtctttttaacgaagacggggatttcgtagaagttgaaccgggatcatcctttaagtttctgatacctaagggattttacgcctctccttccgtaaagacgagtctagtatttgaaacattaacaacgaccgataataaaatcactagtatcaatccaacaaatgcgccaaagttatatcctcttcaacgcaaagtcgtatctgaagtagtttctaatatgaggaaaatgatcgaatcaaaacgtcctctatacattactcttcacttggcgtgtggatttggtaagactattaccacgtgttatcttatggctacacacggtagaaaaaccgtcatttgcgtacccaataaaatgttaatacatcaatggaagacacaggtagaggcagtcggattggaacataagatatccatagatggagtaagtagtctattaaaggaactaaagactcaaagtccggatgtattaatagtagtcagtagacatctgacaaacgatgccttttgtaaatatatcaataagcattatgatttgttcatcttggatgaatcacatacgtataatctgatgaacaatacagcagttacaagatttttagcgtattatcctccgatgatgtgttattttttaactgctacacctagaccagctaaccgaatttattgtaacagtattattaatattgccaagttatccgatctaaaaaaaactatctatgcggtagatagtttttttgagccatattccacagacaatattagacatatggtaaaacgactagatggaccatctaataaatatcatatatataccgagaagttattatctgtagacgagcctagaaatcaacttattcttaataccctggtagaagaattcaagtcaggaactattaatcgcattttagttattactaaactacgtgaacatatggtattattctacaaacgattattagatcttttcggaccagaggttgtatttataggagacgcccaaaatagacgtactccagatatggtcaaatcaatcaaggaactaaatagatttatattcgtatccaccttattttattccggtactggtttagatattcctagtttggattcgttgttcatttgctcggcagtaatcaacaatatgcaaatagagcaattactagggagggtatgtcgagaaacagaactattagataggacggtatatgtatttcctaacacatccatcaaagaaataaagtacatgataggaaatttcatgcaacgaattattagtctgtctgtagataaactaggatttaaacaagaaagttatcggaaacatcaagaatccgatcccacttctgtatgtacaacatcctccagagaagaacgtgtattaaatagaatatttaactcgcaaaatcgttaagaagtttaagcgacgatccgcatgctgcgcaggccagtgtattacccctcatagtattaatataatccaatgatacttttgtgatgtcggaaatcttaaccaatttagactgacaggcagaacacgtcatgcaatcatcatcgtcatcgataactgtagtcttgggcttctttttgcggctcttcattccggaacgcacattggtgctatccatttaggtagtaaaaaataagtcagaatatgccctataacacgatcgtgcaaaacctggtatatcgtctctatctttatcacaatatagtgtatcgacatctttattattattgacctcgtttatcttggaacatggaatgggaacatttttgttatcaacggccacctttgccttaattccagatgttgtaaaattataactaaacagtctatcatcgacacaaatgaaattcttgtttagacgtttgtagtttacgtatgcggctcgttcgcgtctcattttttcagatattgcaggtactataatattaaaaataagaatgaaataacataggattaaaaataaagttatcatgacttctagcgctgatttaactaacttaaaagaattacttagtctgtacaaaagtttgaaattttcagattctgcggctatagaaaagtataattctttggtagaatggggaacatctacttactggaaaataggcgtgcaaaaggtagctaatgtcgagacgtcaatatctgattattatgatgaggtaaaaaataaaccgtttaatattgatccgggctattacattttcttaccggtatattttgggagcgtctttatttattcgaagggtaaaaatatggtagaacttggatctggaaactcttttcaaataccagatgatatgcgaagtgcgtgtaacaaagtattagacagcgataacggaatagactttctgagatttgttttgttaaacaatagatggataatggaagatgctatatcaaaatatcagtctccagttaatatatttaaactagctagtgagtacggattaaacatacccaaatatttagaaattgaaatagaggaagacacattatttgacgacgagttatactctattatagaacgctcttttgatgataaatttccaaaaatatccatatcgtatattaagttgggagaacttaggcggcaagttgtagactttttcaaattctcgttcatgtatattgagtccatcaaggtagatcgtataggagataatatttttattcctagcgttataacaaaatcaggaaaaaagatattagtaaaagatgtagaccatttaatacgatctaaggttagagaacatacatttgtaaaagtaaaaaagaaaaacacattttccattttatacgactatgatgggaacggaacagaaactagaggagaagtaataaaacgaattatagacactataggacgagactattatgttaacggaaagtatttctctaaggttggtagtgcaggcttaaagcaattgactaataaattagatattaatgagtgcgcaactgtcgatgagttagttgatgagattaataaatccggaactgtaaaacgaaaaataaaaaaccaatcagcatttgatttaagcagagaatgtttgggatatccagaagcagattttataacgttagttaataacatgcggttcaaaatagaaaattgtaaggttgtaaatttcaatattgaaaatactaattgtttaaataacccgagtattgaaactatatatggaaactttaaccagttcgtctcaatctttaatatcgtcaccgatgtcaaaaaaagattattcgagtgaaataatatgcgcctttgatataggtgcaaaaaatcctgccagaactgttttagaagtcaaggataactccgttagggtattggatatatcaaaattagactggagttctgattgggaaaggcgcatagctaaagatttgtcacaatatgaatacactacagttcttctagaacgtcagcctagaaggtcgccgtatgttaaatttatctattttattaaaggctttttatatcatacatcggctgccaaagttatttgcgtctcgcctgtcatgtctggtaattcatatagagatcgaaaaaagagatcggtcgaagcatttcttgattggatggacacattcggattgcgagactccgttccggatagacgcaaattagacgatgtagcggatagtttcaatttggctatgagatacgtattagataaatggaatactaattatacaccttataataggtgtaaatctagaaattacataaaaaaaatgtaataacgttagtaacgccattatggataatctatttacctttctacatgaaatagaagatagatatgccagaactatttttaactttcatctaataagttgcgatgaaataggagatatatatggtcttatgaaagaacgcatttcctcagaggatatgtttgataatatagtatataataaagatatacatcctgccattaagaaactagtgtattgcgacatccaacttactaaacacattattaatcagaatacgtatccggtatttaacgattcttcacaagtgaaatgttgtcattatttcgacataaactcagataatagcaatattagctctcgtacagtagagatatttgagagggaaaagtcatctcttgtatcatatattaaaactaccaataagaagagaaaggtcaattacggcgaaataaagaaaactgttcatggaggcactaatgcaaattacttttccggtaaaaagtctgacgagtatctgagtactacagttagatccaacattaatcaaccttggatcaaaaccatttctaagagaatgagagtagatatcattaatcactctatagtaacgcgtggaaaaagctctatattacaaactatagaaattatttttactaatagaacatgtgtgaaaatattcaaggattctactatgcacattattctatccaaggacaaggatgaaaaggggtgtatacacatgattgacaaattattctatgtctattataatttatttctgttgttcgaagatatcatccaaaacgagtactttaaagaagtagctaatgttgtaaaccacgtacttacggctacggcattagatgagaaattattcctaattaagaaaatggctgaacacgatgtttatggagttagcaatttcaaaatagggatgtttaacctgacatttattaagtcgttggatcataccgttttcccctctctgttagatgaggatagcaaaataaagttttttaaggggaaaaagctcaatattgtagcattacgatctctggaggattgtataaattacgtgactaaatccgagaatatgatagaaatgatgaaggaaagatcgactattttaaatagcatagatatagaaacggaatcggtagatcgtctaaaagaattgcttctaaaatgaaaaaaaacactgattcagaaatggatcaacgactagggtataagtttttggtgcctgatcctaaagccggagttttttatagaccgttacatttccaatatgtatcgtattctaattttatattgcatcgattgcatgaaatcttgaccgtcaagcggccactcttatcgtttaagaataatacagaacgaattatgatagaaattagcaatgttaaagtgactcctccagattactcacctataatcgcgagtattaaaggtaagagttatgatgcattagccacgttcactgtaaatatctttaaagaggtaatgaccaaagagggtatatccatcactaaaataagtagttatgagggaaaagattctcatttgataaaaattccgctactaataggatacgggaataaaaatccacttgatacagccaagtatcttgttcctaatgtcataggtggagtctttatcaataaacaatctgtcgaaaaagtaggaattaatctagtagaaaagattacaacatggccaaaatttagggttgttaagccaaactcattcactttctcgttttcctccgtatcccctcctaatgtattaccgacaagatatcgccattacaagatatctctggatatatcacaattggaagcgttgaatatatcatcgacaaagacatttataacggtcaatattgttttgctgtctcaatatttatctagagtgagtctagaattcattagacgtagtttatcatacgatatgcctccagaagttgtctatctagtaaacgcgataatagatagtgctaaacgaattactgaatctattactgactttaatattgatacatacattaatgacctggtggaagctgaacacattaaacaaaaatctcagttaacgatcaacgagttcaaatatgaaatgctgcataactttttacctcatatgaactatacacccgatcaactaaagggattttatatgatatctttactaagaaagtttctctactgtatctaccacacttctagatatccagatagagattcgatggtttgtcatcgcatcctaacgtacggcaaatattttgagacgttggcacatgatgaattagagaattacataggcaacatccgaaacgatatcatgaacaatcacaagaacagaggcacttacgcggtaaacattcatgtactaacaactcccggacttaatcacgcgttttctagcttattgagtggaaagttcaaaaagtcagacggtagttatcgaacacatcctcactattcatggatgcagaatatttctattcctaggagtgttggattttatccggatcaagtaaagatttcaaagatgttttctgtcagaaaataccatccaagtcaatatctttacttttgttcatcggacgttccggaaagaggtcctcaggtaggtttagtatctcaattgtctgtcttgagttccattacaaatatactaacgtctgagtatttggatttggaaaagaaaatttgtgagtatatcagatcatattataaagatgatataagttactttgaaacaggatttccaatcactatagaaaatgctctagtcgcatctcttaatccaaatatgatatgtgattttgtaactgactttagacgtagaaaacggatgggattcttcggtaacttggaggtaggtattactttagttagggatcacatgaatgaaattcgcattaatattggagcgggaagattagtcagaccattcttggttgtggataacggagagctcatgatggatgtgtgtccggagttagaaagcagattagacgacatgacattctctgacattcagaaagagtttccgcatgtcatcgaaatggtagatatagaacaatttacttttagtaacgtatgtgaatcggttcaaaaatttagaatgatgtcaaaggatgaaagaaagcaatacgatttatgtgactttcctgccgaatttagagatggatatgtggcatcttcattagtgggaatcaatcacaattctggacccagagctattcttggatgtgctcaagctaaacaagctatctcttgtctgagttcggatatacgaaataaaatagacaatggaattcatttgatgtatccagagaggccaatcgtgattagtaaggctttagaaacttcaaagattgcggctaattgcttcggccaacatgttactatagcattaatgtcgtacaaaggtatcaatcaagaggatggaattatcatcaaaaaacaatttattcagagaggcggtctcgatatagttaccgcaaagaaacatcaagtagaaattccgttggaaaactttaataacaaagaaagagataggtctaacgcctattcaaaattagaaagtaatggattagttagactgaatgctttcttggaatccggagacgctatggcacgaaatatctcatcaagaactcttgaagatgattttgctagagataatcagattagcttcgatgtttccgagaaatataccgatatgtacaaatctcgcgttgaacgagtacaagtagaacttactgacaaagttaaggtacgagtattaaccatgaaagaaagaagacccattctaggagataaatttaccactagaacgagtcaaaagggaacagtcgcgtatgtcgcggatgaaacggaacttccatacgacgaaaatggtatcacaccagatgtcattattaattctacatccatcttctctagaaaaactatatctatgttgatagaggttattttaacagccgcatattctgctaagccgtacaacaataagggagaaaaccgacctgtctgttttcctagtagtaacgaaacatccatcgatacatatatgcaattcgctaaacaatgttatgagcattcaaatccgaaattgtccgatgaagaattatcggataaaatcttttgtgaaaagattctctatgatcctgaaacggataagccttatgcatccaaagtattttttggaccaatttattacttgcgtctgaggcatttaactcaggacaaggcaaccgttagatgtagaggtaaaaagacgaagctcattagacaggcgaatgagggacgaaaacgtggaggaggtatcaagttcggagaaatggagagagactgtttaatagcgcatggcgcagccaatactattacagaagttttaaaagactcagaagaggattatcaagatgtgtatgtttgtgaaaattgtggagacatagcagcacaaatcaagggtattaatacatgtcttagatgttcaaaacttaatctctctcctctcttaacaaaaattgataccacgcacgtatctaaagtatttcttactcaaatgaacgccagaggcgtaaaagtcaaattagatttcgaacgaaggcctccttcgttttataaaccattagataaagttgatctcaagccgtcttttctggtgtaatattctagtttggtagtagatacatatcaatatcatcaaattcgagatccgaattataaaatgggcgtggattgttaactatagaatcggacgtctgatattcgaaaatctgtggagttttaggttttggtggaggtgtaactgctacttgggatactgaagtctgatattcagaaagctgggggatgttctggttcgacatccaccgatggtgtcacatcactaatcggttcggtaacgtctgtggatggaggtgctacttctacagaacctgtagcctcagttgtcaacggagatacatttttaatgcgaggaaatgtataatttggtaatggtttctcatgtggatctgaagaagaggtaagatatctactagaaagataccgatcacgttctagttctcttttgtagaacttaactttttctttctcagcatctagttgatattccaacctcttcacgttactacgttcagattccaattcacgttcgcatgggttacctccgcagtttttacgagcgatttcacgttcagccttcatgcgtctctccttctctctatcgagtttatcagagcagtctttctgaaggcgatcgaactccataaatttctccaacgctttgattgtttccatagatttccgaagttcagcttttaggactgtgattctttttctttcgaattcacagctggatgtgcaaccgtttccattaccgccatctctaagtttcttttctagatcggcaacatttcatccccatgccttttacattcctcgagtctactgtcgtcgaaatatcgttccagctccttttcgacatcaataactttagcacgttgtctctcaagctctcttttgtagttatctgattccctggcacgtttaagatcttcatgcaattgagtcagctcttaacacaatctcttgcttcttcgtcatagtacttacaatcactatgggatccattgttaccacgtctacactcggcgagctcgcgtttaagagattcaatttcccgtttgtattggtccatgtttccattgctaccaccattagatttacaggctgctagttgtcgttcgagatcagaaatacgggttttcttggaattgatttcgtcgatgtacttggcatcgaaacacttattaagttctttttccaattctacgattttatttctttcgcgagtcaattccctcctgtagtaactatctgttttgtcagattcacgctctctacgtagactttcttgcaagttactaatttgttccctagcacgtccgagtttagttttatatgctgaatagagttctgattcatcctttgagcagatctctagcgatcgtttaagattcctgattctagtctttagcctatttacctcctcagaagatgttccgttaccgttgcgtttacactcgttaagctgtctatcaagatccatgattctatctctaagacgttgcatctctctttccatatcagcattgctttcattattacgtctgcagtcactcaactgtctttcaatatctgagattctatctctaagacgtcgcatctctctctgtttcggcattggtttcattattacgtctacagtcgttcaactgtctttcaagatctgatattctagattggagtctgctaatctctgtagcattttcacggcattcactcagttgtctttcaagatctgagattttagattggagtctgctaatctctgtaagatttcctcctccgctctcgatgcagtcggtcaacttattctctagttctctaatacgcgaacgcagtgcatcaacttcttgcgtgtcttcctggttgcgtgtacattcatcgagtctagattcgagatctctaacgcgtcgtcgttcttcctcaagttctctgcgtactacagaaagcgtgtccctatcttgttgatatttagcaatttctgattctagagtactgattttgcttacgtagttactaatagttgtcttggccttatcaagatcctccttgtatttgtcgcattccttgatatccctacgaagtctggacagttcccattcgacattacgacgtttatcgatttcagctcggagatcgtcatcgcgttgttttagccacatacgactgagttcaagttctcgttgacaagatccatctacttttccattcctaatagtatccagttccttttctagttctgaacgcatttctcgttccctatcaagcgattctctcaattctcggatagtcttcttatcaatttctaataaatctgaaccatcatctgtcccattttgaatatccctgtgttctttgatctcttttgtaagtcggtcgattctttcggttttataaacagaatccctttccaaagtcctaatcttactgagtttatcactaagttctgcattcaattcggtgagttttctcttggcttcttccaactctgttttaaactctccactatttccgcattcttcctcgcatttatctaaccattcaattagtttattaataactagttggtaatcagcgattcctatagccgttcttgtaattgtgggaacataattaggatcttctaatggattgtatggcttgatagcatcatctttatcattattagggggatggacaaccttaattggttggtcctcatctcctccagtagcgtgtggttcttcaataccagtgttagtaataggcttaggcaaatgcttgtcgtacgcgggcacttcctcatccatcaagtatttataatcgggttctacgtctgaatattcttttctaagagacgcgacttcgggagttagtagaagaactctgtttctgtatctatcaacgctggaatcaatactcaagttaaggatagcgaatacctcatcgtcatcatccgtatcttctgaaacaccatcatatgacatttcatgaagtctaacgtattgataaatagaatcagatttagtattaaacagatccttaacctttttagtaaacgcatatgtatattttagatctccagatttcataatatgatcacatgccttaaatgtcagtgcttccatgatataatctggaacactaatgggtgacgaaaaagatacagcaccatatgctacgttgataaataaatctgaaccactaagtagataatgattaatgttaaggaagaggaaatattcagtatatagatatgccttagcatcatatcttgtactaaacacgctaaacagtttattgatgtgatcaatttccaacagaataattagagcagcgggaataccaacaaacatattaccacatccgtattttctatgaatatcacatatcatgttaaaaaatcttgatagaagagcgaatatctcgtctgacttaatgagtcgtagttcagcagcaacataagtcataactgtaaatagaacatactttcctgtagtgttgattctagactccacatcaacaccattattaaaaatagttttatatacatctttaatctgctctccgttaatcgtcgaacgttctagtatacggaaacactttgatttcttatctgtagttaatgacttagtgatatcacgaagaatattacgaattacatttcttgtttttcttgagagacctgattcagaactcaactcatcgttccatagtttttttacctcagtggcgaaatctttggagtgcttggtacatttttcaataaggttcgtgacctccatttattataaaaaattttattcaaaacttaactacaatcgggtaattataaaatcgtagatctcccatgtggtggaatactaccatctatcgcatgtggatggacagtaggtaatggccatgggaacagtaatgtttgcatatttatctttcttgccagtattactgcatattgtcccaatgtttcgatgtgatgttctaacctatcaactgccgctgtatcacaacaatagtgtccgatgaaattaagattatgatccaatgtgtttaatatatgattatcaagtcttatacgatccgcgtcttttttgacaggatcaggttcttctacaggaagaagtttcggcctcttatgatattcatgtctgggaaacggtggtctagggtgaggctccggtatcggagtgggttttggattataatcatcatcgtctatgacatcatcttcgacttcgatatttattttgctatcttgatgatgtcctgtatcagttgcattttcagcactcgactgaatattagcgcattcattgtctattattaccatatttctaaacccaaaatgtatgtgttgaacatcagtactatcgttgatgagtcttatagcatgaattcgcttatcgttatcgggtttatcttctgtcaccttagcaattccttttttattaaactctacataatcatatccatttctattgtttgttctaatataaacgagtatagcatcattgctaaatttttcaatagtatcgaaaacagaatatcctaaaccatataatatatattcagggacactcaaactaaatgtccaggattctcctaaatacgtaaactttaatagtgcgaaatcattcaaaaatctaccacttatagatagatagtacataaatgcgtatagtagtctacctatctctttattatgaaaaccggcattacgatcatatatgtcgtgatatacctgtgatccgtttacgttaaaccataaatacatgggtgatcctataaacatgaatttatttctaattctcagagctatagttaattgaccgtgtaatatttgcttacatgcatacttgatacgctcattaataaaatttttatcattgctcgttatctcagaatcgtatatataaggagtaccatcgtgattcttaccagatattatacaaaatactatatataaaatatattgaccaacgttagtaatcatataaatgtttaacgttttaaattttgtattcaatgatccattatcatacgctagcatggtcttatgatattcattctttaaaatataatattgtgttagccattgcattggggctcctaatggagattttttattctcatccattttaggataggctttcataaagtccctaataacttcgtgaataatgtttctatgttttctactgatgcatgtatttgcttcgatttttttatcccatgtttcatctatcatagatttaaacgcagtaatgctcgcaacattaacatcttgaaccgttggtacaattccgttccataaatttataatgttcgccatttatataactcattttttgaatatacttttaattaacaaaagagttaagttactcatatgggcgccgtccagtctgaacatcaatctttttagccagagatatcatagccgctcttagagtttcagcgtgattttccaacctaaatagaacttcatcgttgcgtttacaacacttttctatttgttcaaactttgttgttacattagtaatctttttttccaaattagttagccgttgtttgagagtttcctcattgtcgtcttcatcggctttaacaattgcttcgcgtttagcctctggctttttagcagcctttgtagaaaaaaattcagttgctggaattgcaagatcgtcatctccggggaaaagagttccgtccatttaaagtacagattttagaaactgacactctgcgttatttatatttggtacaacacatggattataaatatcgatgttaataacatcagaaaatgtaaagtctatacattgttgcatcgtgttaaattttctaatggatctagtattattgggtccaacttctgcctgaaatccaaatatggaagcggatacaaaaccgtttcctggataaaccacacatctccacttttgctttacatcagaaattgtgtcgttgacatcttgaactctcctatctaatgccggtgttccacctatagattttgaatattcgaatgctgcatgagtagcattaaattccttaatattgccataattttcatatattgagtaaccctggataaaaagtaaacacaccgcagccgtcgctaccacaataaaaaaaattgatagagagttcatttataatctattagaagctgacaaaatttttttacacgcatcagacaatgctttaataaatagttcaacatctacttttgtcatatcgaaccgatggtatgattctaacctagaattacatccgaaaaagttgactatgttcatagtcattaagtcattaacaaacaacattccagactctggattataagacgatactgtttcgtcacaattacctaccttaatcatgtgattatgaatattggctattagagcaccttctaagaaatctataatatctttgaaacacgatttaaaatcaaaccacgaatatacttctacgaagaaagttagtttacccataggagaaataactataaatggagatctaaatacaaaatccggatctatgatagttttaacattattatattctctattaaatacctccacatctaaaaatgttaattttgaaactatgtcttcgtttattaccgtacctgaactaaacgctataagctctattgtttgagaactctttaaacgatattcttgaaatacatgtaacaaagtttcctttaactcggtcggtttatctaccatagttacagaatttgtatccttatctataatataataatcaaaatcgtataaagttatataattatcgcgttcagattgggatcttttcaaatagactaaaaaccccatttctctagtaagtatcttatgtatatgtttgtaaaatatcttcatggtgggaatatgctctaccgcagttagccattcctcattgacagcggtagatgtattagacaaaactattccaatgtttaacaagggccattttacgagattattaaatccttgtttgataaatgtagccaatgagggttcgagttcaacgacgattgaattctcttcccgcggatgctgcatgatgaacgacgggatgttgttcgattgatttggaattctttttcgactttttgtttatattaaatattttaaaatttatagcggatagcaattcatgtaccacggataatgtagacgcgtattgcgcatcgatatctttattattagataaatttatcaataaatgtgagaagtttgcctcgttaaggtcttccatttaaatattatataaacatttgtgtttgtatcttattcgtcttttatggaatagttttttactagtaaagctgcaattacacactttgtccgtaaaacataaatataaacaccagcttttatcaatcgttccaaaaagtcgacggcggacatttttaacatggcatctattttaaatacacttaggtttttggaaaaaacatcattttataattgtaacgattcaataactaaagaaaagattaagattaaacataagggaatgtcatttgtattttataagccaaagcattctaccgttgttaaatacttgtctggaggaggtatatatcatgatgatttggttgtattggggaaggtaacaattaataatctaaagatgatgctattttacatggatttatcatatcatggagtgacaagtagtggagcaatttacaaattgggatcgtctatcgatagactttctctaaataggactattgttacaaaagttaataattatgatgatacattttttgacgacgatgattgatcgctattgcacaattttgtttttttactttctaatatagcgtttagattctttttcatgtgcgaatattgatttactaaaatatcgatgtttaacttttgttctatgacgtccttatcagcggtatcggtacatatacgtaattcaccttcacaaaatacggagtcttcgataataatagccaatcgattattggatctagctgtctgtatcatattcaacatgtttaatatatcctttcgtttcccctttacaggcatcgatcgtagcatattttccgcgtctgagatggaaatgttaaaactacaaaaatgcgtaatgttagcccgtcctaatattggtacgtgtctataagtttggcatagtagaataatagacgtgtttaaatgccttccaaagtttaagaattctattagagtattgcattttgatagtttatcacctacatcatcaaaaataagtaaaaagtgtgctgattttttatgattttgtgcgacagcaatacatttttctatgttacttttagttcgtatcagattatattctagagattcctgactactaacgaaattaatatgatttggccaaatgtatccatcataatctgggttataaacgggtgtaaacaagaatatatgtttatattttttaactagtgtagaaaacagagatagtaaatagatagtttttccagatccagatcctcccgttaaaaccattctaaacggcatttttaataaattttctcttgaaaattgtttttcttggaaacaattcataattatatttacagttactaaattaatttgataataaatcaaaatatggaaaactaaggtcgttagtagggaggagaacaaagaaggcacatcgtgacataaataacatttattatcatgatgacaccagaaaacgacgaagagcagacatctgtgttctccgctactgtttacggagacaaaattcaaggaaagaataaacgcaaacgcgtgattggtctatgtattagaatatctatggttatttcactactatctatgattaccatgtccgcgtttctcatagtgcgcctaaatcaatgcatgtctgctaacgaggctgctattactgacgccgctgttgccgttgctgctgcatcatctactcatagaaaggttgcgtctagcactacacaatatgatcacaaagaaagctgtaatggtttatattaccagggttcttgttatatattacattcagactaccagttattctcggatgctaaagcaaattgcactgcggaatcatcaacactacccaataaatccgatgtcttgattacctggctcattgattatgttgaggatacatggggatctgatggtaatccaattacaaaaactacatccgattatcaagattctgatgtatcacaagaagttagaaagtatttttgtgttaaaacaatgaactaatatttatttttgtacattaataaatgaaatcgcttaatagacaaactgtaagtaggtttaagaagttgtcggtgccggccgctataatgatgatactctcaaccattattagtggcataggaacatttctgcattacaaagaagaactgatgcctagtgcttgcgccaatggatggatacaatacgataaacattgttatttagatactaacattaaaatgtctacagataatgcggtttatcagtgtcgtaaattacgagccagattgcctagaccggatactagacatctgagagtattgtttagtattttttataaagattattgggtaagtttaaaaaagaccaatgataaatggttagatattaataatgataaagatatagatattagtaaattaacaaattttaaacaactaaacagtacgacggatgctgaagcgtgttatatatacaagtctggaaaactggttaaaacagtatgtaaaagtactcaatctgtactatgtgttaaaaaattctacaagtgacaacaaaaaatgaattaataataagtcgttaacgtacgccgccatggacgccgcgtttgttattactccaatgggtgtgttgactataacagatacattgtatgatgatctcgatatctcaatcatggactttataggaccatacattataggtaacataaaaactgtccaaatagatgtacgggatataaaatattccgacatgcaaaaatgctactttagctataagggtaaaatagttcctcaggattctaatgatttggctagattcaacatttatagcatttgtgccgcatacagatcaaaaaataccatcatcatagcatgcgactatgatatcatgttagatatagaagataaacatcagccattttatctattcccatctattgatgtttttaacgctacaatcatagaagcgtataacctgtatacagctggagattatcatctaatcatcaatccttcagataatctgaaaatgaaattgttgtttaattcttcattctgcatatcagacggcaatggatggatcataattgatgggaaatgcaatagtaattttttatcataaaagttgtaaagtaaataataaaacaataaatattgaactagtagtacgtatattgagcaatcagaaatgatgctggtacctcttatcacggtgaccgtagttgcgggaacaatattagtatgttatatattatatatttgtaggaaaaagatacgtactgtctataatgacaataaaattatcatgacaaaattaaaaaagataaagagttctaattccagcaaatctagtaaatcaactgatagcgaatcagactgggaggatcactgtagtgctatggaacaaaacaatgacgtagataatatttctaggaatgagatattggacgatgatagcttcgctggtagtttaatatgggataacgaatccaatgtcatggcgcctagcacagaacacatttacgatagtgttgctggaagcacgctgctaataaataatgatcgtaatgaacagactatttatcagaacactacagtagtaattaatgagacggagactgttgaagtacttaatgaagataccaaacagaatcctaactattcatccaatcctttcgtaaattataataaaaccagtatttgtagcaagtcaaatccgttcattacagaactcaacaataaatttagtgagaataatccgtttagacgagcacatagcgatgattatcttaataagcaagaacaagatcatgaacacgatgatatagaatcatcggtcgtatcattggtgtgattagtttcctttttataaaattgaagtaatatttagtattattgctgccgtcacgttgtacaaatggagatattccctgtattcggcatttctaaaattagcaattttattgctaataatgactgtagatattatatagatacagaacatcaaaaaattatatctgatgagatcaatagacagatggatgaaacggtacttcttaccaacatcttaagcgtagaagttgtaaatgacaatgagatgtaccatcttattccccatagactatcgactattatactctgtattagttctgtcggaggatgtgttatctctatagataatgacatcaatgacaaaaatattctaacatttcccattgatcatgctgtaatcatatccccactgagtaaatgtgtcgtagttagcaagggtcctacaaccatattggttgttaaagcggatatacccagcaaacgattggtaacatcgtttacaaacgacatactgtatgtaaacaatctgtcactgattaattatttgccgttgtctgtattcattattagacgagtcaccgactatttggatagacacatatgcgatcagatatttgcgaataataagtggtattccattataaccatcgacgataagcaatatcctattccatcaaactgtataggtatgtcctctgccaagtacataaattctagcatcgagcaagatactttaatacatgtttgtaacctcgagcatccattcgacttagtatacaaaaaaatgcagtcgtacaattctgtacctatcaaggaacaaatattgtacggtagaattgataatataaatatgagcattagtatttctgtggattaatagatttctagtatggggatcattaatcatctctaatctctaaatacctcataaaacgaaaaaaaagctattatcaaatactgtacggaatggattcattctcttctctttttatgaaactctgttgtatatctactgataaaactggaagcaaaaaatctgataaaaagaataagaataagatcaaggattatatggaacacgattattataaaataacaatagttcctggttcctcttccacgtctactagctcgtggtattatacacatgcctagtaatagtctctttgcgttgacggaaagcagactagaaataacaggctaaaatgttcagacaccataatagttcccaacccagataataacagagtaccatcaacacattcctttaaactcaatcccaaacccaaaaccgttaaaatgtatccggccaattgatagtagataatgaggtgtacagcgcatgataatttacacagtaaccaaaatgaaaatactttagtaattataagaaatatagatggtaacgtcatcatcaacaatccaataatatgccggagagtaaacattgacggataaaacaaaaatgctccgcataactctatcatggcaataacacaaccaaatacttgtaagattcctaaattagtagaaaatacaacggatatcgatgtataagtgatctcgagaaataataagaataaagtaatgcccgtaaagataaacatcaacattgtttggtaatcattaaaccaattagtatgaagttgaactaatttcacagtagattttattccagtgttatcctcgcatgtatacgtacctggtaagatatctttatattctataatcaatgagacatcactatccgataacgaatgaagtctagcactagtatgccatttacttaatatggtcgtcttggaagttttattataagttaaaatatcatggttgtccaatttccatctaatatactttgtcggattatctatagtacacggaataatgatggtattattacatgctgtatactctatagtctttgtagatgttataatcataaaagtacagaggtatatcaacgatattctaactcttgacattttttatttatttaaaatgatacctttgttatttattttattctattttgctaacggtatcgaatggcataagtttgaaacgagtgaagaaataatttctacttacttattagacgacgtattatacacgggtgttaatggggcggtatacacattttcaaataataaactaaacaaaactggtttagctaatactaattatatcacaacatctataaaagtagaggatgcggataaggatacattagtatgcggaaccaataacggaaatcccaaatgttggaaaatagacggttcagacgacccaaaacatagaggtagaggatacgctccttatcaaaatagcaaagtaacgataatcagtcacaacggatgtgtactatctgacataaacatatcaaaagaaggaattaaacgatggagaagatttgacggaccatgtggttatgatttatacacggcggataacgtaattccaaaagatggtttacgaggagcattcgtcgataaagatggtacttatgacaaagtttacattcttttcactgatactatcggctcaaagagaattgtcaaaattccgtatatagcacaaatgtgcctaaacgacgaaggtggtccatcatcattgtctagtcatagatggtcgacgtttctcaaagtcgaattagaatgtgatatcgacggaagaagttatagacaaattattcattctagaactataaaaacagataatgatacgatactatatgtattcttcgatagtccgcattatgtacctattctatgaataccattaaacaatctttttctacgtcaaaattggaaggatatacaaagcaattgccgtctccagctcctggtatatgtctaccagctggaaaagttgttccacataccacgtttgaagtcatagaaaaatataatgtactagatgatattataaagcctttatctaaccaacctatcttcgaaggaccgtctggtgttaaatggttcgatataaaggagaaggaaaatgaacatcgggaatatagaatatacttcataaaagaaaattctatatattcgttcgatacaaaatctaaacaaactcgtagctcgcaagtcgatgcgcgactattttcagtaatggtaacttcgaaaccgttatttatagcagatatagggataggagtaggaatgccacaaatgaaaaaaatacttaaaatgtaatcttaatcgagtacaccacacgacaatgaacaaacataagacagattatgctggttatgcttgctgcgtaatatgcggtctaattgttggaattatttttacagcgacactattaaaagttgtagaacgtaaattagttcatacaccatcaatagataaaacgataaaagatgcatatattagagaagattgtcctactgactggataagctataataataaatgtatccatttatctactgatcgaaaaacctgggaggaaggacgtaatgcatgcaaagctctaaatccaaattcggatctaattaagatagagactccaaacgagttaagttttttaagaagcattagacgcggatattgggtaggagaatccgaaatattaaaccagacaaccccatataattttatagctaagaatgccacgaagaatggaactaaaaaacggaaatatatttgtagcacaacgaatactcccaaactgcattcgtgttacactatataacaattacactacatttttatcataccactacttcggttagatgttttagaaaaaaataaatatcgccgtaccgttcttgtttttataaaaataacaattaacaattatcaaattttttctttaatattttacgtggttgaccattcttggtggtaaaataatctcttagtgttggaatggaatgctgtttaatgtttccacactcatcgtatattttgacgtatgtagtcacatcgtttacgcaatagtcagactgtagttctatcatgcttcctacattagaaggaggaacagttttaaagtctcttggttttaatctattaccgttagttttcatgaaatcctttgttttatccacttcacattttaaataaatgtccactatacattcttctgttaattttactagatcgtcatgggtcatagaatttataggttccgtagtccatggatccaaactagcaaacttcgcgtatacggtatcgcgattagtgtatacaccaactgtatgaaaattaagaaaacagtttaatagatcaacagaaatatttaatcctccgtttgatacagatgcaccatatttatggattttggattcacacgttgtttgtctgaggggttcgtctagcgttgcttctacataaacttctattcccatatattctttattgtcagaatcgcataccgatttatcatcatacactgtttgaaaactaaatggtatacacatcaaaataacaaatactaacgagtacattctgcaatattgttatcgtaattggaaaaatagtgttcgagtgagttggattatgtgagtattggattgtatattttattttatattttgtaataagaataaaatgctaatgtcaagtttattccaatagatgtcttattaaaaacatatataataaataacaatggctgaatggcataaaattatcgaggatatctcaaaaaataataagttcgaggatgccgccatcgttgattacaagactacaaagaatgttctagctgctattcctaacagaacatttgccaagattaatccgggtgaaattattcctctcatcactaatcgtaatattctaaaacctcttattggtcagaaatattgtattgtatatactaactctctaatggatgagaacacgtatgctatggagttgcttactgggtacgcccctgtatctccgatcgttatagcgagaactcataccgcacttatatttttgatgggtaagccaacaacatccagacgtgacgtgtatagaacgtgtagagatcacgctacccgtgtacgcgcaactggtaattaaaataaaaagtaatattcatatgtagtgtcaattttaaatgatgatgatgaaatggataatatccatattgacgatgtcaataatgccggtattggcatacagctcatcgatttttagatttcattcagaggatgtggaattatgttatgggcatttgtattttgataggatctataatgtagtaaatataaaatataatccgcatattccatatagatataattttattaatcgcacgttaaccgtagatgaactagacgataatgtcttttttacacatggttattttttaaaacacaaatatggttcacttaatcctagtttgattgtctcattatcaggaaacttaaaatataatgatatacaatgctcagtaaatgtatcgtgtctcattaaaaatttggcaacgagtacatctactatattaacatctaaacataagacttattctctacatcggtccacgtgtattactataataggatacgattctattatatggtataaagatataaatgacaagtataatggcatctatgattttactgcaatatgtatgctaatagcgtctacattgatagtgaccatatacgtgtttaaaaaaataaaaatgaactcttaattatgctatgctattagaaatggataaaatcaaaattacggttgattcaaaaattggtaatgttgttaccatatcgtataacttggaaaagataactattgatgtcacacctaaaaagaaaaaagaaaaggatgtattattagcgcaatcagttgctgtcgaagaggcaaaagatgtcaaggtagaagaaaaaaatattatcgatattgaagatgacgatgatatggatgtagaaagcgcataatacgatctataaaaataagtatataaatactttttatttactgtactcttactgtgtagtggtgataccctactcgattatttttttaaaaaaatacttattctgattcttctagccatttccgtgttcgttcgaatgccacatcgacgttaaagataggggagtagttgaaatctagttctgcattgttggtacgcacctcaaatgtagtgttggatatcttcaacgtatagttgttgagtagtgatggttttctaaatagaattctcttcatatcattcttgcacgcgtacatttttagcatccatcttggaattctagatccttgttctattcccaatggtttcatcaatagaagattaaacatatcgtacgaacacgatggagagtaatcgtagcaaaagtaagcatttcctttaatctcagatcccggatactggatatattttgcagccaacacgtgcatccatgcaacatttcctacatatacccggctatgcaccgcgtcatcatcgactgtacgatacataatgttaccgtgttgcttacattgctcgtaaaagactttcgtcaatttgtctccttctccgtaaattccagtgggtcttaggcaacaagtatacaattttgctccattcatgattacggaattattggctttcataaccagttgctcggccatacgtttactttttgcgtatacatgtcctggtgatatatcataaagggtatgctcatggccgatgaatggatcaccgtgtttatttggtcctattgcttccatgctactagtatagatcaaatacttgattcctaggtccacacaagctgccaatatagtctgtgttccataatagtttactttcatgatttcattatcggtgtattttccaaatacatccactagagcagccgtatgaataatcagatttaccccatctagcgcttctctcaccttatcaaagtcgtttatatcacattgtatatagtttataaccttaactttcgaggttattggttgtggatcttctacaatatctatgactctgatttcttgaacatcatctgcactaattaacagttttactatatacctgcctagaaatccggcaccaccagtaaccgcgtacacggccattgctgccactcataatatcagactacttattctattttactaaataatggctgtttgtataatagaccacgataatatcagaggagttatttactttgaaccagtccatggaaaagataaagttttaggatcagttattggattaaaatccggaacgtatagtttgataattcatcgttacggagatattagtcaaggatgtgattccataggcagtccagaaatatttatcggtaacatctttgtaaacagatatggtgtagcatatgtttatttagatacagatgtaaatatatctacaattattggaaaggcgttatctatttcaaaaaatgatcagagattagcgtgtggagttattggtatttcttacataaatgaaaagataatacattttcttacaattaacgagaatggcgtttgatatatcagttaatgcgtctaaaacaataaatgcattagtttacttttctactcagcaaaataaattagtcatacgtaatgaagttaatgatacacactacactgtcgaatttgatagggacaaagtagttgacacgtttatttcatataatagacataatgacaccatagagataagaggggtgcttccagaggaaactaatattggttgcgcggttaatacgccggttagtatgacttacttgtataataagtatagttttaaactgattttagcagaatatataagacacagaaatactatatccggcaatatttattcggcattgatgacactagatgatttggctattaaacagtatggagacattgatctattatttaatgagaaacttaaagtagactccgattcgggactatttgactttgtcaactttgtaaaggatatgatatgttgtgattctagaatagtagtagctctatctagtctagtatctaaacattgggaattgacaaataaaaagtataggtgtatggcattagccgaacatatatctgatagtattccaatatctgagctatctagactacgatacaatctatgtaagtatctacgcggacacactgagagcatagaggataaatttgattattttgaagacgatgattcgtctacatgttctgccgtaaccgacagggaaacggatgtataattttttttatagcgtgaaggatatgataaaaaatataattgttgtatttatcccattccaatcaccttatatgattctgtaacacaatgaaggagtctcatagatgtatagaggtcagatactggtttgataaactgtttattccacatgagtatgtttgactttatggttagacccgcatactttaacaaatcactgaaaattggagttaggtattgacctctcagaatcagttgccgttctggaacattaaatgtattttttatgatatactccaacgcatttatgtgggcatacaacaagtcattactaatggagtattccaagagttttagttgtctagtatttaacaagagaagagatttcaacagactgtttatgaactcgaatgccgcctcattgtcgcttatattgatgatgtcgaattctcccaatatcatcaccgatgagtagctcatcttgttatcgggatccaagttttctaaagatgtcattaaaccctcgatcatgaatggatttatcatcatcgtttttatgttggacatgagcttagtccgtttgtccacatctatagacgacgatttctgaattattttatatatccctctctttaactccaggaacttgtcaggatggtctactttaatatgttctcgtctaagagatgaaaatctttggatggttgcacgcgacttttctctaaaggatgacgttgcccaagatcctctcttaaatgaatccatcttatccttggacaagatggacagtctattttccttagatggtttaatatttttgttacccatgatctataaaggtagacctaatcgtctcggatgacctatatatttattttcagttttattatacgcataaattgtaaaaaatatgttaggtttacaaaaatgtctcgtggggcattaatcgtttttgaaggattggacaaatctggaaaaacaacacaatgtatgaacatcatggaatctataccggcaaacacgataaaatatcttaactttcctcagagatccactgtcactggaaagatgatagatgactatctaactcgtaaaaaaacctataatgatcatatagttaatctattattttgtgcaaatagatgggagtttgcatcttttatacaagaacaactagaacagggaattactttaatagttgatagatacgcgttctctggagtagcgtatgccgccgctaaaggcgcgtcaatgactctcagtaagagttatgaatctggattgcctaaacccgacttagttatattcttggaatctggtagcaaagaaattaatagaaacgtcggcgaggaaatttatgaagatgttacattccaacaaaaggtattacaagaatataaaaaaatgattgaagaaggagatattcattggcaaattatttcttctgaattcgaggaagatgtaaagaaggagttgattaagaatatagttatagaggctatacacacggttactggaccagtggggcaactgtggatgtaatagtgaaattacattttttataaatagatgttagtacagtgttataaatggatgaagcatattactctggcaacttggaatcagtactcggatacgtgtccgatatgcataccgaactcgcatcaatatctcaattagttattgccaagatagaaactatagataatgatatattaaacaaggacattgtaaattttatcatgtgtagatcaaacttggataatccatttatctctttcctagatactgtatatactattatagatcaagagaactatcagaccgaattgattaattcattagacgacaatgaaattatcgattgtatagttaataagtttatgagcttttataaggataacctagaaaatatagtagatgctatcattactctaaaatatataatgaataatccagattttaaaactacgtatgccgaagtactcggttccagaatagccgatatagatattaaacaagtgatacgtgagaatatactacaattgtctaatgatatccgcgaacgatatttgtgaaaaatattaaaaaaaaatactttttttattaaatgacgtcgcttcgcgaatttagaaaattatgctgtgatatatatcacgcatcaggatataaagaaaaatctaaattaattagagactttataacagatagggatgataaatatttgatcattaagctattgcttcccggattagacgatagaatttataacatgaacgataaacaaattataaaattatatagtataatatttaaacaatctcaggaagatatgctacaagatttaggatacggatatataggagacactattaggactttcttcaaagagaacacagaaatccgtccacgagataaaagcattttaactttagaagacgtggatagtttcttaactacgttatcatccgtaactaaagaatcgcatcaaataaaattattgactgatatcgcatccgtttgtacatgtaatgatttaaaatgtgtagtcatgcttattgataaagatctaaaaattaaagcgggtcctcggtacgtacttaacgctattagtcctaatgcctatgatgtgtttagaaaatctaataacttgaaagagataatagaaaatgcatctaaacaaaatctagactctatatctatttctgttatgactccaattaatcccatgttagcggaatcgtgtgattctgtcaataaggcgtttaaaaaatttccatcaggaatgtttgcggaagtcaaatacgatggtgaaagagtacaagttcataaaaataataacgagtttgccttctttagtagaaacatgaaaccagtactctctcataaagtggattatctcaaagaatacataccgaaagcatttaaaaaagctacgtctatcgtattggattctgaaattgttcttgtagacgaacataatgtaccgctcccgtttggaagtttaggaatacacaaaaagaaagaatataaaaactctaacatgtgtttgttcgtgtttgactgtttgtactttgatggattcgatatgacggacattccattgtacgaacgaagatcttttctcaaagatgttatggttgaaatacccaatagaatagtattctcagagttgacgaatattagtaacgagtctcagttaactgacgtattggatgatgcactaacgagaaaattagaaggattggtcttaaaagatattaatggagtatacgaaccgggaaagagaagatggttaaaaataaagcgagactatttgaacgagggttccatggcagattctgccgatttagtagtactaggtgcttactatggtaaaggagcaaagggtggtatcatggcagtctttctaatgggttgttacgacgatgaatccggtaaatggaagacggttaccaagtgttcaggacacgatgataatacgttaagggttttgcaagaccaattaacgatggttaaaattaacaaggatcccaaaaaaattccagagtggttggtagttaataaaatctatattcccgattttgtagtagaggatccgaaacaatctcagatatgggaaatttcaggagcagagtttacatcttccaagtcccataccgcaaatggaatatccattagatttcctagatttactaggattagagaagataaaacgtggaaagaatctactcatctaaacgatttagtaaacttgactaaatcttaatagttacatacaaactgaaaattaaaataacactatttagttggtggtcgccatggatggtgttattgtatactgtctaaacgcgttagtaaaacatggcgaggaaataaatcatataaaaaatgatttcatgattaaaccatgttgtgaaagagtttgtgaaaaagtcaagaacgttcacattggcggacaatctaaaaacaatacagtgattgcagatttgccatatatggataatgcggtatccgatgtatgcaattcactgtataaaaagaatgtatcaagaatatccagatttgctaatttgataaagatagatgacgatgacaagactcctactggtgtatataattattttaaacctaaagatgttattcctgttatcatatctataggaaaggataaagatgtctgtgaactattaatctcatcagacatatcgtgtgcatgcgtggagttaaattcatatcacgtagccattcttcccatggatgtttccttttttaccaaaggaaatgcatcattgattattctcctgtttgatttctctatcgatgcagcacctctcttaagaagtgtaaccgataataatgttattatatctagacaccagcgtctacatgacgagcttccgagttccaattggttcaagttttacataagtataaagtccgactattgttctatattatatatggttgttgatggatctgtgatgcatgcgatagctgataatagaactcacgcaattattagcaaaaatatattagacaatactacgattaacgatgagtgtagatgctgttattttgaaccacagattaggattcttgatagagatgagatgctcaatggatcatcgtgtgatatgaacagacattgtattatgatgaatttacctgatgtaggcaaatttggatctagtatgttggggaaatatgaacctgacatgattaagattgctctttcggtggctggtaatttaataagaaatcgagactacattcccgggagacgaggatatagctactacgtttacggtatagcctctagataatttttttaagcacgaaataaaaaacataattttaaaccaatctatttcatactattttgtgtgatcaccatggacataaagatagatattagtatttctggtgataaatttacggtgactactaggagggaaaatgaagaaagaaaaaaatatctacctctccaaaaagaaaaaactactgatgttatcaaacctgattatcttgagtacgatgacttgttagatagagatgagatgtttactattctagaggaatattttatgtacagaggtctattaggcctcagaataaaatatggacgactctttaacgaaattaaaaaattcgacaatgatgcggaagaacaattcggtactatagaagaactcaagcagaaacttagattaaattctgaagagggagcagataactttatagattatataaaggtacaaaaacaggatatcgtcaaacttactgtatacgattgcatatctatgataggattgtgtgcatgcgtggtagatgtttggagaaatgagaaactgttttctagatggaaatattgtttacgagctattaaactgtttattaatgatcacatgcttgataagataaaatctatactgcagaatagactagtatatgtggaaatgtcatagaaagttaaaagttaatgagagcaaaaatatataaggttgtattccatatttgttattttttctgtaatagttagaaaaatacattcgatggtctatctaccagattattatgtgttataaggtactttttctcataataaactagagtatgagtaagatagtgtttttcaaaacatataaatctaaaattgatggatgagatatacagctattaatttcgaaaatatattttaatctgataactttaaacatggatttttgatggtggtttaacgttttaaaaaaagattttgttattgtagtatatgataatattaaaagatggatataaagaatttgctgactgcatgtactattttttacattactacattggctacggcagatatacctactccgccaccaacgggtcatgtgacaagggagaatatcttgataagaggcataatcaatgttgtaatcggtgtccacctggagaatttgccaaggttagatgtaatggtaacgataacacaaaatgtgaacgctgcccacctcatacatataccacaatcccaattattctaatggatgtcatcaatgtagaaaatgcccaaccggatcatttgataaggtaaagtgtaccggaacacagaacagtaaatgttcgtgtcttcctggttggtattgtgctactgattcttcacagactgaagattgttgaaattgtgtaccaaaaaggagatgtccatgcggatactttggtggaatagatgaacaaggaaatcctatttgtaaatcgtgttgtgttggtgaatattgcgactacctacgtaattatagacttgatccatttcctccatgcaaactatctaaatgtaattaattatgattttgatgataatgttaccatacattatatcgctacttggttagtgtattattcagtatgaagacctattaataattacttatcttttgacgatcttgttataattataatataaaaatacttatggcatagtaactcataattgctgacgcgataaattcgtaataatctgttttgttcaaatttttataaggaatctacaggcataaaaataaaaatataatttataatatactcttacagcgcgccatcatgaataacagcagtgaattgattgctgttattaatggatttagaaatagtggacgattttgtgatattagtatagttattaatgatgaaaggataaacgctcataaactcatcctatctggagcctccgaatatttttccattctgttttccaataattttatcgattctaatgaatacgaagttaatctaagtcatttagattatcaaagcgttaacgatttgatcgattacatttatgggatacctttgagcctaactaacgataacgtgaaatatattctttcaaccgctgattttttacaaattggatctgctattacggagtgtgaaaattacatacttaaaaatctttgttctaaaaactgtatcgatttctacatatacgctgataaatataataacaagaaaatagaatcagcgtcgtttaacacaatattacaaaatattttgagactcatcaacgatgaaaactttaaatacttaacagaggaatcaatgataaaaattttaagcgatgatatgttaaatataaaaaatgaggattttgcaccactaattctcattaaatggttagagagtactcaacaatcatgcaccgtcgagttacttagatgcctcagaatatcattgctttccccacaagttataaaatcactttatagtcatcaactggttagttcaatctacgaatgtataacattcttaaacaatatagcattcttggatgaatcatttcctagataccatagcatcgagttgatatctatcggtataagtaattcgcatgataagatttccataaactgctacaatcataaaaaaaatacatgggaaatgatatcttcacgtagatataggtgtagtttcgcagtggccgtcctggataatattatctatatgatgggtggatatgatcagtccccgtatagaagttcaaaggttatagcgtacaatacatgtacaaattcttggatatatgatataccagagctaaaatatcctcgttctaattgtgggggactggctgatgacgaatacatttattgtataggcggcatacgcgatcaggattcatcgttgacatctagtattgataaatggaagccatcaaaaccatattggcagaagtatgctaaaatgcgcgaaccaaaatgtgatatgggggttgcgatgttaaacggattaatatatgtcatgggtggaatcgttaaaggtgacacgtgtaccgacgcactagagagtttatcagaagatggatggatgaagcatcaacgtcttccaataaaaatgtccaatatgtcgacgattgttcatgatggcaagatttatatatctggaggttacaacaatagtagtgtagttaatgtaatatcgaatctagtccttagctataatccgatatatgatgaatggaccaaattatcatcattaaacattcctagaattaatcccgctctatggtcagcgcataataaattatatgtaggaggaggaatatctgatgatgttcgaactaatacatctgaaacatacgataaagaaaaagattgttggacattggataatggtcacgtgttaccacgcaattatataatgtataaatgcgaaccgattaaacataaatatccattggaaaaaacacagtacacgaatgattttctaaagtatttggaaagttttataggtagttgatagaacaaaatacataattttgtaaaaataaatcactttttatactaatatgacacgattaccaatacttttgttactaatatcattagtatacgctacaccttttcctcagacatctaaaaaaataggtgatgatgcaactctatcatgtaatcgaaataatacaaatgactacgttgttatgagtgcttggtataaggagcccaattccattattcttttagctgctaaaagcgacgtcttgtattttgataattataccaaggataaaatatcttacgactctccatacgatgatctagttacaactatcacaattaaatcattgactgctagagatgccggtacttatgtatgtgcattctttatgacatcaactacaaatgacactgataaagtagattatgaagaatactccacagagttgattgtaaatacagatagtgaatcgactatagacataatactatctggatctacacattcaccggaaactagttctaagaaacctgattatatagataattctaattgctcgtcggtattcgaaatcgcgactccggaaccaattactgataatgtagaagatcatacagacaccgtcacatacactagtgatagcattaatacagtaagtgcatcatctggagaatccacaacagacgagactccggaaccaattactgataaagaagatcatacagttacagacactgtctcatacactacagtaagtacatcatctggaattgtcactactaaatcaaccaccgatgatgcggatctttatgatacgtacaatgataatgatacagtaccaccaactactgtaggcggtagtacaacctctattagcaattataaaaccaaggactttgtagaaatatttggtattaccgcattaattatattgtcggccgtggcaattttctgtattacatattatatatataataaacgttcacgtaaatacaaaacagagaacaaagtctagatttttgacttacataaatgtctgggatagtaaaatctatcatattgagcggaccatctggtttaggaaagacagccatagccaaaagactatgggaatatatttggatttgtggtgtcccataccactagatttcctcgtcctatggaacgagaaggtgttgattaccattacgttaacagagaggccatctggaagggaatagccgccggaaactttctagaacatactgagtttttaggaaatatttacggaacttctaaaacagctgtgaatacagcggctattaataatcgtatttgtgtgatggatctaaacatcgacggtgttagaagtcttaaaaatacgtacctaatgccttactcggtgtatataagacctacctctcttaaaatggttgagaccaagcttcgttgtagaaacactgaagctaacgatgagattcatcgtcgcgtgatattggcaaaaacggatatggatgaggccaacgaagcaggtctattcgacactattatcattgaagatgatgtgaatttagcatatagtaagttaattcagatactacaggaccgtattagaatgtattttaacactaattagagacttaagacttaaaacttgataattaataatataactcgtttttatatgtggctatttcaacgtctaatgtattagttaaatattaaaacttaccacgtaaaacttaaaatttaaaatgatatttcattgacagatagatcacacattatgaactttcaaggacttgtgttaactgacaattgcaaaaatcaatgggtcgttggaccattaataggaaaaggtggattcggtagtatttatactactaatgacaataattatgtagtaaaaatagagcccaaagctaacggatcattatttaccgaacaggcattttatactagagtacttaaaccatccgttatcgaagaatggaaaaaatctcacaatataaagcacgtaggtcttatcacgtgcaaggcatttggtctatacaaatccattaatgtggaatatcgattcttggtaattaatagattaggtgcagatctagatgcggtgatcagagccaataataatagattaccaaaaaggtcggtgatgttgatcggaatcgaaatcttaaataccatacaatttatgcacgagcaaggatattctcacggagatattaaagcgagtaatatagtcttggatcaaatagataagaataaattatatctagtggattacggattggtttctaaattcatgtctaatggagaacatgttccatttataagaaatccaaataaaatggataacggtactctagaatttacacctatagattcgcataaaggatacgttgtatctagacgtggagatctagaaacacttggatattgtatgattagatggttgggaggtatcttgccatggactaagatatctgaaacaaagaattgtgcattagtaagtgccacaaaacagaaatatgttaacaatactgcgactttgttaatgaccagtttgcaatatgcacctagagaattgctgcaatatattaccatggtaaactctttgacatattttgaggaacccaattatgacgagtttcggcacatattaatgcagggtgtatattattaagtgtggtgtttggtcgatgtaaaatttttgtcgataaaaattaaaaaataacttaatttattattgatctcgtgtgtacaaccgaaatcatggcgatgttttacgcacacgctctcggtgggtacgacgagaatcttcatgcctttcctggaatatcatcgactgttgccaatgatgtcaggaaatattctgttgtgtcagtttataataacaagtatgacattgtaaaagacaaatatatgtggtgttacagtcaggtgaacaagagatatattggagcactgctgcctatgtttgagtgcaatgaatatctacaaattggagatccgatccatgatcaagaaggaaatcaaatctctatcatcacatatcgccacaaaaactactatgctctaagcggaatcgggtacgagagtctagacttgtgtttggaaggagtagggattcatcatcacgtacttgaaacaggaaacgctgtatatggaaaagttcaacatgattattctactatcaaagagaaggccaaagaaatgaatgcacttagtccaggacctatcattgattaccacgtctggataggagattgtatctgtcaagttactgctgtggacgtacatggaaaggaaattatgagaatgagattcaaaaagggtgcggtgcttccgatcccaaatctggtaaaagttaaacttggggagaatgatacagaaaatctttcttctactatatcggcggcaccatcgaggtaaccacctctctggaagacagcgtgaataatgtactcatgaaacgtttggaaactatacgccatatgtggtctgtcgtatatgatcattttgatattgtgaatggtaaagaatgctgttatgtgcatacgcatttgtctaatcaaaatcttataccgagtactgtaaaaacaaatttgtacatgaagactatgggatcatgcattcaaatggattccatggaagctctagagtatcttagcgaactgaaggaatcaggtggatggagtcccagaccagaaatgcaggaatttgaatatccagatggagtggaagacactgaatcaattgagagattggtagaggagttcttcaatagatcagaacttcaggctggtgaatcagtcaaatttggtaattctattaatgttaaacatacatctgtttcagctaagcaactaagaacacgtatacggcagcagcttcctttatactctcatcttttaccaacacaaagggtggatatttgttcattggagttgataataatacacacaaagtaattggattcacggtgggtcatgactacctcagactggtagagaatgatatagaaaagcatatcaaaagacttcgtgttgtgcatttctgtgagaagaaagaggacatcaagtacacgtgtcgattcatcaaggtatataaacctggggatgaggctacctcgacatacgtgtgcgctatcaaagtggaaagatgctgttgtgctgtgtttgcagattggccagaatcatggtatatggatactaatggtatcaagaagtattctccagatgaatgggtgtcacatataaaattttaattaatgtaatagagaacaaataataaggttgtaatatcatatagacaataactaacaattaattagtaactgttatctcttttttaactaaccaactaactatatacctattaatacatcgtaattatagttcttaacatctattaatcattaattcgcttctttaattttttataaactaacattgttaattgaaaagggataacatgttacagaatataaattatatatggatttttttaaaaaggaaatacttgactggagtatatatttatctcttcattatatagcacgcgtgttttccaatttttccacatcccatataatacaggattataatctcgttcgaacatacgagaaagtggataaaacaatagttgattttttatctaggttgccaaatttattccatattttagaatatggggaaaatattctacatatttattctatggatgatgctaatacgaatattataattttttttctagatagagtattaaatattaataagaacgggtcatttatacacaatctcaggttatcatcatccattaatataaaagaatatgtatatcaattagttaataatgatcatccagataataggataagactaatgcttgaaaatggacgtagaacaagacattttttgtcctatatatcagatacagttaatatctatatatgtattttaataaatcatggattttatatagatgccgaagacagttacggttgtacattattacatagatgtatatatcactataagaaatcagaatcagaatcatacaatgaattaattaagatattgttaaataatggatcagatgtagataaaaaagatacgtacggaaacacaccttttatcctattatgtaaacacgatatcaacaacgtggaattgtttgagatatgtttagagaatgctaatatagactctgtagactttaatagatatacacctcttcattatgtctcatgtcgtaataaatatgattttgtaaagttattaatttctaaaggagcaaatgttaatgcgcgtaatagattcggaactactccattttattgtggaattatacacggtatctcgcttataaaactatatttggaatcagacacagagttagaaatagataatgaacatatagttcgtcatttaataatttttgatgctgttgaatctttagattatctattatccagaggagttattgatattaactatcgtactatatacaacgaaacatctatttacgacgctgtcagttataatgcgtataatacgttggtctatctattaaacagaaatggtgattttgagacgattactactagtggatgtacatgtatttcggaagcagtcgcaaacaacaacaaaataataatggaagtactattgtctaaacgaccatctttgaaaattatgatacagtctatgatagcaattactaaacataaacagcataatgcagatttattgaaaatgtgtataaaatatactgcgtgtatgaccgattatgatactcttatagatgtacagtcgctacagcaatataaatggtatattttaaaatgtttcgatgaaatagatatcatgaagagatgttatataaaaaataaaactgtattccaattagttttttgtatcaaagacattaatactttaatgagatacggtaaacatccttctttcgtgaaatgcactagtctcgacgtatacggaagtcgtgtacgtaatatcatagcatctattagatatcgtcagagattaattagtctattatccaagaagctggatcctggagataaatggtcgtgttttcctaacgaaataaaatataaaatattggaaaactttaacgataacgaactatccacatatctaaaaatcttataaacactattaaaatataaaatctaagtaggataaaatcacactacatcattgtttccttttagtgctcgacagtgtatactatttttaacactcataaataaaaatgaaaacgatttccgttgttacgttgttatgcgtactacctgctgttgtttattcaacatgtactgtacccactatgaataacgctaaattaacgtctaccgaaacatcgtttaatgataaacagaaagttacgtttacatgtgatcagggatatcattcttcggatccaaatgctgtctgcgaaacagataaatggaaatacgaaaatccatgcaaaaaaatgtgcacagtttctgattacatctctgaattatataataaaccgctatacgaagtgaattccaccatgacactaagttgcaacggcgaaacaaaatattttcgttgcgaagaaaaaaatggaaatacttcttggaatgatactgttacgtgtcctaatgcggaatgtcaacctcttcaattagaacacggatcgtgtcaaccagttaaagaaaaatactcatttggggaatatatgactatcaactgtgatgttggatatgaggttattggtgcttcgtacataagttgtacagctaattcttggaatgttattccatcatgtcaacaaaaatgtgatatgccgtctctatctaatggattaatttccggatctacattttctatcggtggcgttatacatcttagttgtaaaagtggttttacactaacggggtctccatcatccacatgtatcgacggtaaatggaatcccgtactcccaatatgtgtacgaactaacgaagaatttgatccagtggatgatggtcccgacgatgagacagatttgagcaaactctcgaaagacgttgtacaatatgaacaagaaatagaatcgttagaagcaacttatcatataatcatagtggcgttaacaattatgggcgtcatatttttaatctccgttatagtattagtttgttcctgtgacaaaaataatgaccaatataagttccataaattgctaccgtaaatataaatccgttaaaataatgaataattaataacgaacaagtatcaaaagattaaagaattatagctagaatcaattgagatgtcttcttcagtggatgttgatatctacgatgccgttagagcatttttactcaggcactattataacaagagatttattgtgtatggaagaagtaacgccatattacataatatatacaggctatttacaagatgcgccgttataccgttcgatgatatagtacgtactatgccaaatgaatcacgtgttaaacaatgggtgatggatacacttaatggtataatgatgaatgaacgcgatgtttctgtaagcgttggcaccggaatactattcatggaaatgtttttcgattacaataaaaatagtatcaacaatcaactaatgtatgatataattaatagcgtatctataattctagctaatgagagatatagaagcgcttttaacgacgatggtatatacatccgtagaaatatgattaacaagttgtacggatacgcatctctaactactattggcacgatcgctggaggtgtttgttattatctgttgatgcatctagttagtttgtataaataattatttcaatatactagttaaaattttaagattttaaatgtataaaaaactaataacgtttttatttgtaataggtgcattagcatcctattcgaataatgagtacactccgtttaataaactgagtgtaaaactctatatagatggagtagataatatagaaaattcatatactgatgataataatgaattggtgttaaattttaaagagtacacaatttctattattacagagtcatgcgacgtcggatttgattccatagatatagatgttataaacgactataaaattattgatatgtataccattgactcgtctactattcaacgcagaggtcacacgtgtagaatatctaccaaattatcatgccattatgataagtacccttatattcacaaatatgatggtgatgagcgacaatattctattactgcagagggaaaatgctataaaggaataaaatatgaaataagtatgatcaacgatgatactctattgagaaaacatactcttaaaattggatctacttatatatttgatcgtcatggacatagtaatacatattattcaaaatatgatttttaaaaatttaaaatatattatcacttcagtgacagtagtcaaataacaaacaacaccatgagatatattataattctcgcagttttgttcattaatagtatacacgctaaaataactagttataagtttgaatccgtcaattttgattccaaaattgaatggactggggatggtctatacaatatatcccttaaaaattatggcatcaagacgtggcaaacaatgtatacaaatgtaccagaaggaacatacgacatatccgcatttccaaagaatgatttcgtatctttctgggttaaatttgaacaaggcgattataaagtggaagagtattgtacgggactatgcgtcgaagtaaaaattggaccaccgactgtaacattgactgaatacgacgaccatatcaatttgtacatcgagcatccgtatgctactagaggtagcaaaaagattcctatttacaaacgcggtgacatgtgtgatatctacttgttgtatacggctaacttcacattcggagattctaaagaaccagtaccatatgatatcgatgactacgattgcacgtctacaggttgcagcatagactttgtcacaacagaaaaagtgtgcgtgacagcacagggagccacagaagggtttctcgaaaaaattactccatggagttcgaaagtatgtctgacacctaaaaagagtgtatatacatgcgcaattagatccaaagaagatgttcccaatttcaaggacaaaatggccagagttatcaagagaaaatttaataaacagtctcaatcttatttaactaaatttctcggtagcacatcaaatgatgttaccacttttcttagcatgcttaacttgactaaatattcataactaatttttattaatgatacaaaaacgaaataaaactgcatattatacactggttaacgcccttataggctctaaccattttcaagatgaggtccctgattatagtccttctgttcccctctatcatctactccatgtctattagacaatgtgagaagactgaagaggaaacatggggattgaaaatagggttgtgtataattgccaaagatttctatcccgaaagaactgattgcagtgttcatctcccaactgcaagtgaaggattgataactgaaggcaatggattcagggatatacgaaacaccgataaattataaaaaaagcaatgtgtccgctgtttccgttaataatactattttcgtaactggcggattattcataaataactctaatagcacgatcgtggttaacaatatggaaaaacttgacatttataaagacaaacaatggtcgattatagaaatgcctatggctagggtatatcacggcatcgactcgacatttggaatgttatattttgccggaggtctatccgttaccgaacaatatggtaatttagagaaaaacaacgagatatcttgttacaatcctagaacgaataagtggtttgatatttcatatactatttataagatatccatatcatcattgtgtaaactaaataacgtcttctatgtatttagtaaggacattggatatgtggaaaagtatgatggtgcatggaagttagtacatgatcgtctccccgctataaaggcattatcaacttctccttattgattgaaaatgaaaatataaatagtttttatgtatagcagtattaccctatagttttattgcttactactaacatggatacagatgttacaaatgtagaagatatcataaatgaaatagatagagagaaagaagaaatactaaaaaatgtagaaattgaaaataataaaaacattaacaagaatcatccaagtggatatattagagaagcactcgttattaataccagtagtaatagtgattccattgataaagaagttatagaatgtatctgtcacgatgtaggaatatagatcatatctactaatttttataatcgatacaaaacataaaaaacaactcgttattacatagcaggcatggaatccttcaagtattgttttgataacgatggcaagaaatggattatcggaaatactttatattctggtaattcaatactatataaggtcagaaaaaatttcactagttcgttctacaattacgtaatgaagatagatcacaaatcacacaagccattgttgtctgaaatacgattctatatatctgtattggatcctttgactatcgacaactggacacgggaacgtggtataaagtatttggctattccagatctgtatggaattggagaaaccgatgattatatgttcttcgttataaagaatttgggaagagtattcgccccaaaggatactgaatcagtcttcgaagcatgcgtcactatgataaacacgttagagtttatacactctcaaggatttacccatggaaaaatagaaccgaggaatatactgattagaaataaacgtctttcactaattgactattctagaactaacaaactatacaagagtggaaactcacatatagattacaacgaggacatgataacttcaggaaatatcaattatatgtgtgtagacaatcatcttggagcaacagtttcaagacgaggagatttagaaatgttgggatattgcatgatagaatggttcggtggcaaacttccatggaaaaacgaaagtagtataaaagtaataaaacaaaaaaaagaatataaaaaatttatagctactttctttgaggactgttttcctgaaggaaatgaacctctggaattagttagatatatagaattagtatacacgttagattattctcaaactcctaattatgacagactacgtaaactgtttatacaagattgaaattatattcttttttttatagagtgtggtagtgttacggatatttaatattagactatctctatcgcgctacacgaccaatatcgattactatggatatcttcagggaaatcgcatcttctatgaaaggagagaatgtattcatttctccagcgtcaatctcgtcagtattgacaatactgtattatggagctaatggatccactgctgaacagctatcaaaatatgtagaaaaggaggagaacatggataaggttagcgctcaaaatatctcattcaaatccataaataaagtatatgggcgatattctgccgtgtttaaagattcctttttgagaaaaattggcgataagtttcaaactgttgacttcactgattgtcgcactatagatgcaatcaacaagtgtgtagatatctttactgaggggaaaatcaatccactattggatgaaccattgtctcctgatacctgtctcctagcaattagtgccgtatactttaaagcaaaatggttgacgccattcgaaaaggaatttaccagtgattatcccttttacgtatctccgacggaaatggtagatgtaagtatgatgtctatgtacggcaaggcatttaatcacgcatctgtaaaggaatcattcggcaacttttcaatcatagaactgccatatgttggagatactagtatgatggtcattcttccagacaagattgatggattagaatccatagaacaaaatctaacagatacaaattttaagaaatggtgtaactctctggaagctacgtttatcgatgttcacattcccaagtttaaggtaacaggctcgtataatctggtggatactctagtaaagtcaggactgacagaggtgttcggttcaactggagattatagcaatatgtgtaattcagatgtgagtgtcgacgctatgatccacaaaacgtatatagatgtcaatgaagagtatacagaagcagctgcagcaacttgtgcactggtgtcagactgtgcatcaacaattacaaatgagttctgtgtagatcatccgttcatctatgtgattaggcatgttgatggaaaaattcttttcgttggtagatattgctctccgacaactaattgttaaccattttttttaaaaaatagaaaaaacatgtggtattagtgcaggtcgttattcttccaattgcaattggtaagatgacggccaactttagtacccacgtcttttcaccacagcactgtggatgtgacagactgaccagtattgatgacgtcagacaatgtttgactgaatatatttattggtcgtcctatgcataccgcaacaggcaatgcgctggacaattgtattccacactcctctcttttagagatgatgcggaattagtgttcatcgacattcgcgagctggtaaaaaatatgccgtgggatgatgtcaaagattgtgcagaaatcatccgttgttatataccggatgagcaaaaaaccatcagagagatttcggccatcatcggactttgtgcatatgctgctacttactggggaggtgaagaccatcccactagtaacagtctgaacgcattgtttgtgatgcttgagatgctcaattacgtggattataacatcatattccggcgtatgaattgatgagttgtacatcttgacattttcttctttcttctcttctccctttcccagaaacaaactttttttacccactataaaataaaatgagtatactacctgttatatttctttctatatttttttattcttcattcgttcagacttttaacgcgcctgaatgtatcgacaaagggcaatattttgcatcattcatggagttagaaaacgagccagtaatcttaccatgtcctcaaataaatacgctatcatccggatataatatattagatattttatgggaaaaacgaggagcggataatgatagaattataccgatagataatggtagcaatatgctaattctgaacccgacacaatcagactctggtatttatatatgcattaccacgaacgaaacctactgtgacatgatgtcgttaaatttgacaatcgtgtctgtctcagaatcaaatatagatcttatctcgtatccacaaatagtaaatgagagatctactggcgaaatggtatgtcccaatattaatgcatttattgctagtaacgtaaacgcagatattatatggagcgggcatcgacgccttagaaataagagacttaaacaacggacacctggaattattaccatagaagatgttagaaaaaatgatgctggttattatacatgtgttttagaatatatatacggtggcaaaacatataacgtaaccagaattgtaaaattagaggtacgggataaaataataccttctactatgcaattaccagatggcattgtaacttcaataggtagtaatttgactattgcatgcagagtatcgttgagacctcccacaacggatgcagacgtcttttggataagtaatggtatgtattacgaagaagatgatggggacggaaacggtagaataagtgtagcaaataaaatctatatgaccgataagagacgtgttattacatcccggttaaacattaatcctgtcaaggaagaagatgctacaacgtttacgtgtatggcgtttactattcctagcatcagtaaaacagttactgttagtataacgtgaatgtatgttgttacatttccatgtcaattgagtttataagaatttttatacattatcttccaacaagcaattgacgaacgtattgctatgattaactcccacgatactatgcatattattaatcattaacttgcagactatacctagagctattttgacatactcgtgttcttgtgtaattgcagtatctatattattaaagtacgtaaatctagctatagttttattatttaattttagataatataccgtctccttatttttaaaaattgccacatcctttattaaatcatgaatgggaatttctatgtcatagttaatatattgtgaacaacaagagcagatatctataggaaagggtggaatgcgatacattgatctatgtagttttaaaacacacgcaaactttgaagaatttatataaatcattccatcgatacatccttctatgttgagatgtatatatccaggaattcgtttattaatatcgggaaatgtataaactaaaacattgcccggaagcggagcttctaccggagttatatcagtttttaacttacaaaatgtaaccaatacctttgcatgacttgttttgttcggcaacgttagtttaaacttgacgaatggattaattacaatagcatgatccgcgcatctattaagtttttttactttaacgcccttgtatgtttttacagagactttatctaaatttctagtgcttgtatgtgttataaatataacgggatatagaactgaatcacctaccttagatacccaattacattttatcagatccagataataaacaaattttgtcgccctaactaattctatattgttatatattttacaattggttatgatatcatgtaataacttggaatctaacgcacatcgtcgtacgtttatacaattgtgatttagtgtagtatatctacacatgtatttttccgcgctatagtattctggactagtgataaaactatcgttatatctgtcttcaatgaactcatcgagatattgctctctgtcatattcatacacctgcataaactttctagacatcttacaatccgtgttattttaggatcatatttacatatttacgggtatatcaaagatgttagattagttaatgggaatcgtctataataatgaatattaaacaattatatgaggacttttaccacaaagcatcataaaaatgagtcgtcgtctgatttatgttttaaatatcaaccgcgaatcaactcataaaatacaagagaatgaaatatatacatattttagtcattgcaatatagaccatacttctacagaacttgattttgtagttaaaaactatgatctaaacagacgacaacctgtaactgggtatactgcactacactgctatttgtataataattactttacaaacgatgtactgaagatattattaaatcatggagtggatgtaacgatgaaaaccagtagcggacgtatgcctgtttatatattgcttactagatgttgcaatatttcacatgatgtagtgatagatatgatagacaaagataaaaaccacttattacatagagactattccaacctattactagagtatataaaatctcgttacatgttattaaaggaagaggatatcgatgagaacatagtatccactttattagataagggaatcgatcctaactttaaacaagacggatatacagcgttacattattattatttgtgtctcgcacacgtttataaaccaggtgagtgtagaaaaccgataacgataaaaaaggccaagcgaattatttctttgtttatacaacatggagctaatctaaacgcgttagataattgtggtaatacaccattccatttgtatcttagtattgaaatgtgtaataatattcatatgactaaaatgctgttgacttttaatccgaatttcgaaatatgtaataatcatggattaacgcctatactatgttatataacttccgactacatacaacacgatattcttgttatgttaatacatcactatgaaacaaatgttggagaaatgccgatagatgagcgtcgtataatcgtattcgagtttatcaaaacatattctacacgtcctgcagattcgataacttatttgatgaataggtttaaaaatatagatatttatacccgctatgaaggaaagacattattacacgtagcatgtgaatataataatacacacgtaatagattatcttatacgtatcaacggagatataaatgcgttaaccgacaataacaaacacgctacacaactcattatagataacaaagaaaattccccatataccattaattgtttactgtatatacttagatatattgtagataagaatgtgataagatcgttggtggatcaacttccatctctacctatcttcgatataaaatcatttgagaaattcatatcctactgtatacttttagatgacacattttacaatagacacgttaggaatcgcgattctaaaacgtatcgatacgcattttcaaaatacatgtcgtttgataaatacgatggtataataactaaatgtcataaagaaacaatattgctcaaactatccactgttctagacactacactatatgcagttttaagatgccataattcgaaaaagttaagaagatacctcaccgagttaaaaaaatataataacgataagtcctttaaaatatattctaatattatgaatgagagataccttaatgtatattataaagatatgtacgtgtcaaaggtatatgataaactatttcctgttttcacagataaaaattgtctactaacattactaccttcagaaattatatacgaaatattatacatgctgacaattaacgatctttataatatatcgtatccacctaccaaagtatagttgtatttttctcatgcgatgtgtgtaaaaaaactgatattatataaatattttagtgccgtataataaagatgacgatgaaaatgatggtacatatatatttcgtatcattattgttattgctattccacagttacgccatagacatcgaaaatgaaatcacagaattcttcaataaaatgagagatactctaccagctaaagactctaaatggttgaatccagcatgtatgttcggaggcacaatgaatgatatagccgctctaggagagccattcagcgcaaagtgtcctcctattgaagacagtcttttatcgcacagatataaagactatgtggttaaatgggaaaggctagaaaaaaatagacggcgacaggtttctaataaacgtgttaaacatggtgatttatggatagccaactatacatctaaattcagtaaccgtaggtatttgtgcaccgtaactacaaagaatggtgactgtgttcagggtatagttagatctcatattagaaaacctccttcatgcattccaaaaacatatgaactaggtactcatgataagtatggcatagacttatactgtggaattctttacgcaaaacattataataatataacttggtataaagataataaggaaattaatatcgacgacattaagtattcacaaacgggaaaggaattaattattcataatccagagttagaagatagcggaagatacgactgttacgttcattacgacgacgttagaatcaagaatgatatcgtagtatcaagatgtaaaatacttacggttataccgtcacaagaccacaggtttaaactaatactagatccaaaaatcaacgtaacgataggagaacctgccaatataacatgcactgctgtgtcaacgtcattattgattgacgatgtactgattgaatgggaaaatccatccggatggcttataggattcgattttgatgtatactctgttttaactagtagaggcggtattaccgaggcgaccttgtactttgaaaatgttactgaagaatatataggtaatacatataaatgtcgtggacacaactattattttgaaaaaacccttacaactacagtagtattggagtaaatatacaatgcatttttatatacattactgaataattattattattatttatatcgtatttgtgctataacgcgactatctaggtatttgtatctcaccgatagagaacatataaatgtagactctattaaacagttgtgtaaaatatcagatcctaatgcatgttatagatgtggatgtacggctttacatgagtacttttataattatagatcagtcaacggaaaatacaagtatagatacaacggttactatcaatattatttatctagcgattatgaaaattataatgaatattattatgatgattatgatagaactggtatgaacagtgagagtgataatatatcaatcaaaacagaatatgaattctatgatgaaacacaagatcaaagtacacaactagtaggttacgacattaaactcaaaaccaatgaggatgattttatggctatgatagatcagtgggtgtccatgattatatagatgaatcaattaataaagtagtatatggaagagagtctcacgtaagatggcgggatatatggcaagaacataatgatggcgtatacagtataggaaaggagtgcatagataatatatacgaagacaaccataccgtagacgaattctacaagatagacagcgtatcagatgtagatgacgcggaacacatatctccgataactaatgatgtatctacacaaacatgggaaaagaaatcagagttagatagatacatggaaatgtatcctcgtcatagatatagtaagcattctgtctttaagggattttctgacaaagttagaaaaaatgatttagacatgaatgtggtaaaagaattactttctaacggtgcatctctaacaattaaggatagcagtaataaggatccaataaccgtttattttcgaagaacgataatgaatttagaaatgattgatgaacgaaagtatatagtacactcctatctaaaaaattataaaaatttcgattatccatttttcaggaagttagttttgactaataaacattgtctcaacaattattataatataagcgacagcaaatatggaacaccgctacatatattggcgtctaataaaaaattaataactcctaattacatgaagttattagtgtataacggaaatgatataaacgcacgaggtgaagatacacaaatgcgaactccattacacaaatatttgtgtaaatttgtatatcataatattgaatatggtatccgatactataatgaaaagattatagacgcatttatagagttaggagccgatctaactattccaaatgacgatggaatgataccagtagtttactgtatacactcaaatgccgaatatggttataacaatattactaacataaagataatacgtaaactacttaatcttagtagacgtgcgtcacataatctatttagagatcgagtcatgcacgattatataagtaatacatatattgatcttgagtgtttagatattattagatcgttggatggattcgatatcaatggttactttgaaggacgtacaccacttcattgcgctatacaacataacttcactcagattgctaagtacttattagatcgaggagctgatatagtcgtacccaacacattgattatacatcagtacatacagtaaatagcatagatatggaggaggatacaaatatttcaaataaagttataaggtacaacactgtcaataatatatgggaaacattacctaacttctggactggaactataaatccaggcgtggtctcgcataaagatgatatatatgttgtatgcgacatcaaagatgaaaaaaatgttaaaacttgtatatttagatataacacgaatacgtataacggatgggaattggtcacgacgacagaaagcagattatcagctctgcatactattctttataacaataccataatgatgttacattgttatgaatcgtatatgttacaagatacatttaatgtgtacactcgcgaatggaatcatatgtgtcatcaacattcgaatagttatatcatgtacaatatactacccatctactaaatataatagaataaaataaatgagtatgatcattttagataacgattgattttatcattaccgcttcattcttatattctttgcttacggaacctatatttagaaacatctactaacgattttttatgcttgcattattaatggtatgtaatatgattgattgtgtacgcaataccaatttgttaagtatgaatacggggtacaaacataaactgaagtttaacattatttatttatgatatatatcgttattgtttggtctataccatggatatctttaaagaactaatcttaaaacacacggatgaaaatgttttgatttctccagtttctattttatctactttatctattctaaatcatggagcagctggttctacagctgaacaactatcaaaatatatagagaatatgaatgagaatacacccgatgacaataatgacatggacgtagatattccgtattgtgcgacactagctaccgcaaataaaatatacggtagcgatagtatcgagttccacgcctccttcctacaaaaaataaaagacgattttcaaactgtaaactttaataatgctaaccaaacaaaggaactaatcaacgaatgggttaagacaatgacaaatggtaaaattaattccttattgactagtccgctatccattaatactcgtatgacagttgttagcgccgtccattttaaagcaatgtggaaatatccattttctaaacatcttacatatacagacaagttttatatttctaagaatatagttaccagtgttgatatgatggtgagcactgagaataacttgcaatatgtacatattaatgaattattcggaggattctctattatcgatattccatacgagggaaactctagtatggtaattatactaccggacgacatagaaggtatatataacatagaaaaaaatataacagatgaaaaatttaaaaaatggtgtggtatgttatctactaaaagtatagacttgtatatgccaaagtttaaagtggaaatgacagaaccgtataatctggtaccgattttagaaaatttaggacttactaatatattcggatattatgcagattttagcaagatgtgtaatgaaactatcactgtagaaaaatttctacatacgacgtttatagatgttaatgaggagtatacagaagcatcggccgttacaggagtatttatgactaacttttcgatggtatatcgtacgaaggtctacataaaccatccattcatgtacatgattaaagacaacacaggacgtatactttttatagggaaatactgctatccgcaataaatataaacaaatagacttttatcacgtttatctatgtctaaatattacaaatagtaatagtataaactaaagctgataatacttaaaaaaataataatatcatttacaattaatagtataaactaaaaattaaacaaatcgttattataagtaatatcaaaatgatgatatacggattaatagcgtgtcttatattcgtgacttcatccatcgctagtccactttatattcccgttattccacccatttcggaagataaatcgttcaatagtgtagaggtattagtttccttgtttagagatgaccaaaaagactatacggtaacttctcagttcaataactacactatcgataccaaagactggactatcggcgtactatccacacctgatggtttggatataccattgactaatataacttattggtcacggtttactataggtcgtgcattgttcaaatcagagtctgaggatattttccaaaagaaaatgagtattctaggtgtttctatagaatgtaagaagtcgtcgacattacttacttttttgaccgtgcgtaaaatgactcgagtatttaataaatttccagatatggcttattatcgaggagactgtttaaaagccgtttatgtaacaatgacttataaaaatactaaaactggagagactgattacacgtacctctctaatggggggttgcctgcatactatcgtaatggggtcgatggttgattattgattagtatattccttattctttttattcacacaaaaagaacatttttataaacatgaaaccactgtctaaatgtaattatgatcttgatttatagatgaagatcagcctttagaggattttaaccagtatgtttaatatgaaaaaaataaacataacatattttgagattaagcgctattgtgcaagattatattagaatcaaattaatctttcatacgagaaaaataacgacatacgtcgtcaacaaattaaactttttatttattagttaactagcttatagaacttgctcattgttatgtttctaaaacgggtacgacatataggacaattatccgacgcaccggtttctcttcgtgttttatgccatatattgatgcatgttatgcaaaatatatgagtacacgaatccaataaaccaaagtatctatcgttttgagtaaacaacttcatagcaaattccacattctttttctttacttactctatacacgtcctcgtatttatccagtattttgatgatatccaactcagaaatggttgttgtattattgggtgtattgggagtataggtattattagctatgtaccaatttaccaaccctcttaatattgattgaacaatcacatcggttatccaatcaataaccacattaataactaaattgtagtgtatatatagaccatatatgtttctatttttttgacagttacgtatagtttcagtaagttttgattgttgtattcctgtatctctagataagttagtcatatagtcccttccggcgatacgttttttccaagcccgaaattgattagccaaatgtgtatttatttttgtgatattgatataatatgtaatgttattaatatttcggataatgcatactgttagtcttatatcatttggttcatctatgtattgtaatattgttacatgatctatagatgatgtattgattttggcaggatcgaattccatatccgcgactaaacagtgaaaaaaatgtaaatactttttaaattttaaattagtaaaacttttttttattttttatgattccaaaaatactgaatacaaagtcctaaattataaatatggagatcatactaccacaacttattattatgcatactcagccggtgtaatagatagatatatataattctattacaccggcagacaattaccgatcggtatttgtcgttaccaacataccgtataatatgtaatatacaattccataacccattgacagttgttatacatcaaaattgcaattcttttgattacgatgttataagaatgtagttaattgatgtatgatgttaatgtgtcctctttcctcttataacatcgtaatcaaaaacttttttataatatatacctaataatgtgtcttaatagttctcgtgattcgtcaaacaatcattcttataaaatataataaagcaacgtaaaacacataaaaataagcgtaactaataagacaatggatatttacgacgataaaggtctacagactattaaactgtttaataatgaatttgattgtataaggaatgacatcagagaattatttaaacatgtaactgattccgatagtatacaacttccgatggaagacaattctgatattatagaaaatatcagaaaaatactatatagacgattaaaaaatgtagaatgtgttgacatcgatagtacaataacttttatgaaatacgatccaaatgatgataataagcgtacgtgttctaattgggtacccttaactaataactatatggaatattgtctagtaatatatttggaaacaccgatatgtggaggcaaaataaaattataccaccctacaggaaatataaagtcggataaggatattatgtttgcaaagactctagactttaaatcaaagaaagtgttaactggacgtaaaacaattgccgttctagacatatccgtttcatataatagatcaatgactactattcactacaacgacgacgttgatatagatatacatactgataaaaatggaaaagagttatgttattgttatataacaatagatgatcattacttggttgatgtggaaactataggagttatagtcaatagatctggaaaatgtctgttagtaaataaccatctaggtataggtatcgttaaagataaacgtataagcgatagttttggagatgtatgtatggatacaatatttgacttttctgaagcacgagagttattttcattaactaatgatgataacaggaatatagcatgggacactgataaactagacgatgatacagatatatggactcccgtcacagaagatgattacaaatttctttctagactagtattgtatgcaaaatctcaatcggatactgtattcgactattatgttcttactggtgatacggaaccacccactgtattcattttcaaggtaactagattttactttaatatgccgaaataaaaaatttttgtataatatctagaggtagaggtattgtttagataaatacaaataacatagatacatcgcatacttagcatttttataaatatacataagacatacactttatacattttttttgtaaaaatactcataaaaaaatttataaaaattatggcacaaccatatcttgtataggtagtttagttcgtcgagtgaacctataaacagataatagacaacacgtaataataataatgcctactaatacaagcataataccgggagatgggatatatgacgttgtagtgtttgggttttctgaacgttgatagtctactaatactacatgctgacatctaatgcctgtataaccatgagagcatctacaatacataccgtcaatatctctagcgtggatacagtcaccgtgtaaacaatatccatctccctctggaccgcataatctgatagctggaatatctgttgtagcgtttgtaatttctggcgatgtcgtttcgatagcgttaccactatcggcgaatgatctgattatcatagcagcgaacaacaacatcagatatttcatcgacatttttgatggattttgtgtttatgctgtttctcagtgtgtgtttatgacaagattgggaattttatattattaattcagtaatataaactaataatatattgttaattgtgtaaataatataaaaataacaatacaatattgaatgtgttgctgttaaaaatgatcataaacacggagtttattttatatgtctcgcataaacattactaaaaaaatatattgttctgtttttctttcacatctttaattatgaaaaagtaaatcattatgagatggacgagattgtacgcatcgttcgcgacagtatgtggtacatacctaacgtatttatggacgacggtaagaatgaaggtcacgtttctgtcaacaatgtctgtcatatgtatttcacgttctttgatgtggatacatcgtctcatctgtttaagctagttattaaacactgcgatctgaataaacgaggtaactctccattacattgctatacgatgaatacacgatttaatccatctgtattaaagatattgttacaccacggcatgcgtaactttgatagcaaggatgaaaaaggacaccactatcaatcgataacaagatctttgatatactaacggacaccattgatgactttagtaaatcatccgatctattgctgtgttatcttagatataaattcaatgggagcttaaactattacgttctgtacaaaggatccgacgaggatgaactcacttctcttcattactactgtaaacacatatccacgttctacaaaagcaattattacaagttaagtcacactaagatgcgagccgagaagcgattcatctacgcgataatagattatggagcaaacattaacgcggttacacacttaccttcaacagtataccaaacatagtcctcgtgtggtgtatgctcttttatctcgaggagccgatacgaggatacgtaataatcttgattgtacacccatcatggaacgattgtgcaacaggtcatattctcataatgttactcaattggcacgaacaaaaggaagaaggacaacatctactttatctattcataaaacataatcaaggatacactctcaatatactacggtatctactagataggttcgacattcagaaagacgaatactataataccgcctttcaaaattgtaacaacaatgttgcctcatacatcggatacgacatcaaccttccgactaaagacggtattcgacttggtgtttgaaaacagaaacatcatatacaaggcggatgttgtgaatgacatcatccaccacagactgaaagtatctctacctatgattaaatcgttgttctacaagatgtctctccctacgacgattactacgtaaagaagataatagcctactgcctattaagggacgagtcattcgcggaactacatagtaaattctgtttaaacgaggactataaaagtgtatttatgaaaaatatatcattcgataagatagattccatcatcgtgacataagtcgccttaaagagattcgaatctccgacaccgacctgtatacggtatcacagctatcttaaagccatacattcagacagtcacatttcatttcccatgtacgacgatctcatagaacagtgccatctatcgatggagcgtaaaagtaaactcgtcgacaaagcactcaataaattagagtctaccatcggtcaatctagactatcgtatttgcctccggaaattatgcgcaatatcatctaaacagtatgttgtacgaaaagaaccattacaaatattatccatgatagaaagaaaatatctatatgattggagaagtaggaaacaggaacaagacgacgattactacattattaaatcatgaagtccgtattatactcgtatatattgtttctctcatgtataataataaacggaagagatatagcaccgcatgcaccatccgatggaaagtgtaaagacaacgaatacaaacgccataatttgtgtccgggaacatacgcttccagattatgcgatagcaagactaacacacaatgtacgccgtgtggttcgggtaccttcacatctcgcaataatcatttacccgcttgtctaagttgtaacggaagacgcgaccgtgtaacacgactcacaatagaatctgtgaatgctctcccggatattattgtcttctcaaaggatcatccggatgcaaggcatgtgtttcccaaacaaaatgtggaataggatacggagtatccggagacgtcatctgttctccgtgtggtctcggaacatattctcacaccgtctcttccgcagataaatgcgaacccgtacccagtaatacctttaactatatcgatgtggaaattaatctgtatccagttaacgaccactaccggtctcagcgaatccatctcaacgtcggaactaactattactatgaatcataaagactgtaatcccgtatttcgtgaggaatacttctccgtccttaataaggtagcaacttcaggtttctttacaggagaaaggtgtgcactctgaatttcgagattaaatgcaataacaaaaatttttcctccaaacagttaacgaaagcaaagaatgatgacggtatcatgccgcattcggagactgtctatctagcgtcgacatctatatactatatagtaataccaatactcaagactacgaaactgatacaatctcttatcatgtgggtaatgttctcgatgtcgatagccatatgcccggtagttgcgatatacataaactgatcactaattccaaacccacccgctttttatagtaagtttttcacccataaataataaatacaataattaatttctcgtaaaagtagaaaatatattctaatttattgcacggtaaggaagtagaatcataaagaacagtactcaatcaatagcaatcatgaaacaatatatcgtcctggcatgcatgtgcctgccagtcttcagcaatcatcctcatcctcctcctcgtgtacggaagaagaaaacaaacatcatatgggaatcgatgttattatcaaagtcacaaagcaagaccaaacaccgaccaatgataagatttgccaatccgtaacggaaattacagagtccgagtcagatccagatcccgaggtggaatcagaagatgattccacatcagtcgaggatgtagatcctcctaccacttattactccatcatcggtggaggtctgagaatgaactttggattcaccaaatgtcctcagattaaatccatctcagaatccgctgatggaaacacagtgaatgctagattgtccagcgtgtccccaggacaaggtaaggactctcccgcgatcactcatgaagaagctctggctatgatcaaagactgtgaggtgtctatcgacatcagatgtagcgaagaagagaaagacagcgacatcaagacccatccagtactcgggtctaacatctctcataagaaagtgagttacgaagatatcatcggttcaacgatcgtcgatacaaaatgtgtcaagaatctagagtttagcgttcgtatcggagacatgtgcaaggaatcatctgaacttgaggtcaaggatggatttaagtatgtcgacggatcggcatctgaaggtgcaaccgatgatacttcactcatcgattcaacaaaactcaaagcgtgtgtctgaatcgataactctattcatctgaaattggatgagtagggttaatcgaacgattcaggcacaccacgaattaaaaaagtgtaccggacactatattccggtttgcaaaacaaaaatgttcttaactacattcacaaaaagttacctctcgcgacttcttctttttctgtctcaatagtgtgatacgattatgacactattcctattcctattcctatttcctttcagggtatcacaaaaatattaaacctctttctgatggtctcataaaaaaagttttacaaaaatatttttattctctttctctctttgatggtctcataaaaaaagttttacaaaaatatttttattctctttctctctttgatggtctcataaaaaaagttttacaaaaatatttttattctctttctctctttgatggtctcataaaaaaagttttacaaaaatatttttattctctttctctctttgatggtctcataaaaaaagttttacaaaaatatttttattctctttctctctttgatggtctcataaaaaaagttttacaaaaatatttttattctctttctctctttgatggtctcataaaaaaagttttacaaaaatatttttattctctttctctctttgatggtctcataaaaaaagttttacaaaaatatttttattctctttctctctttgatggtctcataaaaaatattaaacctctttctgatggtgtcactaaaatatttttattctcattctcattttctctttctctcttcaatggagtcataaaatatttttattctctttctctcttcgatggtctcacaaaaatattaaacctctttctgatggtgtcactaaaatatttttattctcattctcattttctctttctctcttcaatggagtcataaaatatttttattctctttctctcttcgatggtctcacaaaaatattaaacctctttctgatggagtcgtaaaaaagttttatctctttctctcttcgatggtctcacaaaaatattaaacctctttctgatggagtcgtaaaaaagttttatctctttctctcttcgatggtctcacaaaaatattaaacctctttctgatggagtcgtaaaaaagttttatctctttctctcttcgatggtctcacaaaaatattaaacctctttctgatggagtcgtaaaaaagttttatctctttctctcttcgatggtctcacaaaaatattaaacctctttctgatggagtcgtaaaaaagttttatctctttctctcttcgatggtctcacaaaaatattaaacctctttctgatggagtcgtaaaaaagttttatctctttctctcttcgatggtctcacaaaaatattaaacctctttctgatggagtcgtaaaaaagttttatctctttctctcttcgatggtctcacaaaaatattaaacctctttctgatggagtcgtaaaaaagttttatctctttctctcttcgatggtctcacaaaaatattaaacctctttctgatggagtcgtaaaaaagttttatctctttctctcttcgatggtctcacaaaaatattaaacctctttctgatggagtcgtaaaaaagttttatctctttctctcttcgatggtctcacaaaaatattaaacctctttctgatggagtcgtaaaaaagttttatctctttctctcttcgatggtctcacaaaaatattaaacctctttctgatggagtcgtaaaaaagttttatctctttctctcttcgatggtctcacaaaaatattaaacctctttctgatggagtcgtaaaaaagttttatctctttctctcttcgatggtctcacaaaaatattaaacctctttctgatggagtcgtaaaaaagttttatctctttctctcttcgatggtctcacaaaaatattaaacctctttctgatggagtcgtaaaaaagttttatctctttctctcttcgatggtctcacaaaaatattaaacctctttctgatggagtcgtaaaaaagttttatctctttctctcttcgatggtctcacaaaaatattaaacctctttctgatggagtcgtaaaaaagttttatctctttctctcttcgatggtctcacaaaaatattaaacctctttctgatggagtcgtaaaaaagttttatctctttctctcttcgatggtctcactaaaatattttttattctctttctgatgcatcaactatttcttaaacaataacgtccaacaacatatactcgtcgagcttatcaacatcccctatgcccatctaggttaccagacaattgtatatcataaaataatgtttataatttacacgttaaaatcatataataaaacgtagatcgtataatattttttggtatataaatgatctagtaaaatccatgtaggggatactgctcacattttttctttggtacaaaatttcacacaagtttttatacagacaaattcttgtccatatattttaaaacattgacttttgtactaagaaaaatatctagatcaactatctctttctctttctctcttcgatggtctcacaaaaatattaaacctctttctgatggagtcgtaaaaaagttttatctctttctctcttcgatggtctcacaaaaatattaaacctctttctgatggagtcgtaaaaaagttttatctctttctctcttcgatggtctcacaaaaatattaaacctctttctgatggagtcgtaaaaaagttttatctctttctctcttcgatggtctcacaaaaatattaaacctctttctgatggagtcgtaaaaaagttttatctctttctctcttcgatggtctcacaaaaatattaaacctctttctgatggagtcgtaaaaaagttttatctctttctctcttcgatggtctcacaaaaatattaaacctctttctgatggagtcgtaaaaaagttttatctctttctccttcgatggtctcacaaaaatattaaacctctttctgatggagtcgtaaaaaagttttatctctttctctcttcgatggtctcacaaaaatattaaacctctttctgatggagtcgtaaaaaagttttatctctttctctcttcgatggtctcacaaaaatattaaacctctttctgatggagtcgtaaaaaagttttatctctttctccttcgatggtctcacaaaaatattaaacctctttctgatggagtcgtaaaaaagttttatctctttctccttcgatggtctcacaaaaatattaaacctctttctgatggagtcgtaaaaaagttttatctctttctctcttcgatggtctcacaaaaatattaaacctctttctgatggagtcgtaaaaaagttttatctctttctctcttcgatggtctcacaaaaatattaaacctctttctgatggtctctataaagcgatcgatctttcttacactctagagtttcctacagtcatgggtcacacatttttttctagacactaaataaaattagtaaaattaaattaattataaaattatatatataatttactaactttagttagataaattaataatatataagttttagtacattaatattatattttaaat

SEQ ID NO: 63 - DNA, 191737 bp, Vaccinia virus
  Copenhagen strain
gtaaaattaaattaattataaaattatgtatatgatttactaactttagttagataagttagtaatacataaattttagtatattaatattatattttaaatatttatttagtgtctagaaaaaaatgtgtgaccaacgaccgtaggaaactctagagggtaagaaaaatcaatcgctttatagagaccatcagaaagaggtttaatatttttgtgagaccatcgaaggagaaagagataaaacttttttacgactccatcagaaagaggtttaatatttttgtgagaccatcgaaggagaaagagataaaacttttttacgactccatcagaaagaggtttaatatttttgtgagaccatcgaaggagaaagagataaaacttttttacgactccatcagaaagaggtttaatatttttgtgagaaaggagaaagagataaaacttttttacgactccatcagaaagaggtttaatatttttgtgagaccatcgaaggagaaagagataaaacttttttacgactccatcagaaagaggtttaatatttttgtgagaccatcgaaggagaaagagataaaacttttttacgactccatcagaaagaggtttaatatttttgtgagaccatcgaaggagaaagagataaaacttttttacgactccatcagaaagaggtttaatatttttgtgagaccatcgaaggagactccatcagaaagaggtttaatatttttgtgagaaaggagaaagagataaaacttttttacgactccatcagaaagaggtttaatatttttgtgagaaaggagaaagagataaaacttttttacgactccatcagaaagaggtttaatatttttgtgagaccatcgaaggagaaagagataaaacttttttacgactccatcagaaagaggtttaatatttttgtgagaccatcgaaggagaaagagataaaacttttttacgactccatcagaaagaggtttaatatttttgtgagaccatcgaagagagaaagagataaaacttttttacgactccatcagaaagaggtttaatatttttgtgagaccatcgaagagagaaagagataaaacttttttacgactccatcagaaagaggtttaatatttttgtgagaccatcgaagagagaaagagataaaacttttttacgactccatcagaaagaggtttaatatttttgtgagaccatcgaagagagaaagagataaaacttttttacgactactccatcagaaagaggtttaatatttttgtgagaccatcgaagagagaaagagataaaacttttttacgactccatcagaaagaggtttaatatttttgtgagaccatcgaagagagaaagagataaaacttttttacgactccatcagaaagaggtttaatatttttgtgagaccatcgaagagagaaagagataaaacttttttacgactccatcagaaagaggtttaatatttttgtgagaccatcgaagagagaaagagataaaacttttttacgactccatcagaaagaggtttaatatttttgtgagaccatcgaagagagaaagagataaaacttttttacgactccatcagaaagaggtttaatatttttgtgagaccatcgaagagagaaagagataaaacttttttacgactccatcagaaagaggtttaatatttttgtgagaccatcgaagagagaaagagataaaacttttttacgactccatcagaaagaggtttaatatttttgtgagaccatcgaagagagaaagagataaaacttttttacgactccatcagaaagaggtttaatatttttgtgagaccatcgaagagagaaagagataaaacttttttacgactccatcagaaagaggtttaatatttttgtgagaccatcgaagagagaaagagataaaacttttttacgactccatcagaaagaggtttaatatttttgtgagaccatcgaagagagaaagagataaaacttttttacgactccatcagaaagaggtttaatatttttgtgagaccatcgaagagagaaagagataaaacttttttacgactccatcagaaagaggtttaatatttttgtgagaccatcgaagagagaaagagataaaacttttttacgactccatcagaaagaggtttaatatttttgtgagaccatcgaagagagaaagagataaaacttttttacgactccatcagaaagaggtttaatatttttgtgagaccatcgaagagagaaagagataaaacttttttacgactccatcagaaagaggtttaatatttttgtgagaccatcgaagagagaaagagataaaacttttttacgactccatcagaaagaggtttaatatttttgtgagaccatcgaagagagaaagagataaaacttttttacgactccatcagaaagaggtttaatatttttgtgagaccatcgaagagagaaagagataaaacttttttacgactccatcagaaagaggtttaatatttttgtgagaccatcgaagagagaaagagataaaacttttttacgactccatcagaaagaggtttaatatttttgtgagaccatcgaagagagaaagataaaacttttttacgactccatcagaaagaggtttaatatttttgtgagaccatcgaagagagaaagagataaaacttttttacgactccatcagaaagaggtttaatatttttgtgagaccatcgaagagagaaagagataaaacttttttacgactccatcagaaagaggtttaatatttttgtgagaccatcgaagagagaaagagaaagagatagttagtctagatatttttcttagtacaaaagtcaatgttttaaaatatatggacaagaatttgtctgtataaaaacttgtgtgaaattttgtaccaaagaaaaaatgtgagcagtatcccctacatggattttactagatcatttatataccaaaaaatattatacgatctacgttttattatatgattttaacgtgtaaattataaacattattttatgatatacaattgtctggtaacctagatgggcataggggatgttgataagctcgacgagtatatgttgttggacgttattgtttaagaaatagttgatgcatcagaaagagaataaaaaatattttagtgagaccatcgaagagagaaagagataaaacttttttacgactccatcagaaagaggtttaatatttttgtgagaccatcgaagagagaaagagaataaaaatattttatgactccattgaagagagaaagagaaaatgagaatgagaataaaaatattttagtgacaccatcagaaagaggtttaatatttttgtgagaccatcgaagagagaaagagaataaaaatattttatgactccattgaagagagaaagagaaaatgagaatgagaataaaaatattttagtgacaccatcagaaagaggtttaatattttttatgagaccatcaaagagagaaagagaataaaaatatttttgtaaaactttttttatgagaccatcaaagagagaaagagaataaaaatatttttgtaaaactttttttgtgagaccatcgaagagagaaagagaataaaaatatttttgtaaaactttttttatgagaccatcaaagagagaaagagaataaaaatatttttgtaaaactttttttatgagaccatcaaagagagaaagagaataaaaatatttttgtaaaactttttttatgagaccatcaaagagagaaagagaataaaaatatttttgtaaaactttttttatgagaccatcaaagagagaaagagaataaaaatatttttgtaaaactttttttatgagaccatcaaagagagaaagagaataaaaatatttttgtaaaactttttttatgagaccatcaaagagagaaagagaataaaaatatttttgtaaaactttttttatgagaccatcagaaagaggtttaatatttttgtgataccctgaaaggaaataggaataggaataggaatagtgtcataatcgtatcacactattgagacagaaaaagaagaagtaacgagaggtaactttttgtgaatgtagttaagaacatttttgttttgcaaaccggaatatagtgtccggtacacttttttaattcgtggtgtgcctgaatcgttcgattaaccctactcatccaatttcagatgaatagagttatcgattcagacacacgctttgagttttgttgaatcgatgagtgaagtatcatcggttgcaccttcagatgccgatccgtcgacatacttgaatccatccttgacctcaagttcagatgattccttgcacatgtctccgatacgaacgctaaactctagattcttgacacattttgtatcgacgatcgttgaaccgatgatatcttcgtaactcactttcttatgagagatgttagacccgagtactggatgggtcttgatgtcgctgtctttctcttcttcgctacatctgatgtcgatagacacctcacagtctttgatcatagccagagcttcttcacgagtgatcgcgggagagtccttaccttgtcctggggacacgctggacaatctagcattcactgtgtttccatcagcggattctgagatggatttaatctgaggacatttggtgaatccaaagttcattctcagacctccaccgatgatggagtaataagtggtaggaggatctacatcctcgactgatgtggaatcatcttctgattccacctcgggatctggatctgactcggactctgtaatttccgttacggattggcaaatcttatcattggtcggtgtttggtcttgctttgtgactttgataataacatcgattcccatatgatgtttgttttcttcttccgtacacgaggaggaggatgaggatgattgctgaagactggcaggcacatgcatgccaggacgatatattgtttcataattgctattgattgagtactgttctttatgattctacttccttaccatgcaataaattagaatatattttctacttttacgagaaattaattattgtatttattatttatgggtgaaaaacttactataaaaagcgggtgggtttggaattagtgatcagtttatgtatatcgcaactaccgggcatatggctatcgacatcgagaacattacccacatgataagagattgtatcagtttcgtagtcttgagtattggtattactatatagtatatagatgtcgacgctagatatacagtctccgaatgcggcatgataccgtcatcattctttgctttcgttaactgtttggaggaagaatctttgttattgcatttaatctcgaaattcagagtgcacacctttctcctgtaaagaatcctgaagtcgctaccttattaagaacggagaagtatccatcacgaaatacgggattacagtctttatgattcatagtaatagttagttccgacgttgagatggattcactgagaccggtagtggtcgtccgagtacacgacgtgtcgttgacgggatacagattaatttccacatcgatatagttaaaggtatttctgggtacgggttcgcatttatctgcggaagagacggtgtgagaatatgttccgagaccacacggagaacagatgacgtctccggatactccgtatcctattccacattttgtttgggaaacacatgccttgcatccggatgatcctttgagaagacaataatatccgggagagcattcacagattctattgtgagtagtgttacacgatcgcgtcttccgttacaacttagacaagcgggtaaatgattattgcgagatgtgaaggtacccgaaccacacggcgtacattgtgtgttagtcttgctatcgcataatctggaagcgtatgttcccggacacaaattatggcgtttgtattcgttgtctttacactttccatcggatggtgcatgcggtgctatatctcttccgtttattattatacatgagagaaacaatatatacgagtataatacggacttcataatttaataatgtagtaatcgttgtcgtgttcctgtttcctacttctccaatcatatagatattttctttctatcatggataatatttgtaatggttctttccgtacaacatactgtttagatgatattgcgcataatttccggaggcaaatacgatagtctagattgaccgatggtagactctaatttattgagtgctttgtcgacgagtttacttttacgctccatcgatagatggcactgttctatgagatcgtcgtacatgggaaatgaaatgtgtctgtccgaatgtatggcttcaagatagctgtgataccgtatacaggtcggtgtcggagattcgaatctctttgaggcgacttatgtcacgatgatggaatctatcttatcgaatgatatatttttcataaatacacttttatagtcctcgtttaaacagaatttactatgtagttccgcgaatgactcgtcccttaataggcagtaggctagtatcttttttacgtagtaatcgtcgtagggagagaattctgacatcttgtagaacaacgatttaatcataggtagagatactttcagtctgtggtggatgatgtcattcacaacatccgccttgtatatgatgtttctgttttcaaacaccaagtcgaataccgtctttagtcggaaggttgatgtcgtatccgatgtatgaggcaacattgttgttacaattttgaaaggcggtatatgtattcgtctttctgaatgtcgaacctatctagtagataccgtagtatattgagagtgtatccttgattatgttttatgaatagataaagtagatgttgtccttcttccttttgttcgtgccaattgagtaacattatgagaatatgacctgttgcacaatcgttccatgatgggtgtacaatcaagattattacgtatcctcgagataaaagagcatacaccacacgaggactatgtttggtatactgttgaaggtaagtgtgtaaccgcgttaatgtttgctccataatctattatcgcgtagatgaatcgcttctcggctcgcatcttagtgtgacttaacttgtaataattgcttttgtagaacgtggatatgtgtttacagtagtaatgaagagaagtgagttcatcctcgtcggcgcaattagggtcggatcctttgtacagaacgtagtagtttaagctcccattgaatttatatctaagataacacagcaatagatcggatgatttactaaagtcatcaatggtgtccgttagtatatcaaagatcttgttatcgattgatagtgaatgaatcagatagtggtgtcctttttcatccttgctatcaaagttacgcatgccgtggtgtaacaatatctttaatacagatggattaaatcgtgtattcatcgtatagcaatgtaatggagagttacctcgtttattcagatcgcagtgtttaataactagcttaaacagatgagacgatgtatccacatcaaagaacgtaaaatacatatgacaaacattgttgacagaaacgtgaccttcattcttaccgtcgtccataaatacgttaggtatgtaccacatactgtcgcgaacgatgctcacaatctcgtccatctcgcccatctcatacatttcatcatttactttttcataattagagatgtacgaaagaaaaagaaaaagaaaaagaaaaacagaacaatatatttttttagtaatgtttatgcgagacatataaaataaactccgtgtttatgatgccggtaaatgtttttatcatcttggacggaatcgattttgtaatatgtcatggaaacaaatgaaacaggacattatcactccatgataaattatttaatggagtaataaagtatctccatgggtaatttcgaaatcaagttatcgtctgtattaatgttgtccactatggagtcgatcctctcactgttctttacagtttctgtaatgatggacgttagttcttttttgtaccatttgatgtcggattctttgcgtatctcagtctgtggcgtttgcttcgtttaaataatatatcaaacatggagacgcctgatatgtaggcattcttcattctattaatgtctactctatagcgctttagttccttatgatgaccggcgatatcatacttactttagaaggaaaatcatcatctaggattaaggcgtatctgatacaggcgaataatggttcaggatatagatagcgtatatctctattaaatgcgtcaatcatagtctctagagtgggatggtagctaagtaataaatcaactatcctcgttttgttttctctttggtaactgcttttctggatggccgtattgattatcgagcgtgatgttgtaacactcgctccatattccaataaccgctttgcaaattgtatattattgacatcgaccgcgtaatatagtagagttttattctcattatcgatcatatctatatcatccatgtacttgcttagtatatcaaatacatctattagtatggtttcataacagtgatacccgcaattattaaatctcgataatatcagaccgtacatacatagacggccattgttagatatgtgatttacagccgcgtgtccatattttccacgataaaccttacgacgtttacatcgacgagattattattaacaaagtagtcgtgcagaggatagttgttgtccgttatctaacatgcatcgaacgaccatatcgccgtaatgtaagtagtttatcaacatggcttgtacgatggattcatcctgttgtctaaatctctttagaatgttatcgatgatgtagtggttatattctctggaatcgtacgaagtaatactacgcattacgtcgacaagagtatgacgtctctcaataagaagattaacgatttccatgtctacattatatggggttactctaaatcgcttgtttagataatacgcctctaatatagggctgacgtcgtatactctacacgtgtccacatcctttattaataataatttaacaatctctatatctatggttgagaaagaccagtagtattggatgggtaaagatcctccttcgtctctgccatggatggaaacattgttattgatcaaacatttaattacatccttggatagagattgagattctctatgagacgatatatagtaatgaagagagttcttacacatatcactgttgtacatacaggtacgaaatacgtaaccggtgctgtaacattctgatttaagaagccatagcaatacttctggtctcggattaggcgtcgttacgtatatatccaccaatccgagaccattgattgcataattcgtattcttggacggacgtatccgtttatccacaattaggtattttagcagacgtaagtcgatattatccgaagacagatcgaaatcatttatattcgacttgagttcgttagaggaattcgaatagctggatatcagtagatgcacaatctgagattttacgtatctatgcttactgtatgctcctagcggagttaatccttcgttgtttctacaaagtctctcgactccgcgagagagtaacagtcgaacaatcttaatgtctgtatcgcatttattggagacgtaacaatgtagcgcattgtttcctcgtctatctatatgttttgataagttgtgacacgtttcaatctctagttttatttttttgtacgtcacatcttcatccagtagacgacatagaatagtgcactctctaccacaataatccatagctattctggtgctaattattcctatttcacgaaaaatgatgaaggcaatcattcctcataagatgataaaaagtgtagtgagagagcatgaaggagatttagtatttagcagtgcggatatgatccaagagggtgagatagtcgttctcgttcagaatctttcgcagcataagtagtatgtcgatatacttatcgttgaagactcttccagagacgatagctgattgagtacaaagtccaatgattgcacgaagttcttcggcggttttcatggagtcatttctgatgaaacatttaatgatctccacgcaattgtcgatattgtcccacggaagtgaatccttcaactcaccaccaaagagctccgttgcatcagttctgaaagagatgagaagcctgtagagagaccctgcgctttctctatgggtccatctatgagaaacccacaggatgtattcagtcagacaatgtctgacgtcggccacggtattcagggagtccttagtagcgtggcaatgacagggtctgaactgggcacaaggaaaggccattgtaaaggtagacctgtagccgtttatgctaatagagggctttaatttccatttttttaatgggttgtggatgaggaatgagagtgatatcatattgagatacgtagttatgtagaggtgtatttcctatattatttactttcggtttcatattttaccaactctttaataaatttcttttcacgatgcatcttattgaatgacgttttctcataagtggacatatagatgcagaagtaatgaagaaaagtattacctctatcatctacataattagggtctgctcctttttttaacaacttatacagtacgtagtagtagtttatcggttttaaatcaagtctagaatatatagtggattaatatatttttatattagctaaagctatctatactatcagaaagcatatcattctcaacttcatcatgagttaaatatttgtgtaatggatgtcatgaacattaaacgtattcatgacatactcctttaataggttttttaaaacagatgattcaaatccttcattcattagataacagtgtaacggagtcgtaccttctactagtttgtttatatcacagcattctacaaacagtctaaacaatagagaagacggacagactttaacgtataaatgacacatgttatcgatattcgttgatgaattattattaaacgtagttatgataaatgattctaacgacatctctcgctagagataaaatctagtatcgtatcattaaacatctttgcatcatactcgcatagcatagtttttcataattaatacaatatttaaaagacttattcggaaagtattttaatacatgtatcatcgatggagatccatatgaggagtcacttgtagttcttcagtagtaataacagtgctatcatcgatagtataattatatgtagaaggttcatatgttgttgtaattggagtaactgttggtagttcttccgtggaatcaataattatactaacagcaatagtataattatataaatatgttccgttgatatcacatattttaatgaactcatttctaacaccctcagctatatctgtccaattaaatgtagccaacaatctactacgttctctttgattgactacttgtacggtagcgacgctacactatctttattgtcttctacatgctccaattgaatgtcatgatacaacgcagtttttcttatgcatgtttcataacaccacgaacatgtcgcagtaagatatatagccagagataatttctgtaaattcatgattgccggtcataaacaagcccgtcaataattgtggctatatattcagtttatagagcaaaataattaagcacaatagcgcttaatctcaaaatatgttatgtttatttttttcatattaaacatactggttaaaatcctctaaaggctgatcttcatctataaatcaagatcataattacatttagacagtggtttcatgtttataaaaatgttctttttgtgtgaataaggaatatactaatcaataatcaaccatcgaccccattacgatagtatgcaggcaacccccattagagaggtacgtgtaatcagtctctccagttttagtatttttataagtcattgttacataaacggcttttaaacagtctcctcgataataagccatatctggaaatttattaaatactcgagtcattttacgcacggtcaaaaaagtaagtaatgtcgacgacttcttacattctatagaaacacctagaatactcattttcttttggaaaatatcctcagactctgatttgaacaatgcacgacctatagtaaaccgtgaccaataagttatattagtcaatggtatatccaaaccatcaggtgtggatagtccagtctttggtatcgatagtgtagttattgaactgagaagttaccgtatagtctttttggtcatctctaaacaaggaaactaatacctctacactattgaacgatttatcttccgtaatgggtggactagcgatggatgaagtcacgaatataagacacgctattaatccgtatatcatcattttgatattacttataataacgatttgtttaatttttagtttatactattaattgtaaatgatattattatttttttaagtattatcagctttagtttatactattactatttgtaatatttagacatagataaacgtgataaaagtctatttgtttatatttattgcggatagcagtatttccctataaaaagtatacgtcctgtggtgtctttaatcatgtacatgaatggatggtttatgtagaccttcgtacgatataccatcgaaaagttaatcgtaaatactcctgtaacggccgatgcttctgtatactcctcattaacatctataaacgtcgtatgtagaaatttttctacagtgatagtttcattacacatcttgctaaaatctgcataatatccgaatatattagtaagtcctaaattttctaaaatcggtaccagattatacggttctgtcatttccactttaaactttggcatatacaagtctatacttttagtagataacataccacaccattttttaaatttttcatctgttatatttttttctatgttatatataccttctatgtcgtccggtagtataatcaccatactagagtttccctcgtatggaatatcgataatagagaatcctccgaataattcattaatatgtacatattgcaagttattctcggtacccaccatcatatcaacactggtaactatattcttagaaatataaaacttgtctgtatatgtaagatgtttagaaaatggatatttccacattgctttaaaatggacggcgctaacaactgtcatacgagtattaatggatagcggactagtcaataaggaattaattttaccatttgtcattgtcttaacccattcgttgattagttcctttgtttggttagcattattaaagtttacagtttgaaaatcgtcttttattttttgtaggaaggaggcgtggaactcgatactatcgctaccgtatattttatttgcggtagctagtgtcgcacaatacggaatatctacgtccatgtcattattgtcatcgggtgtattctcattcatattctctatatattttgatagttgttcagctgtagaaccagctgctccatgatttagaatagataaagtagataaaatagaaactggagaaatcaaaacattttcatcagggtgttttacgattagttctttaaagatatccatggtatagaccaaacaataacgataacgatatatatcataaataaataatgttaaatttcagtttatgtttgtaccccgtattcatacttaacaaattggtattgcgtacacaatcaatcatattacataccattaataatgcaagcataaaaaatcgttagtagatgtttctaaatataggttccgtaagcaaagaatataagaatgaagcggtaatgataaaatcaatcgttatctaaaatgatcatactcatttattttattctattatattaacacatacatttttaacagcaacacattcaatattgtattgttatttttatattatttacacaattaacaatatattattagtttatattactgaattaataatataaaattcccaatcttgttataaacacacactgagaaacagcataaacacagaatccatcaaaaatgtcgatgaaatatctgatgttgttgttcgctgctatgataatcagatcattcgccgatagtggtaacgctatcgaaacgacattgccagaaattacaaacgctacaacagatattccagctatcagattatgcggtccagagggagatggatattgtttacacggtgactgtatccacgctagagatatcgacggtatgtattgtagatgctctcatggttatacaggcattagatgtcagcatgtagtattagtagactatcaacgttcagaaaacccaaacactacaacgtcatatatcccatctcccggtattatgcttgtattagtaggcattattattattattacgtgttgtctattatctgtttataggttcactcgaagaactaataaactacctctacaagatatggttgtgccataatttttataaattttttttatgagtatttttacaaaaatgtataaagtgtatgtcttatgtatatttataaaaatgctaaatatgcgatgtatctatgttatttgtatttatctaaacaatacctctacctctagatattatacaaaaattttttatttcagcatattaaagtaaaatctagttaccttgaaaatgaatacagtgggtggttccgtatcaccagtaagaacataatagtcgaatacagtatccgattgagattttgcatacaatactagtctagaaagaaatttgtaatcatcttctgtgacgggagtccatatatctgtatcatcgtctagtttatcagtgtcccatgctatattcctgttatcatcattagttaatgaaaataactctcgtgcttcagaaaagtcaaatattgtatccatacatacatctccaaaactatcgcttatacgtttatctttaacgatacctatacctagatggttatttactaacagacattttccagatctattgactataactcctatagtttccacatcaaccaagtaatgatcatctattgttatataacaataacataactcttttccgtttttatcagtatgtatatctatattaacgtcgtcgttgtagtgaatagtagttattgatctattatatgaaacggatatgtctagaacggcaattgttttacgtccagttaacactttctttgatttaaagtctagagtctttgcaaacataatatccttatccgactttatatttcctgtagggtggtataattttattttgcctccacatatcggtgtttccaaatatattactagacaatattccatatagttattagttaagggtacccaattagaacacgtacgcttattatcatcatttggatcgtatttcataaaagttattgtactatcgatgtcaacacattctacattttttaatcgtctatatagtatttttctgatattttctataatatcagaattgtcttccatcggaagttgtatactatcagaatcagttacatgtttaaataattctctgatgtcattccttatacaatcaaattcattattaaacagtttaatagtctgtagacctttatcgtcgtaaatatccattgtcttattagttacgcttatttttatgtgtttttacgttgctttattatattttataagaatgattgtttgacgaatcacgagaactattaagacatatattattagaggtatatattataaaaaagtttttgattacgatgttataagaggaaagaggacacattaacatcatacatcaattaactacattcttataacatcgtaatcaaaagaattgcaattttgatgtataacaactgtcaatgggttatggaattgtatattacatattatacagtatgttggtaacgacaaataccgatcggtaattgtctgccggtgtaatagaattatatatatctatctattacaccggctgagtacctacactattatatgattatagtttctatttttacagtaccttaactaaagtctctagtcacaagagcaatactaccaacctacactattatatgattatagtttctatttttataggaacgcgtacgagaaaatcaaatgtctaatttctaacggtagtgttgataaacgattatcgtcaatggatacctcctctatcatgtcgtctattttcttactttgttctattaacttattagcattatatattatttgattataaaacttatattgcttattagcccaatctgtaaatatcggattattaacatatcgtttctttgtaggtttatttaacatgtacatcactgtaagcatgtccgtaccatttattttaatttgacgcatatccgcaatttctttttcgcagtcggttataaattctatatatgatggatacatgctacatgtgtacttataatcgactaatatgaagtacttgatacatattttcagtaacgatttattattaccacctatgaataagtacctgtgatcgtctaggtaatcaactgttttcttaatacattcgatggttggtaatttactcagaataatttccaatatcttaatatataattctgctatttctggaatatatttatctgccagtataacacaaatagtaatacatgtaaacccatattttgttattatattaatgtctgcgccattatctattaaccattctactaggctgacactatgcgacttaatacaatgataaagtatactacatccatgtttatctattttgtttatatcatcaatatacggcttacaaagttttagtatcgataacacatccaactcacgcatagagaaggtagggaataatggcataatatttattaggttatcatcattgtcattatctacaactaagtttccattttttaaaatatactcgacaactttaggatctctattgccaaatttttgaaaatatttatttatatgcttaaatctatataatgtagctccttcatcaatcatacatttaataacattgatgtatactgtatgataagatacatattctaacaatagatcttgtatagaaactgtatatcttttaagaattgtggatattaggatattattacgtaaactattacacaattctaaaatataaaacgtatcacggtcgaataatagttgatcaactatataattatcgattttgtgatttttcttcctaaactgtttacgtaaatagttagatagaatattcattagttcatgaccactatagttactatcgaataacgcgtcaaatatttcccgtttaatatcgcatttgtcaagataataatagagtgtggtatgttcacgataagtataataacgcatctcttttttgtgtgaaattaaatagtttattacgtccaaagatgtagcataaccatcttgtgacctagtaataatataataatagagaactgttttacccattctatcatcataatcagtggtgtagtcgtaatcgtaatcgtctaattcatcatcccaattataatattcaccagcacgtctaatctgttctattttgatcttgtatccatactgtatgttgctacatgtaggtattcctttatccaataatagtttaaacacatctacattgggatttgatgttgtagcgtatttctctacaatattaataccatttttgatactatttatttctatacctttcgaaattagtaatttcaataagtctatatcgatgttatcagaacatagatattcgaatatatcaaaatcattgatatttttatagtcgactgacgacaataacaaaatcacaacatcgtttttgatattattatttttcttggtaacgtatgcctttaatggagtttcaccatcatactcatataatggatttgcaccactttctatcaatgattgtgcactgctggcatcgatgttaaatgttttacaactatcatagagtatcttatcgttaaccatgattggttgttgatgctatcgcattttttggtttctttcatttcagttatgtatggatttagcacgtttgggaagcatgagctcatatgatttcagtactgtagtgtcagtactattagtttcgatcagatcaatgtctagatctatagaatcaaaacacgataggtcagaagataatgaatatctgtacgcttctttttgtactgtaacttctcgttttgttagatgtttgcatcgtgctttaacatcaatggtacaaattttatcctcgctttgtgtatcatattcgtccctactataaaattgtatattcagattatcatgagatgtgtatacgctaacggtatcaataaacggagcacaccatttagtcataaccgtaatccaaaaatttttaaagtatatcttaacgaaagaagttgtatcatcgttaggatttggtaaatcattatctacagtgtatggtactagatcctcataagtgtatatatctagagtaatgtttaatttatcaaatggttgataatatggatcctcatgacaatttccgaagatggaaatgagatatagacatgcaataaatctaatcgaagacatggttactccttaaaaaaatacgaataatcaccttggctatttagtaagtgtcatttaacactatactcatattaatccatggactcataatctctatacgggattaacggatgttctatatacggggatgagtagttctcttctttaactttatactttttactaatcatatttagactgatgtatgggtaatagtgtttgaagagctcgttctcatcatcagaataaatcaatatctctgtttttttgttatacagatgtattacagcctcatatattacgtaatagaacgtgtcatctaccttattaactttcaccgcatagttgtttgcaaatacggttaatcctttgacctcgtcgatttccgaccaatctgggcgtataatgaatctaaactttaatttcttgtaatcattcgaaataatttttagtttgcatccgtagttatcccctttatgtaactgtaaatttctcaacgcgatatctccattaataatgatgtcgaattcgtgctgtatacccatactgaatggatgaacgaataccgacggcgttaatagtaatttactttttcatctttacatattgggtactagttttactatcataagtttataaattccacaagctactatggaataagccaaccatcttagtataacacacatgtcttaaagtttattaattaattacatgttgttttatatatcgctacgaatttaaacagagaaatcagtttaggaaaaaaaattatctatctacatcatcacgtctctgtattctacgatagagtgctactttaagatgagacatatccgtgtcatcaaaaatatactccattaaaatgattattccggcagcgaacttgatattggatatatcacaacctttgttaatatctacgacaatagacagcagtcccatggttccataaacagtgagtttatctttctttgaagagatattttgtagagatcttataaaactgtcgaatgacatcgcatttatatctttagctaaatcgtatatgttaccatcgtaatatctaaccgcgtctatcttaaacgtttccatcgctttaaagacgtttccgatagatggtctcatttcatcagtcatactgagccaacaaatataatcgtgtataacatctttgatagaatcagactctaaagaaaacgaatcggctttattatacgcattcatgataaacttaatgaaaaatgtttttcgttgtttaagttggatgaatagtatgtcttaataattgttattatttcattaattaatatttagtaacgagtacactctataaaaacgagaatgacataactagttatcaaagtgtctaggacgcgtaattttcatatggtatagatcctgtaagcattgtctgtattctggagctattttctctatcgcattagtgagttcagaatatgttataaatttaaatcgaataacgaacataactttagtaaagtcgtctatattaactcttttattttctagccatcgtaataccatgtttaagatagtatattctctagttactacgatctcatcgttgtctagaatatcacatactgaatctacatccaattttagaaattggtctgtgttacatatctcttctatattattgttgatgtattgtcgtagaaaactattacgtagaccattttctttataaaacgaatatatagtactccaattatctttaccgatatatttgcacacataatccattctctcaatcactacatctttaagattttcgttgttaagatatttggctaaactatataattctattagatcatcaacagaatcagtatatatttttctagatccaaagacgaactctttggcgtcctctataatattcccagaaaagatattttcgtgttttagtttatcgagatctgatctgttcatatacgccatgattgtacggtacgttatgataaccgcataaaataaaaatccattttcatttttaaccaatactattcataattgagattgatgtaatactttgttactttgaacgtaaagacagtacacggatccgtatctccaacaagcacgtagtaatcaaatttggtgttgttaaacttcgcaatattcatcaatttagatagaaacttatactcatcatctgttttaggaatccatgtattattaccactttccaacttatcattatcccaggctatgtttcgtccatcatcgttgcgcagagtgaataattcttttgtattcggtagttcaaatatatgatccatgcatagatcggcaaagctattgtagatgtgatttttcctaaatctaatataaaactcgtttactagcaaacactttcctgatttatcgaccaagacacatatggtttctaaatctatcaagtggtggggatccatagttatgacgcagtaacatatattattacattcttgactgtcgctaatatctaaatatttattgttatcgtattggattctgcatatagatggcttgtatgtcaaagatatagaacacataaccaatttatagtcgcgctttacattctcgaatctaaagttaagagatttagaaaacattatatcctcggatgatgttatcactgtttctggagtaggatatattaaagtctttacagatttcgtccgattcaaataaatcactaaataatatcccacattatcatctgttagagtagtatcattaaatctattatattttatgaaagatatatcactgctcacctctatatttcgtacatttttaaactgtttgtataatatctctctgatacaatcagatatatctattgtgtcggtagacgataccgttacatttgaattaatggtgttccattttacaacttttaacaagttgaccaattcatttctaatagtatcaaactctccatgattaaatattttaatagtatccattttatatcactacggacacaaagtagctgacataaaccattgtataatttttatgttttatgtttattagcgtacacattttggaagttccggcttccatgtatttcctggagagcaagtagatgatgaggaaccagatagtttatatccgtacttgcacttaaagtctacattgtcgttgtatgagtatgatcttttaaacccgctagacaagtatccgtttgatattgtaggatgtggacatttaacaatctgacacgtgggtggatcggaccattctcctcctgaacacaggacaccagagttaccaatcaacgaatatccactattgcaactataagttacaacgcttccatcggtataaaaatcctcgtatccgttatgtcttccgttggatatagatggaggggattggcatttaacagattcacaaataggtgcctcgggattccataccatagatccagtagatcctaattcacaatacgatttagattcaccgatcaaatgatatccgctattacaagagtacgttatactagagccaaagtctactccaccaatatcaagttggccattatcgatatctcgaggcgatgggcatctccgtttaatacattgattaaagagtgtccatccagtacctgtacatttagcatatataggtcccattttttgctttctgtatccaggtagacatagatattctatagtgtctcctatgttgtaattagcattagcatcagtctccacactattcttaaatttcatattaatgggtcgtgacggaatagtacagcatgatagaacgcatcctattcccaacaatgtcaggaacgtcacgctctccaccttcatatttatttatccgtaaaaatgttatcctggacatcgtacaaataataaaaagcccatatatgttcgctattgtagaaattgtttttcacagttgctcaaaaacgatggcagtgacttatgagttacgttacactttggagtctcatctttagtaaacatatcataatattcgatattacgagttgacatatcgaacaaattccaagtatttgattttggataatattcgtattttgcatctgctataattaagatataatcaccgcaagaacacacgaacatctttcctacatggttaaagtacatgtacaattctatccatttgtcttccttaactatatatttgtatagataattacgagtctcgtgagtaattccagtaattacatagatgtcgccgtcgtactctacagcataaactatactatgatgtctaggcatgggagacttttttatccaacgatttttagtgaaacattccacatcgtttaatactacatatttttcatacgtggtataaactccacccattacatatatatcatcgtttacgaataccgacgcgcctgaatatctaggagtaattaagtttggaagtcttatccatttcgaagtgccgtgtttcaaatattctgccacacccgttgaaatagaaaattctaatcctcctattacatataactttccatcgttaacacaagtactaacttctgattttaacgacgacatattagtaaccgttttccattttttcgtttcaagatctacccgcgatacggaataaacatgtctattgttaatcatgccgccaataatgtatagacaattatgtaaaacatttgcattatagaattgtctatctgtattaccgactatcgtccaatattctgtcctaggagagtaatgggttattgtggatatataatcagagtttttaatgactactatattatgttttataccatttcgtgtcactggctttgtagatttggatatagttaatcccaacaatgatatagcattgcgcatagtattagtcataaacttgggatgtaaaatgttgatgatatctacatcgtttggatttttatgtatccactttaataatatcatagctgtaacatcctcatgatttacgttaacgtcttcgtgggataagatagttgtcagttcatcctttgataattttccaaattctggatcggatgtcaccgcagtaatattgttgattatttctgacatcgacgcattatatagttttttaattccatatcttttagaaaagttaaacatccttatacaatttgtggaattaatattatgaatcatagtttttacacatagatctactacaggcggaacatcaattattacggcagcaactagtatcatttctacattgtttatggtgatgtttatcttcttccagcgcatatagtctaatagcgattcaaacgcgtgatagtttataccattcaatataatcgcttcatcctttagatggtgatcctgaatgcgtttaaaaaaattatacggagacgccgtaataatttccttattcacttgtataatttccccattgatagaaaatatcacgctttccattcttgaagtactataagtaattatagtataatgtaaaggtttatatattcaatattttttataaaaaaatcatttcgacattaattcctttttaaatttgcgtctatcatctatagaaacatattctatgaatttataaaatgcttttacgtgtcctatcgtaggcgatagaaccgctaaaaagcctatcgaatttctacaaaagaatctgttatatggtatagggagagtataaaacattaaatgtccgtacttattaaagtattcagtagccaatcctaactctttcgaatacttattaatggctcttgttctgtacgaatctatttttttgaacaacggacctagtggtatatcttgttctatgtatctaaaataatgtctgactagatccgttagtttaatatcctcagtcatcttgtctagaatggcaaatctaactgcgggtttaggctttagtttagtttctatatctacatctatgtctttatctaacaccaaaaatataatagctaatattttattacaatcatccggatattcttctacgatctcactaactaatgtttctttggttatactagtatagtcactatcggacaaataaagaaaatcagatgatcgatgaataatacatttaaattcatcatctgtaagatttttgagatgtctcattagaatattattagggttagtactcattatcattcggcagctattacttattttattatttttcaccatatagatcaatcattagatcatcaaaatatgtttcaatcatcctaaagagtatggtgaatgactcttcccatctaatttctgaacgttcaccaatgtctctagccactttggcactaatagcgatcattcgcttagcgtcttctatattattaactggttgattcaatctatctagcaatggaccgtcggacagcgtcattctcatgttcttaatcaatgtacatacatcgccgtcatctaccaattcatccaacaacataagctttttaaaatcatcattataataggtttgatcgttgtcatttctccaaagaatatatctaataagtagagtcctcatgattagttaacaactattttttatgttaaatcaattagtacaccgctatgtttaatacttattcatattttagtttttaggattgagaatcaatacaaaaattaatgcatcattaattttagaaatacttagtttccacgtagttaatgaaacatttgaactcatcgtacaggacgttctcgtacaggacgtaactataaaccggtttatatttgttcaagatagatacaaatccgataactttttttacgaattctacgggatccactttaaaagtgtcatacggggttctttttatttttttaaacagatcaatggtgtgatgttgattaggtcttttacgaatttgatatagaatagcgtttacatattctccataatggtcaatcgccatttgttcgtatgtcataaattctttaattatatgacactgtgtattgtttagttcatccttgttcattgttaggaatctattcaaaatggcaattatactagaactataggtgcgttgtatacacatattgatgtgtctgtttatacaatccatgatatttggatccatgctactaccttcgggtaaaattgtagcatcatataccatttctagtactttaggttcattgttatccattgcagaggacgtcatgatcgaatcataaaaaaatatattatttttatgttattttgttaaaaataatcatcgaatacttcgtaagatactccttcatgaacataatcagttacaaaacgtttatatgaagtaaagtatctacgatttttacaaaagtccggatgcataagtacaaagtacgcgataaacggaataataatagatttatctagtttatctttttctatagctttcatagttagatacatggtctcagaagtaggattatgtaacatcagcttcgataaaatgactgggttatttagtcttacacattcgctcatacatgtatgaccgttaactacagagtctacactaaaatgattgaacaatagatagtctaccattgtttcgtattcagatagtacagcgtagtacatagcatcttcacaaattatatcattgtctaatagatatttgacgcatcttatggatcccacttcaacagccatcttaaaatcggtagaatcatattgctttcctttatcattaataatttctagaacatcatctctatcataaaagatacaaatattaactgtttgatccgtaataacattgctagtcgatagcaatttgttaataagatgcgctgggctcaatgtcttaataagaagtgtaagaggactatctccgaatttgttttgtttattaacatccgttgatggaagtaaaagatctataatgtctacattcttgactgttttagagcatacaatatggagaggtgtatttccatcatgatctggttttgagggactaattcctagtttcatcatccatgagattgtagaagcttttggattgtctgacataagatgtctatgaatatgatttttgccaaatttatccactatcctggcttcgaatccgatggacattatttttttaaacactctttctgaaggatctgtacacgccaacaacggaccacatccttcttcatcaaccgagttgttaatcttggctccatactgtaccaataaatttattctctctatgacttcatcatctgttcccgagagataatatagaggtgttttattatgtttatcacacgcgtttggatctgcgccgtgcgtcagcagcatcgcgactattctattattattaattttagaagctatatgcaatggataatttccatcatcatccgtctcatttggagagtatcctctatgaagaagttcttcgacaaatcgttcatctagtcctttaattccacaatacgcatgtagaatgtgataattatttccagaaggttcgatagcttgtagcatattcctaaatacatctaaatttttactattatatttggcataaagagatagataatactcggccgacataatgttgtccattgtagtataaaaattaatatttctatttctatttctgtatatttgcaacaatttactctctataacaaatatcataacttagttcttttatgtcaagaaggcactggtttagttcatctataaatgtcacgccataactaccacgcatgccatactcagaattatgataaagatatttatccttggggtgtaggtaatggggattaatctttgttggatcagtctctaagttaacacatgtcacacatgatccatttatagttatatcacacgatgatgatttatgaattgattccggaagatcgctatcgtattttgtggttccacaattcatttccatacatgttattgtcacactaatattatgatgaactttatctagccgctgagtggtaaacaacagaacagatagtttattatctttaccaacaccctcagccgctgccacaaatctctgatccgtatccatgatggtcatgtttatttctagtccgtatccagtcaacactatgttagcatttctgtcgatatagctttcactcatatgacactcaccaataatagtagaattaatgtcgtaatttacaccaatagtgagttcggcggcaaagtaccaataccggtaatcttgtcgaggaggacatatagtattcttgtattctaccgaatacccgagagatgcgatacaaaagagcaagactaatttgtaaaccatcttactcaaaatatgtaacaatagtacgatgcaatgagtaagacaataggaaatctatcttatatacacataattattctatcaattttaccaattagttagtgtaatgttaacaaaaatgtgggagaatctaattagtttttctttacacaattgacgtacatgagtctgagttccttgtttttgctaattatttcatccaatttattattcttgacgatatcgagatcttttgtataggagtcagacttgtattcaacatgcttttctataatcatcttagttatttcggcatcatccaatagtacattttccagattaacagagtagatattaatgtcgtatttgaacagagcctgtaacatctcaatgtctttattatctatagccaatttaatgtccggaatgaagagaagggaattattggtgtttgtcgacgtcatatagtcgagcaagagaatcatcatatccacgtgtccattttttatagtggtgtgaatacaactaaggagaatagccagatcaaaagtagatggtatttctgaaagaaagtatgatacaatacttacatcattaagcatgacggcatgataaaatgaagttttccatccagttttcccatagaacatcagtctccaatttttcttaacaaacagtttcaccgtttgcatgttaccactatcaaccgcataatacaatgcggtgtttcctttgtcatcaaattgtgaatcatccattccactgaatagcaaaatctttactattttggtatcttctaatgtggctgcctgatgtaatggaaattcattctctagaagatttttcaatgctccagcgttcaacaacgtacatactagacgcacgttattatcagctattgcataatacaaggcactatgtccatggacatccgccttaaatgtatctttactagagagaaagcttttcagctgcttagacttccaagtattaattcgtgacagatccatgtctgaaacgagacgctaattagtgtatattttttcattttttataattttgtcatattgcaccagaattaataatatctctaatagatctgattagtagatacatggctatcgcaaaacaacatatacacatttaataaaaataatatttattaagaaaattcagatttcacgtacccatcaatataaataaaataatgattccttccaccgtatccataaacaatattaaggagattctaccttacccataaacaatataaatccagtaatatcatgtctaatgatgaacacaaatggtgtattaaattccagtttttcaggagatgatctcgccgtagctaccatgatagtagatgcctctgctacagttccttgttcgtcgacatctatctttgcattctgaaacattttataaatatataatgggtccctagtcatatgtttaaacgacgcattatctggattaaacatactaggagccatcatttcggctatcgacttaatatccctcttattttcgatagaaaatttagggagtttaagattgtacactttattccctaattgaaacgaccaatagtctaattttgcagccgtaatagaatctgtgaaatgggtcatattatcacctattgccaggtacatactaatattagcatccttatacggaaggcgcaccatatcatattcttcgtcatcgattgtgattgtatttccttgcaatttagtaactacgttcatcatgggaaccgttttcgtaccgtacttattagtaaaactagcattgcgtgttttagtgatatcaaacggatattgccatgtacctttaaaatatatagtattaatgattgcccatagagtattattgtcgagcatattagaatctactacattagacataccggatctacgttctactatagaattaattttattaaccgcatctcgtctaaagtttaatctatataggccgaatctatgatattgttgataatacaacggtttaatgcacacagtattatctacgaaactttgataagttagatcagtgtacgtatatttagatgttttcagcttagctaatcctgatattaattctgtaaatgctggacccagatctctttttctcaaatccatagtcttcaataattctattctagtattacctgatgcaggcaatagcgacataaacatagaaaacgaataaccaaacggtgagaagacaatattatcatcttgaatatttttatacgctactataccggcattggtaaatccttgcagacgataggtagacactgaacacgttaacgatagtatcaataacgcaatcatgattttatggtattaataattaaccttatttttatgttcggtataaaaattattgatgtctacacatccttttgtaattgacatctatatatccttttgtataatcaactctaatcactttaacttttacagttttccctaccagtttatccctatattcaacatatctatccatatgcatcttaacactctctgccaagatagcttcagagtgaggatagtcaaaaagataaatgtatagagcataatccttctcgtatactctgccctttattacatcgcccgcattgggcaacgaataacaaaatgcaagcatcttgttaacgggctcgtaaattgggataaaaattatgtttttatatctattttattcaagagaatattcaggaatttctttttccggttgtatctcatcgcagtatatatcatttgtacattgtttcatattttttaatagtttacaccttttagtaggactagtatcgtacaattcatagctgtattttgaattccaatcacgcataaaaatatcttccaattgttgacgaagacctaatccatcatccggtgtaatattaatagatgctccacatgtatccgtaaagtaatttcctgtccaatttgaggtacctatataggccgttttatcggttaccatatatttggcatggtttaccctagaatacggaatgggaggatcagcatctggtacaataaatagctttacttctatatctatgtttttagattttagcatagcgatagatcttaaaaagtttctcatgataaacgaagatcgttgccagcaactaatcaatagcttaacggatacttgtctgtctatagcggatcttcttaattcatcttctatataaggccaaaacaaaattttacccgccttcgaataaataatagggataaagttcataacagatacataaacgaatttactcgcatttctaatacatgacaataaagcggttaaatcattggttctttccatagtacatagttgttgcggtgcagaagcaataaatacagagtgtggaacaccacttacgttaatactaagaggatgatctgtattataatacgacggataaaagtttttccaattatatggtagattgttaactccaagataccagtatacctcaaaaatttgagtgagatccgctgccaagttcctattattgaagatcgcaatacccaattctttgacctgagttagtgatctccaatccatgttagcgcttcctaaataaatatgtgtattatcagatatccaaaattttgtatgaagaactcctcctaggatatttgtaatatctatgtatcgtacttcaactccggccatttgtagtctttcaacatcctttaatggtttgttagatttattgacggctactctaactcgtactcctcttttgggtaattgtacaatctcgtttaatattatcgtgccgaaattcgtacccacttcatccgataaactccaataaaaagatgatatatctagtgtttttgtggtattggatagaatttccctccacatgttaaatgtagacaaatatactttatcaaattgcatacctataggaatagtctctgtaatcactgcgattgtattatccggattcattttatttgttaaaagaataatcctatatcacttcactctattaaaaatccaagtttctatttctttcatgactgattttttaacttcatccgtttccttatgaagatgatgtttggcaccttcataaatttttatttctctattacaatttgcatgttgcatgaaataatatgcacctgaaacatcactaatctcattgtttgttccctggagtatgagagtcggggggtgttaatcttggaaattatttttctaaccttgttggtagccttcaagacctgactagcaaatccagccttaattttttcatgattgattaatgggtcgtattggtatttataaactttatccatatctctagatactgattctggacatagctttccgactggcgcatttggtgtgatggttcccataagtttggcagctagcagattcagtcttgaaacagcatctgcattaactagaggagacattagaatcattgctgtaaacaagtttggattatcgtaagaggctagtatagaaattgttgctcccatggaatgacccaataagtagatttaatagttaccacgtgctgtaccaaagtcatcaatcatcattttttcaccattacttcttccatgtccaatatgatcatgtgagaatactaaaattcctaacgatgatatgttttcagctagttcgtcataacgtccagaatgtttaccagctccatgacttatgaatactaatgccttaggatatgtaataggtttccaatatatgtaatcattgtccagattgaacatacagtttgcactcatgattcacgttatataactatcaatattaacagttcgtttgatgatcatattatttttatgttttattgataattgtaaaaacatacaattaaatcaatatagaggaaggagacggatactgtcttttgtgagatagtcatggcgactaaattagattatgaggatgctgttttttactttgtggatgatgataaaatatgtagtcgcgactccatcatcgatctaatagatgaatatattacgtggagaaatcatgttatagtgtttaacaaagatattaccagttgtggaagactgtacaaggaattgatgaagttcgatgatgtcgctatacggtactatggtattgataaaattaatgagattgtcgaagctatgagcgaaggagaccactacatcaattttacaaaagtccatgatcaggaaagtttattcgctaccataggaatatgtgctaaaatcactgaacattggggatacaaaaagatttcagaatctagattccaatcattgggaaacattacagatctgatgaccgacgataatataaacatcttgatactttttctagaaaaaaaattgaattgatgatataggggtcttcataacgcataattattacgttagcattctatatccgtgttaaaaaaaattatcctatcatgtatttgagagttttatatgtagcaaacatgatagctgtgatgccaataagctttagatattcacgcgtgctagtgttagggatggtattatctggtggtgaaatgtccgttatataatctacaaaacaatcatcgcatatagtatgcgatagtagagtaaacatttttatagtttttactggattcatacatcgtctacccaattcggttataaatgaaattgtcgccaatcttacacccaaccccttgttatccattagtatagtattaacttcgttatttatgtcataaactgtaaatgattttgtagatgccatatcatacatgatattcatgtccctattataatcattactaactttatcacaatatatgttgataatatctatatatgatctagtctttgtgggcaactgtctatacaagtcgtctaaacgttgtttactcatatagtatcgaacagccatcattacatggtcccgttccgttgatagataatcgagtatgttagtggacttgtcaaatctatataccatattttctggaagtggatatacatagtcgtgatcaacattattgctagcctcatcttctatatcctgtactataccattatctatatcatctacataatctacgatattattacacataaacatcgacaacatactattgtttattatctaagtcctgttgatccaaacccttgatctcctctatttgtactatctagagattgtacttcttccagttctggataatatatacgttgatagattagctgagctattctatctccagtatttacattaaacgtacattttccattattaataagaatgactcctatgtttcccctataatcttcgtctattacaccacctcctatatcaatgccttttagtgacagaccagacctaggagctattctaccatagcaaatcttaggcatggacatactaatatctgtcttaattaactgtctttctcctggagggatagtataatcgtaagcgctatacaaatcatatccggcagcacccggcgattgcctagtaggagatttagctctgttagtttccttaacaaatctaactggtgagttaatattcatgttgaacataaaactaatattttatttcaaaattatttaccatcccatatattccatgaataagtgtgatgattgtacacttctatagtatctatatacgatccacgataaaatcctcctatcaatagcagtttattatccactatgatcaattctggattatccctcggataaataggatcatctatcagagtccatgtattgctggattcacaataaaattccgcatttctaccaaccaagaataaccttctaccgaacactaacgcgcatgatttataatgaggataataagtggatggtccaaactgccactgatcatgattgggtagcaaatattctgtagttgtatcagtttcagaatgtcctcccattacgtatataacattgtttatggatgccactgctggattacatctaggtttcagaagactcggcatattaacccaagcagcatccccgtggaaccaacgctcaacagatgtgggatttggtagacctcctactacgtataatttattgttagcgggtatccccgtagcatacagtctggggctattcatcggaggaattggaatccaattgtttgatatataatttacagctatagcattgttatgtatttcattgttcatccatccaccgatgagatatactacttctccaacatgagtacttgtacacatatggaatatatctataatttgatccatgttcataggatactctatgaatggatacttgtatgatttgcgtggttgtttatcacaatgaaatattttggtacagtctagtatccattttacattatttatacctctgggagaaagataatttgacctgattacatttttgataaggagtagcagatttcctaatttatttcttcgctttatataccacttaatgacaaaatcaactacataatcctcatctggaacatttagttcatcgctttctagaataagtttcatagatagataatcaaaattgtctatgatgtcatcttccagttccaaaaagtgtttggcaataaagtttttagtatgacataagagattggatagtccgtattctatacccatcatgtaacactcgacacaatattcctttctaaaatctcgtaagataaagtttatacaagtgtagatgataaattctacagaggttaatatagaagcacgtaataaattgacgacgttatgactatctatatatacctttccagtatacgagtaaataactatagaagttaaactgtgaatgtcaaggtctagacaaacccttgtaactggatctttatttttcgtgtatttttgacgtaaatgtgtgcgaaagtaaggagataactttttcaatatcgtagaattgactattatattgccacctatagcatcaataattgttttgaatttcttagtcatagacaatgctaatatattcttacagtacacagtattgacaaatatcggcatttatgtttctttaaaagtcaacatctaaagaaaaatgattatcttcttgagacataactcccattttttggtattcacccacacgtttttcgaaaaaattagtttttccttccaatgatatattttccatgaaatcaaacggattggtaacattataaatttttttaaatcccaattcagaaatcaatctatccgcgacaaattctatatatgttttcatcatttcacaattcattcctataagtttaactggaagagccgcagtaagaaattcttgttcaatggatactgcatctgttataatagatctaacggtttcttcactcggtggatacaataaatgtttaaacatcaaacatgcgaagtcgcagtgcagaccctcgtctctactaattagttcgttggaaaacgtgagtccgggcattaggccacgctttttaagccaaaatatggaagcgaatgatccggaaaagaagattccttctactgcagcaaaggcaataagtctctctccataaccggcgctgtcatgtatccacttttgagcccaatcggccttcttttttacacaaggcattgtttctatggcattaaagagatagtttttttcattactatctttaacataagtatcgatcaaaagactatacatttccgaatgaatgttttcaatggccatctgaaatccgtagaaacatctagcctcggtaatctgtacttctgtacaaaatcgttccgccaaattttcattcactattccgtcactggctgcaaaaaacgccaatacatgttttataaaatatttttcgtctggtgttagtttattccaatcattgatatctttagatatatctacttcttccactgtccaaaatgatgcctctgcctttttatacatgttccagatgtcataatattggattgggaaaataacaaatctatttggatttggtgcaaggatgggttccataactaaattaacaatatcaataaattttttttcagttatctatatgcctgtacttggattttttgtacatcgatatcgccgcaatcactacaataattacaagtattattgatagcattgttattagtactatcataattaaattatcgacattcatgggtgctgaataatcgttattatcatcattatcattttgtaattgtgacatcatactagataaatcgtttgcgagattgttgtgggaagcgggcatggaggatgcattatcattattatttaacgccttccattcggattcacaaatatggcgcgcgttcaacattttatggaaactataattttgtgaaaacagataacaagaaaactcgtcatcgttcaaatttttaacgatagtaaaccgattaaacgtcgagctaatttctaacgctagcgactctgttggatatgggtttccagatatatatcttttcagttcccctacgtatctataatcatctgtaggaaatggaagatatttccatttatctactgttcctaatatcatatgtggtggtgtagtagaaccattaagcgcgaaagatgttatttcgcatcgtattttaacttcgcaataatttctggttagataacgcactctaccagtcaagtcaatgatattagcctttacagatatattcatagtagtcgtaacgatgactccatcttttagatgcgatactcctttgtatgtaccagaatcttcgtacctcaaactcgatatatttaaacaagttaatgagatattaacgcgttttatgaatgatgatatataaccagaagttttatcctcggtggctagcgctataaccttatcattataataccaactagtgtgattaatatgtgacacgtcagtgtgggtacaaatatgtacattatcgtctacgtcgtattcgatacatccgcatacagccaacaaatataaaatgacaaatactctaacgacgttcgtacccatcttgatgcggtttaataaatgttttgatttcaatttattgtaaaaaaagattcggttttatactgttcgatattctcattgcttatattttcatctatcatctccacacagtcaaatccgtggttagcatgcacctcatcaaccggtaaaagactatcggactcttctatcattataactctagaatatttaatttggtcattattaatcaagtcaattatcttatttttaacaaacgtgagtattttactcattttttataaaaacttttagaaatatacagactctatcgtgtgtctatatcttctttttatatccaatgtatttatgtctgatttttcttcatttatcatatataatggtccaaattctacacgtgcttcggattcatccagatcattaaggttcttataattgtaacatccttctcttccctcttctacatcttccttcttattcttattcttattcttattcttattcttattcttattcttattcttagcgtcacagaatctaccacagcagaatcccatgacgagcgtcatattaaactaattcattttcaattataatatacgattagtaatgaccattaaaataaaaaatattcttcataaccggcaagaaagtgaaaagttcacattgaaactatgtcagtagtatacatcatgaaatgatgatatatatattctctattttggtggaggattatatgatataattcgtggataatcattcttaagacacatttcttcattcgtaaatcttttcacgttaaatgagtgtccatattttgcaatttcttcatatgatggcggtgtacgtggacgaggctgctcctgttcttgttgtggtcgccgactatcgtgtttgcgtttagatccctccattatcgcgattgcgtagatggagtactattttataccttgtaattaaatttttttattaattaaacgtataaaaacgttccgtatctgtatttaagagccagatttcgtctaatagaacaaatagctacagtaaaaataactagaataattgctacacccactagaaaccacggatcgtaatacggcaatcggttttcgataataggtggaacgtatattttatttaaggacttaacaattgtctgtaaaccacaatttgcttcagcggatcctgtattaactatctgtaaaagcatatgttgaccgggcggagccgaacattctccgatatctaatttctgtatatctataatattattaacctccgcatacgcattacagttcttttctagcttggataccgcactaggtacatcgtctagatctattcctatttcctcagcgatagctcttctatccttttccggaagcaatgaaatcacttcaataaatgattcaaccatgagtgtgaaactaagtctagaattactcatgcatttgttagttattcggagcgcgcaatttttaaactgtcctataacctctcctatatgaatagcacaagtgacattagtagggatagaatgttgagctaatttttgtaaataactatctataaaaagattatacaaagttttaaactctttagtttccgccatttatccagtctgagaaaatgtctctcataataaatttttccaagaaactaattgggtgaagaatggaaacctttaatctatatttatcacagtctgttttggtacacatgatgaattcttccaatgccgtactaaattcgatatctttttcgatttctggatatgtttttaataaagtatgaacaaagaaatggaaatcgtaataccagttatgtttaactttgaaattgttttttattttcttgttaatgattccagccacttgggaaaagtcaaagtcgtttaatgccgatttaatacgttcattaaaaacaaactttttatcctttagatgaattattattggttcattggaatcaaaaagtaagatattatcgggtttaagatctgcgtgtaaaaagttgtcgcagcatggtagttcgtagattttaatgtataacagagccatctgtaaaaagataaactttatgtattgtaccaaagatttaaatcctaatttgatagctaactcggtatctactttatctgccgaatacagtgctaggggaaaaattataatgtttcctctttcatattcgtagttagttctcttttcatgttcgaaaaagtgaaacatgcggttaaaatagtttataacattaatattactgttaataactgccgggtaaaagtgggatagtaatttcacgaatttgatactgtcctttctctcgttaaacgcctttagaaaaactttagaagaatatctcaatgagagttcctgaccatccatagtttgtatcaataatagcaacatatgaagaacacgtttatacagagtatgtaaaaatgttaatttatagtttaatcccatggcccacgcacacacgattaattttttttcatctccctttagattgttgtatagaaatttgggtactgtgaactccgccgtagtttccatgggactatataattttgtggcctcgaatacaaattttactacatagttatctatcttaaaaactataccatatcctcctgtagatatgtgataaaaatcgtcgtttataggataaaatcgtttatccttttgttggaaaaatgatgaattaatgtaatcattctcttctatctttagtagtgtttccctattaaaattcttaaaataatttaacaatctaactgacggagcccaattttggtgtaaatctaattgggacattatgttgttaaaatataaacagtctcctaatataacagtatctgataatctatggggagacatccattgatattcaggggatgaatcattggcaacacccatttattgtacaaaaagccccaatttacaaacgaaagtccaggtttgatagagacaaactattaactattttgtctctgtttttaacacctccacagtttttaatttctttggtaatgaaattattcacaatatcagtatcttctttatctaccagagattttactaacttgataaccttggctgtctcattcaatagggtagtaatatttgtatgtgtgatattgatatctttttgaattgtttcttttagaagtgattctttgatggtgtcagcatacgaattacaataatgcagaaactcggttaacatgcaggaattatagtaagccaattccaattgttgcctgtgttgtattagagtgtcaatatgagcaatggtgtccttgcgtttctctgatagaatgcgagcagcgattttggcgttatcatttgacgatatttctggaatgacgaatcctgtttctactaactttttggtaggacaaagtgaaacaatcaagaagatagcttctcctcctatttgtggaagaaattgaactcctctagatgatctactgacgatagtatctccttgacagatattggaccgaattacagaagtacctggaatgtaaagccctgaaaccccctcattttttaagcagattgttgccgtaaatcctgcactgtgaccaagatagagagctcctttggtgaatccatctctatgtttcagtttaaccaagaaacagtcagctggtctaaaatttccatctctatctaatacagcatctaacttgatgtcaggaactatgaccggtttaatgttatatgtaacattgagtaaatccttaagttcataatcatcactgtcatcagttatgtacgatccaaacaatgtttctaccggcatagtggatacgaagatgctatccatcagaatgtttccctgattagtattttctatatagctattcttctttaaacgattttccaaatcagtaactatgttcatttttttaggagtaggacgcctagccagtatggaagaggattttctagatcctctcttcaacatctttgatctcaatggaatgcaaaaccccatagtgaaacaaccaacgataaaaataatattgtttttcactttttataattttaccatctgactcatggattcattaatatctttataagagctactaacgtataattctttataactgaactgagatatatacaccggatctatggtttccataattgagtaaatgaatgctcggcaataactaatggcaaatgtatagaacaacgaaattatactagagttgttaaagttaatattttctatgagctgttccaataaattatttgttgtgactgcgttcaagtcataaatcatcttgatactatccagtaaaccgtttttaagttctggaatattattatcccattgtaaagcccctaattcgactatcgaatatcctgctctgatagcagtttcaatatcgacggacgtcaatactgtaataaaggtggtagtattgtcatcatcgtgataaactactggaatatggtcgttagtaggtacggtaactttacacaacgcgatatataactttccttttgtaccatttttaacgtagttgggacgtcctgcagggtattgttttgaagaaatgatatcgagaacagatttgatacgatatttgttggattcctgattatttactataatataatctagacagatagatgattcgataaatagagaaggtatatcgttggtaggataatacatccccattccagtattctcggatactctattaatgacactagttaagaacatgtcttctattctagaaaacgaaaacatcctacatggactcattaaaacttctaacgctcctgattgtgtctcgaatgcctcgtacaaggatttcaaggatgccatagattctttgaccaacgatttagaattgcgtttagcatctgatttttttattaaatcgaatggtcggctctctggtttgctaccccaatgataacaatagtcttgtaaagataaaccgcaagaaaatttatacgcatccatccaaataaccctagcaccatcggatgatattaatgtattattatagattttccatccacaattattgggccagtatactgttagcaacggtatatcgaatagattactcatgtaacctactagaatgatagttcgtgtactagtcataatatctttaatccaatctaagaaatttaaaattagattttttacactgttaaagttaacaaaggtattacccgggtacgtggatatcatatatggtattggtccattatcagtaatagctccataaactgatacggcgatggtttttatatgtgtttgatctaacgaggaagaaattcgcacccacaattcatctctagatatgtatttaatatcaaacggtaacacatcaatttcgggacgcgtatatgtttctaaatttttaatccaaatataatgatgacctatatgccctattatcatactgtcaactatagtacacctagagaacttacgatacatctgtttcctataatcgttaaattttacaaatctataacatgctaaaccttttgacgacaaccattcattaatttctgatatggaatctgtattctcgataccgtattgttctaaagccagtgctatatctccctgttcgtgggaacgctttcgtataatatcgatcaacggataatctgaagtttttggagaataatatgactcatgatctatttcgtccataaacaatctagacataggaattggaggcgatgatcttaattttgtgcaatgagtcgtcaatcctataacttctaatcttgtaatattcatcatcgacataatactatctatgttatcatcgtatattagtataccatgaccttcttcatttcgtgccaaaatgatatacagtcttaaatagttacgcaatatctcaatagtttcataattgttagctgttttcatcaagatttgtaccctgtttaacatgatggcgttctatacgtttctattttctattttttaaatttttaaatttttaacgatttactgtggctagatacccaatctctctcaaatatttttttagcctcgcttacaagctgtttatctatactattaaaactgacgaatccgtgattttggtaatgggttccgtcgaaatttgccgaagtgatatgaacatattcgtcgtcgactatcaacaattttgtattattctgaatagtgaaaaccttcacagatagatcattttgaacacacaacgcgtctagacttctggcggttgccatagaatatacgtcgttcttatcccaattaccaactagaagtctgatcttaactcctctattaatggctgcttctataatggagttgtaaatatcgggccaatagtagctattaccgtcgacacgtgtagtgggaactatggccaaatgttcaatatctatactagtcttagctgacctgagtttatcaataactacatcggtatctagatctctagaatatcccaataggtgttccggagaatcagtaaagaacactccacctataggattcttaatatgatacgcagtgctaactggcagacaacaagccgcagagcataaattcaaccatgaattttttgcgctattaaaggctttaaaagtatcaaatcttctacgaagatctgtggccagcgggggataatcagaatatacacctaacgttttaatcgtatgtatagatcctccagtaaatgacgcgtttcctacataacatctttcatcatctgacacccaaaaacaaccgagtagtagtcccacattattttttttatctatattaacggttataaaatttatatccgggcagtgactttgtagctctcccagatttcttttccctcgttcatctagcaaaactattattttaatccctttttcagatgcctcttttagtttatcaaaaataagcgctcccctagtcgtactcagaggattacaacaaaaagatgctatgtatatatatttcttagctagagtgataatttcgttaaaacattcaaatgttgttaaatgatcggatctaaaatccatattttctggtagtgtttctaccagcctacattttgctcccgcaggtaccgatgcaaatggccacatttagttaacataaaaacttatacatcctgttctatcaacgattctagaatatcatcggctatatcgctaaaattttcatcaaagtcgacatcacaacctaactcagtcaatatattaagaagttccatgatgtcatcttcgtctatttctatatccgtatccattgtagattgttgaccgattatcgagtttaaatcattactaatactcaatccttcagaatacaatctgtatttcattgtaaatttataggcggtgtatttaagttggtagattttcaattatgtatcaatatagcaacagtagttcttgctcctccttgattctagcatcctcttcattattttcttctacgtacataaacatgtccaatacgttagacaacacaccgacgatggcggccgccacagacacgaatatgactagaccgatgaccatttaaaaacccctctctagctttcacttaaactgtatcgatcattcttttagcacatgtataatataaaaaaacattattctatttcgaatttaggcttccaaaaatttttcatccgtaaaccgataataatatatatagacttgttaatagtcggaataaatagattaatgcttaaactatcatcatctccacgattagagatacaatatttacattctttttgctgtttcgaaactttatcaatacacgttaatacaaacccaggaaggagatattgaaactgaggctgttgaaaatgaaacggtgaatacaataattcagataatgtaaaatcatgattccgtattctgatgatattagaactgctaatggatgtcgatggtatgtatctaggagtatctattttaacaaagcatcgatttgctaatatacaattatcattttgattaattgttattttattcatattcttaaaaggtttcatatttatcaattcttctacattaaaaatttccatttttaatttatgtagccccgcaatactcctcattacgtttcattttttgtctataatatccattttgttcatctcggtacatagattatccaattgagaagcgcatttagtagttttgtacattttaagtttattgacgaatcgtcgaaaactagttatagttaacattttattatttgataccctgatattaatacccctgccgttactattatttataactgatgtaacccacgtaacattggaattaactatcgatagtaatgcatcgacgcttccaaaattgtctattataaactcaccgataatttttttattacatgttttcatattcattaggattatcaaatctttaatcttactacgattgtatgcgttgatattacaagacgtcattctaaaagacggaggatttccatcaaatgccagacaatcacgtacaaagtacatggaaataggttttgttctattgcgcatcatagattcatatagaacacccgtagaaatactaatttgttttactctataaaatactaatgcatctatttcatcgttttgtataacgtctttccaagtgtcaaattccaaatttttttcattgatagtaccaaattcttctatctctttaactacttgcatagataggtaattacagtgatgcctacatgccgttttttgaaactgaatagatgcgtctagaagcgatcgtacgctagtcacaatcaccactttcatatttagaatatatgtatgtaaaaatatagtagaatttcattttgtttttttctatgctataaatgaattctcattttgcatctgctcatactccgttttatatcaataccaaagaaggaagatatctggttctaaaagccgttaaagtatgcgatgttagaactgtagaatgcgaaggaagtaaagcttcctgcgtactcaaagtagataaaccctcatcacccgcgtgtgagagaagaccttcgtccccgtccagatgcgagagaatgaataaccctggaaaacaagtcccgtttatgaggacggacatgctacaaaatatgttcgcggctaatcgcgataatgtagcttctagacttttgaactaaaatacaattatatctttttcgatattaataaatccgtgtcgtccaggttttttatctctttcagtatgtgaatagataggtattttatctctattcatcatcgaatttaagagatccgataaacattgtttgtattctccagatgtcagcatctgatacaacaatatatgtgcacataaacctctggcacttatttcatgtaccttccccttatcactaaggagaatagtatttgagaaatatgtatacatgatattatcatgaattagatatacagaatttgtaacactctcgaaatcacacgatgtgtcggcgttaagatctaatatatcactcgataacacattttcatctagatacactagacattttttaaagctaaaatagtctttagtagtgacagtaactatgcgattattttcatcgatgatacatttcatcggcatattattacgcttaccatcaaagactataccatgtgtatatctaacgtattctagcatagttgccatacgtgcattaaacttttcaggatctttggatagatcttccaatctatctatttgagaaaacatttttatcatgttcaatagttgaaacgtcggatccactatatagatattatctataaagattttaggaactacgttcatggtatcctggcgaatattaaaactatcaatgatatgattatcgttttcatcttttatcaccatatagtttctaagatatgggattttacttaatataatattatttcccgtaataaattttattagaaatgccaaatctataagaaaagtcctcgaattagtttgaagaatatctatatcgccgtaccgtatatttggattaattagatatagagaatatgatccgtaacatatacaacttttattatggcgtctaagatattcttccatcaacttattaacatttttgactagggaagatacattatgacgtcccattacttttgccttgtctattattgcgacgttcatagaatttagcatatctcttgccaattcttccattgatgttacattataagaaattttagatgaaattacatttggagctttaatagtaagaactcctaatatgtccgtgtatgtggtcactaatacagattgtagttctataatcgtaaataatttacctatattatatgtttgagtctgtttagaaaagtagctaagtatacgatcttttatttctgatgcagatgtatcaacatcggaaaaaaatctttttttattcttttttactaaagatacaaatatgtctttgttaaaaacagttattttttgaatatttctagcttgtaattttaacatatgatattcattcacactaggtactctgcctaaataggtttctataatctttaatgtaatattaggaaaagtattctgatcaggattcctattcattttgaggatttaaaactctgattattgtctaatatggtctctacgcaaactttttcacagagcgatagagtttttgataactcgtttttcttaagaaatataaaactactgtctccagagctcgctctatcttttattttatttaattcgatacaaactcctgatactggttcagaaagtaattcattaattttcagtcctttatagaagatatttaatatagataatacaaaatcttcagtttttgatatcgatctgattgatcctagaactagatatattaataacgtgctcattaggcagtttatggcagcttgataattagatatagtatattccagttcatatttattagataccgcattgcccagattttgatattctatgaattcctctgaaaataaatccaaaataactaaacattctattttttgtggattagtgtactctcttccctctatcatgttcactactggtgtccacgatgataaatatctagagggaatataatatagtccataggatgccaatctagcaatgtcgaataactgtaatttgattcttcgttcttcattatgaattgattcttgaggtataaacctaacacaaattatattattagacttttcgtatgtaatgtctttcatgttataagtttttaatcctggaatagaatctattttaatgaggcttttaaacgcagagttctccaacgagtcaaagcataatactctgttgtttttcttatatacgatgttacgattttcttctttgaatggaataggtttttgaattagtttataattacaacataatagataaggaagtgtgcaaatagtacgcggaaaaaacataatagctcccctgttttcatccatggttttaagtaaatgatcactggcttctttagttaatggatattcgaacattaaccgtttcatcatcattggacagaatccatatttcttaatgtaaagagtgatcaaatcattgtgtttattgtaccatcttgttgtaaatgtgtattcggttatcggatctgctcctttttctattaaagtatcgatgtcgatctcgtctaagaattcaactatatcgacatatttcatttgtatacacataaccattactaacgtagaatgtataggaagagatgtaacgggaacagggtttgttgattcgcaaactattctaatacataattcttctgttaatacgtcttgcacgtaatctattatagatgccaagatatctatataattattttgtaagatgatgttaactatgtgatctatataagtagtgtaataattcatgtatttcgatatatgttccaactctgtctttgtgatgtctagtttcgtaatatctatagcatcctcaaaaaatatattcgcatatattcccaagtcttcagttctatcttctaaaaaatcttcaacgtatggaatataataatctattttacctcttctgatatcattaatgatatagtttttgacactatcttctgtcaattgattcttattcactatatctaagaaacggatagcgtccctaggacgaactactgccattaatatctctattatagcttctggacataattcatctattataccagaattaatgggaactattccgtatctatctaacatagttttaagaaagtcagaatctaagacctgatgttcatatattggttcatacatgaaatgatctctattgatgatagtgactatttcattctctgaaaattggtaactcattctatatatgctttccttgttgatgaaggatagaatatactcaatagaatttgtaccaacaaactgttctcttatgaatcgtatatcatcatctgaaataatcatgtaaggcatacatttaacaattagagacttgtctcctgttatcaatatactattcttgtgataatttatgtgtgaggcaaatttgtccacgttctttaattttgttatagtagatatcaaatccaatggagctacagttcttggcttaaacagatatagtttttctggaacaaattctacaacattattataaaggactttgggtagataagtgggatgaaatcctattttaattaatgctatcgcattgtcctcgtgcaaatatccaaacgcttttgtgatagtatggcattcattgtctagaaacgctctacgaatatctgtgacagatatcatctttagagaatatactagtcgcgttaatagtactacaatttgtattttttaatctatctcaataaaaaaattaatatgtatgattcaatgtataactaaactactaactgttattgataactagaatcagaatctaatgatgacgtaaccaagaagtttatctactgccaatttagctgcattatttttagcatctcgtttagattttccatctgccttatcgaatactcttccgtcgatgtctacacaggcataaaatgtaggagagttactaggcccaactgattcaatacgaaaagaccaatctctcttagttatttggcagtactcattaataatggtgacagggttagcatctttccaatcaataatttttttagccggaataacatcatcaaaagacttatgatcctctctcattgatttttcgcgggatacatcatctattatgacgtcagccatagcatcagcatccggcttatccgcctccgttgtcataaaccaacgaggaggaatatcgtcggagctgtacaccatagcactacgttgaagatcgtacagagctttattaacttctcgcttctccatattaagttgtctagttagttgtgcagcagtagctccttcgattccaatgtttttaatagccgcacacacaatctctgcgtcagaacgctcgtcaatatagatcttagacatttttagagagaactaacacaaccagcaataaaactgaacctactttatcatttttttattcatcatcctctggtggttcgtcgtttctatcgaatgtagctctgattaacccgtcatctataggtgatgctggttctggagattctggaggagatggattattatctggaagaatctctgttatttccttgttttcatgtatcgattgcgttgtaacattaagattgcgaaatgctctaaatttgggaggcttaaagtgttgtttgcaatctctacacgcgtgtctaactagtggaggttcgtcagctgctctagtttgaatcatcatcggcgtagtattcctacttttacagttaggacacggtgtattgtatttctcgtcgagaacgttaaaataatcgttgtaactcacatcctttattttatctatattgtattctactcctttcttaatgcattttataccgaataagagatagcgaaggaattctttttcggtgccgctagtacccttaatcatatcacatagtgttttatattccaaatttgtggcaatagacggtttatttctatacgatagtttgtttctggaatcctttgagtattctataccaatattattctttgattcgaatttagtttcttcgatattagattttgtattacctatattcttgatgtagtactttgatgatttttccatggcccattctattaagtcttccaagttggcatcatccacatattgtgatagtaattctcggatatcagtagcggctaccgccattgatgtttgttcattggatgagtaactactaatgtatacattttccatttataacacttatgtattaactttgttcatttatattttttcattattatgttgatattaacaaaagtgaatatatatgttaataattgtattgtggttatacggctacaatttcataatgagtggaagtcagtgtccgatgatcaatgacgatagctttactctgaaaagaaagtatcaaatcgatagtgcggagtcaacaatgaaaatggataagaagaggacaaagtttcagaatagagccaaaatggtaaaagaaataaatcagacaataagagcagcacaaactcattacgagacattgaaactaggatacataaaatttaagagaatgattaggactactactctagaagatatagcaccatctattccaaataatcagaaaacttataaactattctcggacatttcagccatcggcaaagcatcacagaatccgagtaagatggtatatgctctgctgctttacatgtttcccaatttgtttggagatgatcatagattcattcgttatagaatgcatccaatgagtaaaatcaaacacaagatcttctctcctttcaaacttaatcttattagaatattagtggaagaaagattctataataatgaatgcagatctaataaatggagaataattggaacacaagttgataaaatgttgatagctgaatctgataaatatacaatagatgcaaggtataacctaaaacccatgtatagaatcaagggaaaatctgaagaagataccctcttcatcaaacagatggtagaacaatgtgtgacatcccaggaattggtggaaaaagtgttgaagatactgtttagagatttgttcaagagtggagaatacaaagcgtacagatacgatgatgatgtagaaaatggatttattggattggatacactaaaattaaacattgttcatgatatagttgaaccatgtatgcctgttcgtaggccagtggctaagatactgtgtaaagaaatggtaaataaatactttgagaatccgctacatattattggtaaaaatcttcaagagtgcattgactttgttagtgaataggcatttcatctttctccaatactaattcaaattgttaaattaataatggatagtataaatagttattagtgataaaatagtaaaaataattattagaataagagtgtagtatcatagataactctcttctataaaaatggattttattcgtagaaagtatcttatatacacagtagaaaataatatagattttttaaaggatgatacattaagtaaagtaaacaattttaccctcaatcatgtactagctctcaagtatctagttagcaattttcctcaacacgttattactaaggatgtattagctaataccaatttttttgttttcatacatatggtacgatgttgtaaagtgtacgaagcggttttacgacacgcatttgatgcacccacgttgtacgttaaagcattgactaagaattatttatcgtttagtaacgcaatacaatcgtacaaggaaaccgtgcataaactaacacaagatgaaaaatttttagaggttgccgaatacatggacgaattaggagaacttataggcgtaaattatgacttagttcttaatccattatttcacggaggggaacccatcaaagatatggaaatcatttttttaaaactgtttaagaaaacagacttcaaagttgttaaaaaattaagtgttataagattacttatttgggcttacctaagcaagaaagatacaggcatagagtttgcggataatgatagacaagatatatacactctatttcaacaaactggtagaatcgtccatagcaatctaacagaaacgtttagagattatatctttcccggagataagactagctattgggtgtggttaaacgaaagtatagctaatgatgcggatattgttcttaatagacacgccattaccatgtatgataaaattcttagttatatatactctgagataaaacaaggacgcgttaataaaaacatgcttaagttagtttatatctttgagcctgaaaaagatatcagagaacttctgctagaaatcatatatgatattcctggagatatcctatctattattgatgcaaaaaacgacgattggaaaaaatattttattagtttttataaagctaattttattaacggtaatacatttattagtgatagaacgtttaacgaggacttattcagagttgttgttcaaatagatcccgaatatttcgataatgaacgaattatgtctttattctctacgagtgctgcggacattaaacgatttgatgagttagatattaataacagttatatatctaatataatttatgaggtgaacgatatcacattagatacaatggatgatatgaagaagtgtcaaatctttaacgaggatacgtcgtattatgttaaggaatacaatacatacctgtttttgcacgagtcggatcccatggtcatagagaacggaatactaaagaaactgtcatctataaaatccaagagtaaacggctgaacttgtttagcaaaaacattttaaaatattatttagacggacaattggctcgtctaggtcttgtgttagatgattataaaggagacttgttagttaaaatgataaaccatcttaagtctgtggaggatgtatccgcattcgttcgattttctacagataaaaaccctagtattcttccatcgctaatcaaaactattttagctagttataatatttccatcatcgtcttatttcaaaggtttttgagagataatctatatcatgtagaagaattcttggataaaagcatccatctaaccaagacggataagaaatatatacttcaattgataagacacggtagatcatagaacagaccaaatatattattaataatttggtatatacatagatattaattatcacatattaaaaattcacacatttttgataaatgggaactgctgcaacaattcagactcccaccaaattaatgaataaagaaaatgcagaaatgattttggaaaaaattgttgatcatatagttatgtatattagtgacgaatcaagtgattcagaaaataatcctgaatatattgattttcgtaacagatacgaagactatagatctctcattataaaaagtgatcacgagtttgtaaagctatgtaaaaatcatgcagagaaaagttctccagaaacgcaacaaatgattatcaaacacatatacgaacaatatcttattccagtatctgaagtactattaaaacctataatgtccatgggtgacataattacatataacggatgtaaagacaatgaatggatgctagaacaactctctaccctaaactttaacaatctccgcacatggaactcatgtagcataggcaatgtaacgcgtctgttttatacattttttagttatctgatgaaagataaactaaatatataagtataatcccattctaatactttaacctgatgtattagcatcttattagaatattaacctaactaaaagacataacataaaaactcattacatagttgataaaaagcggtaggatataaatattatggctgccaccgttccgcgttttgacgacgtgtacaaaaatgcacaaagaagaattctagatcaagaaacattttttagtagaggtctaagtagaccgttaatgaaaaacacatatctatttgataattacgcgtatggatggataccagaaactgcaatttggagtagtagatacgcaaacttagatgcaagtgactattatcccatttcgttgggattacttaaaaagttcgagtttctcatgtctctatataaaggtcctattccagtatacgaagaaaaagtaaatactgaattcatagccaatggatcgttctctggtagatacgtatcatatcttcgaaagttttctgctcttccaacaaacgagtttattagttttttattattgacctccatccctatctataatatcttattctggtttaaaaacacacagtttgatattactaaacacacattattcagatacgtctatacagataatgccaaacacctggcgttggctaggtatatgcatcaaacaggagactataagcctttgtttagtcgtctcaaagagaattatatatttaccggtcccgttccaatatgtatcaaagatatagatcaccctaatcttagtagagcaagaagtccatccgattatgagacattagctaatattagtactatattgtactttaccaagtatgatccggtattaatgtttttattgttttacgtacctgggtattcaattactacaaaaattactccagccgtagaatatctaatggataaactgaatctaacaaagagcgacgtacaactgttgtaaattattttatgcttcgtaaaatgtaggttttgaaccaaacattctttcaaagaatgagatgcataaaactttattatccaatagattgactatttcggacgtcaatcgtttaaagtaaacttcgtaaaatattctttgatcactgccgagtttaaaacttctatcgataattgtctcatatgttttaatatttacaagttttttggtccatggtacattagccggacaaatatatgcaaaataatatcgttctccaagttctatagtttctggattatttttattatattcagtaaccaaatacatattagggttatctgcggatttataatttgagtgatgcattcgactcaacataaataattctagaggagacgatctactatcaaattcggatcgtaaatctgtttctaaagaacggagaatatctatacatacctgattagaattcatccgtccttcagacaacatctcagacagtctggtcttgtatgtcttaatcatattcttatgaaacttggaaacatctcttctagtttcactagtacctttattaattctctcaggtacagattttgaattcgacgatgctgagtatttcatcgttgtatatttcttcttcgattgcataatcagattcttatataccgcctcaaactctattttaaaattattaaacaatactctattattaatcagtcgttctaactctttcgctatttctatagacttatcgacatcttgactgtctatctctgtaaacacggagtcggtatctccatacacgctacgaaaacgaaatctgtaatctataggcaacgatgttttcacaatcggattaatatctctatcgtccatataaaatggattacttaatggattggcaaaccgtaacataccgttagataactctgctccatttagtaccgattctagatacaagatcattctacgtcctatggatgtgcaactcttagccgaagcgtatgagtatagagcactatttctaaatcccatcagaccatatactgagttggctactatcttgtacgtatattgcatggaatcatagatggccttttcagttgaactggtagcctgttttaacatctttttatatctggctctctctgccaaaaatgttcttaatagtctaggaatggttccttctatcgatctatcgaaaattgctatttcagagatgaggttcggtagtctaggttcacaatgaaccgtaatatatctaggaggtggatatttctgaagcaatagctgattatttatttcttcttccaatctattggtactaacaacgacaccgactaatgtttccggagatagatttccaaagatacacacattaggatacagactgttataatcaaagattaatacattattactaaacattttttgttttggagcaaataccttaccgccttcataaggaaacttttgttttgtttctgatctaactaagatagttttagtttccaacaatagctttaacagtggacccttgatgactgtactcgctctatattcgaataccatggattgaggaagcacatatgttgacgcacccgcgtctgtttttgtttctactccataatactcccacaaatactgacacaaacaagcatcatgaatacagtatctagccatatctaaagctatgtttagattataatccttatacatctgagctaaatcaacgtcatcctttccgaaagataatttatatgtatcattaggtaaagtaggacataatagtacgactttaaatccattttcccaaatatctttacgaattactttacatataatatcctcatcaacagtcacataattacctgtggttaaaacctttgcaaatgcagcggctttgcctttcgcgtctgtagtatcgtcaccgataaacgtcatttctctaactcctctatttaatactttacccatgcaactgaacgcgttcttggatatagaatccaatttgtacgaatccaatttttcagatttttgaatgaatgaatatagatcgaaaaatatagttccattattgttattaacgtgaaacgtagtattggccatgccgcctactcccttatgactagactgatttctctcataaatacagagatgtacagcttcctttttgtccggagatctaaagataatcttctctcctgttaataactctagacgattagtaatatatctcagatcaaagttatgtccgttaaaggtaacgacgtagtcgaacgttagttccaacaattgtttagctattcgtaacaaaactatttcagaacatagaactagttctcgttcgtaatccatttccattagtgactgtatcctcaaacatcctctatcgacggcttcttgtatttcctgttccgttaacatctcttcattaatgagcgtaaacaataatcgtttaccacttaaatcgatataacagtaacttgtatgcgagattgggttaataaatacagaaggaaacttcttatcgaagtgacactctatatctagaaataagtacgatcttgggatatcgaatctaggtatttttttagcgaaacagttacgtggatcgtcacaatgataacatccattgttaatctttgtcaaatattgctcgtccaacgagtaacatccgtctggagatatcccgttagaaatataaaaccaactaatattgagaaattcatccatggtggcattttgtatgctgcgtttctttggctcttctatcaaccacatatctgcgacggagcattttctatctttaatatctagattataacttattgtctcgtcaatgtctatagttctcatctttcccaacggcctcgcattaaatggaggaggagacaatgactgatatatttcgtccgtcactacgtaataaaagtaatgaggaaatcgtataaatacggtctcaccatttcgacatctggatttcagatataaaaatctgttttcaccgtgactttcaaaccaattaatgcaccgaacatccatttatagaatttagaaatatattttcatttaaatgaatcccaaacattggggaagagccgtatggaccattatttttatagtactttcgcaagcgggtttagacggcaacatagaagcgtgtaaacgaaaactatatactatagttagcactcttccatgtcctgcatgtagacggcacgcgactattgctatagaggacaataatgtcatgtctagcgatgatctgaattatatttattattttttcatcagattatttaacaatttggcatctgatcccaaatacgcaatcgatgtgtcaaaggttaaacctttataaacttaacccattataaaacttatgattagtcacgactgaaataaccgcgtgattattttttggtataattctacacggcatggtttctgtgactatgaattcaacccccgttacattagtgaaatctttaacaaacagcaagggttcgtcaaagacataaaactcattgtttacaatcgaaatagaccccctatcacacttaaaataaaaaatatccttatcctttaccaccaaataaaattctgattggtcaatgtgaatgtattcacttaacagttccacaaatttatttattaactccgaggcacatacatcgtcggtattttttatggcaaactttactcttccagcatccgtttctaaaaaaatattaacgagttccatttatatcatccaatattattgaaatgacgttgatggacagatgatacaaataagaaggtacggtacctttgtccaccatctcctccaattcatgctctattttgtcattaactttaatgtatgaaaacagtacgccacatgcttccatgacagtgtgtaacactttggatacaaaatgtttgacattagtataattgtttaagactgtcaatctataatagatagtagctataatatattctatgatggtattgaagaagatgacaatcttggcatattgatcatttaacacagacatggtatcaacagatagcttgaatgaaagagaatcagtaattggaataagcgtcttctcgatggagtgtccgtataccaacatgtctgatattttgatgtattccattaaattatttagttttttctttttattctcgttaaacagcatttctgtcaacggaccccaacatcgttgaccgattaagttttgattgatttttccgtgtaaggcgtatctagtcagatcgtatagcctatccaataatccatcatctgtgcgtagatcacatcgtacactttttaattctctatagaagagcgacagacatctggaacaattacagacagcaatttctttattctctacagatgtaagatacttgaagacattcctatgatgatgcagaattttggataacacggtattgatggtatctgttaccataattcctttgatggctgatagtgtcagagcacaagatttccaatctttgacaatttttagcaccattatctttgttttgatatctatatcagacagcatggtgcgtctgacaacacagggattaagacggaaagatgaaatgattctctcaacatcttcaatggataccttgctattttttctggcattatctatatgtgcgagaatatcctctagagaatcagtatcctttttgatgatagtggatctcaatgacatgggacgtctaaaccttcttattctatcaccagattgcatggtgatttgtcttctttcttttatcataatgtaatctctaaattcatcggcaaattgtctatatctaaaatcataatatgagatgtttacctctacaaatatctgttcgtccaatgttagagtatctacatcagttttgtattccaaattaaacatggcaacggatttaattttatattcctctattaagtcctcgtcgataataacagaatgtagataatcatttaatccatcgtacatggttggaagatgcttgttgacaaaatctttaattgtcttgatgaaggtgggactatatctaacatcttgattaataaaatttataacattgtccataggatactttgtaactagttttatacacatctcttcatcggtaagtttagacagaatatcgtgaacaggtggtatattatattcatcagatatacgaagaacaatgtccaaatctatattgtttaatatattatatagatgtagtgtagctcctacaggaatatctttaactaagtcaatgatttcatcaaccgttagatctattttaaagttaatcatataggcattgatttttaaaaggtatgtagccttgactacattctcattaattaaccattccaagtcactgtgtgtaagaagattatattctatcataagcttgactacatttggtcccgataccattaaagaattcttatgatataaggaaacagcttttaggtactcatctactctacaagaattttggagagccttaacgatatcagtgacgtttattatttcaggaggaaaaaacctaacattgagaatgtcggagttaatagcttccagatacagtgattttggcaatagtccgtgtaatccataatccagtaacacgagctggtgcttgctagacaccttttcaatgtttaatttttttgaaataagctttgataaagccttcctcgcaaattccggatacatgaacatgtcggcgacatgattaagtattgttttttcattatttttatattttctcaacaagttctcaataccccaatagatgatagaatatcacccaatgcgtccatgttgtctatttccaacaggtcgctatatccaccaatagaagttttcccaaaaaagattctaggaacagttctaccaccagtaatttgttcaaaataatcccgcaattcattttcgggtttaaattctttaatatcgacaatttcatacgctcctcttttgaaactaaacttatttagaatatccagtgcatttctacaaaaaggacatgtatacttgacaaaaattgtcactttgttattggccaacctttgttgtacaaattcctcggccattttaatatttaagtgatataaaactatctcgacttatttaactctttagtcgagatatatggacgcagatagctatatgatagccaactacagaaggcaaacgctataaaaaacataattacgacgagcatatttataaatatttttattcagcattacttgatatagtaatattaggcacagtcaaacattcaaccactctcgatacattaactctctcattttctttaacaaattctgcaatatcttcgtaaaaagattcttgaaactttttagaatatctatcgactctagatgaaatagcgttcgtcaacatactatgttttgtatacataaaggcgcccattttaacagtttctagtgacaaaatgctagcgatcctaggatcctttagaatcacatagattgacgattcgtctctcttagtaactctagtaaaataatcatacaatctagtacgcgaaataatattatccttgacttgaggagatctaaacaatctagttttgagaacatcgataagttcatcgggaatgacatacatactatctttaatagaactcttttcatccagttgaatggattcgtccttaaccaactgattaatgagatcttctattttatcattttccagatgatatgtatgtccattaaagttaaattgtgtagcgcttctttttagtctagcagccaatactttaacatcactaatatcgatatacaaaggagatgatttatctatggtattaagaattcgtttttcgacatccgtcaaaaccaattcctttttgcctgtatcatccagttttccatcctttgtaaagaaattattttctactagactattaataagactgataaggattcctccataattgcacaatccaaactttttcacaaaactagactttacgagatctacaggaatgcgtacttcaggtttcttagcttgtgattttttcttttgcggacattttcttgtgaccaactcatctaccatttcattgattttagcagtgaaataagctttcaatgcacgggcactgatactattgaaaacgagttgatcttcaaattccgccatttaagttcaccaaacaacttttaaatacaaatatatcaatagtagtagaataagaactataaaaaaaataataattaaccaataccaaccccaacaaccggtattattagttgatgtgactgttttctcatcacttagaacagatttaacaatttctataaagtctgtcaaatcatcttccggagaccccataaatacaccaaatatagcggcgtacaacttatccatttatacattgaatattggcttttctttatcgctatcttcatcatattcatcatcaatatcaacaagtcccagattacgagccagatcttcttctacattttcagtcattgatacacgttcactatctccagagagtccgataacgttagccaccacttctctatcaatgattagtttcttgagtgcgaatgtaatttttgtttccgttccggatctatagaagacgataggtgtgataattgccttggccaattgtctttctcttttactgagtgattctagttcaccttctatagatctgagaatggatgattctccagccgaaacatattctaccatggctccgtttaatttgttgatgaagatggattcatccttaaatgttttctctgtaatagtttccaccgaaagactatgcaaagaatttggaatgcgttccttgtgcttaatgtttccatagacggcttctagaagttgatacaacataggactagccgcggtaacttttatttttagaaagtatccatcgcttctatcttgtttagatttatttttataaagtttagtctctccttccaacataataaaagtggaagtcatttgactagataaactatcagtaagttttatagagatagacgaacaattagcgtattgagaagcatttagtgtaacgtattcgatacattttgcattagatttactaatcgattttgcatactctataacacccgcacaagtctgtagagaatcgctagatgcagtaggtcttggtgaagtttcaactctcttcttgattaccttactcatgattaaacctaaataattgtactttgtaatataatgatatatattttcactttatctcatttgagaataaaaatgtttttgtttaaccactgcatgatgtacagatttcggaatcgcaaaccaccagtggttttattttatccttgtccaatgtgaattgaatgggagcggatgcgggtttcgtacgtagatagtacattcccgtttttagaccgagactccatccgtaaaaatgcatactcgttagtttggaataactcggatctgctatatggatattcatagattgactttgatcgatgaaggctcccctgtctgcagccatttttatgatcgtcttttgtggaatttcccaaatagttttataaactcgcttaatatcttctggaaggtttgtattctgaatggatccaccatctgccataatcctattcttgatctcatcattccataattttctctcggttaaaactctaaggagatgcggattaactacttgaaattctccagacaatactctccgagtgtaaatattactggtatacggttccaccgactcattatttcccaaaatttgagcagttgatgcagtcggcataggtgccaccaataaactatttctaagaccgtatgttctgattttatcttttagaggttcccaattccaaagatccgacggtacaacattccaaagatcatattgtagaataccgttactggcgtacgatcctacatatgtatcgtatggtccttccttctcagctagttcacaactcgcctctaatgcaccgtaataaatggtttcgaagatcttcttatttagatcttgtgcttccaggctatcaaatggataatttaagagaataaacgcgtccgctaatccttgaacaccaataccgataggtctatgtctcttattagagatttcagcttctggaataggataataattaatatctataattttattgagatttctgacaattactttgaccacatccttcagtttgagaaaatcaaatcgcccatctattacaaacatgttcaaggcaacagatgccagattacaaacggctacctcattagcatccgcatattgtattatctcagtgcaaagattactacacttgatagttcctaaattttgttgattactctttttgttacacgcatccttataaagaatgaatggagtaccagtttcaatctgagattctataatcgctttccagacgactcgagcctttattatagatttgtatctcctttctctttcgtatagtgtatacaatcgttcgaactcgtctccccaaacattgtccaatccaggacattcatccggacacatcaacgaccactctccgtcatccttcactcgtttcataaagagatcaggaatccaaagagctataaatagatctctggttctatgttcctcgtttcctgtattctttttaagatcgaggaacgccataatatcagaatgccacggttccaagtatatggccataactccaggccgtttgtttcctccctgatctatgtatctagcggtgttattataaactctcaacattggaataataccgtttgatataccattggtaccggagatatagcttccactggcacgaatattactaattgatagacctattccccctgccattttagagattaatgcgcatcgttttaacgtgtcatagataccctctatgctatcatcgatcatgttaagtaaaaaacagctagacatttggtgacgactagttcccgcattaaataaggtaggagaagcgtgcgtaaaccatttttcagaaagtagattgtacgtctcaatagctgagtctatatcccattgatgaattcctactgcgacacgcattaacatgtgctgaggtctttcaacgatcttgttgtttattttcaacaagtaggatttttccaaagttttaaaaccaaaatagttgtatgaaaagtctcgttcgtaaataataaccgagttgagtttatccttatatttgttaactatatccatggtgatacttgaaataatcggagaatgtttcccatttttaggattaacatagttgaataaatcctccatcacttcactaaatagtttttttgtttccttgtgtagatttgatacggctattctggcggctagaatggcataatccggatgttgtgtagtacaagtggctgctatttcggctgccagagtgtccaattctaccgttgttactccattatatattccttgaataaccttcatagctattttaataggatctatatgatccgtgtttaagccataacataattttctaatacgagacgtgattttatcaaacatgacattttccttgtatccatttcgtttaatgacaaacatttttgttggtgtaataaaaaaattatttaacttttcattaatagggatttgacgtatgtagcgtacaaaattatcgttcctggtatatagataaagagtcctatatatttgaaaatcgttacggctcgattaaactttaatgattgcatagtgaatatatcattaggatttaactccttgactatcatggcggcgccagaaattaccatcaaaagcattaatacagttatgccgatcgcagttagaacggttatagcatccaccatttatatctaaaaattagatcaaagaatatgtgacaaagtcctagttgtatactgagaattgacgaaacaatgtttcttacatatttttttcttattagtaactgacttaatagtaggaactggaaagctagacttgattattctataagtatagatacccttccagataatgttctctttgataaaagttccagaaaatgtagaattttttaaaaagttatcttttgctattaccaagattgtgtttagacgcttattattaatatgagtaatgaaatccacaccgcctctagatatcgcctttatttccacattagatggtaaatccaatagtgaaactatctttttaggaatgtatggactcgcgtttagaggagtgaacgtcttgggcgtcggaaaggatgattcgtcaaacgaataaacaatttcacaaatggatgttaatgtattagtaggaaatttcttgacgctagtggagttgaagattctaatggatgatgttctacctatttcatccgataacatgttaatttccgacaccaacggttttaatatttcgatgatatacggtagtctctctttcggacttatatagcttattccacaatacgagtcattatatactccaaaaaacaaaataactagtataaaatctgtatcgaatgggaaaaacgaaattatcgacataggtatagaatccggaacattgaacgtattaatacttaattctttttctgtggtaagtaccgataggttattgacattgtatggttttaaatattctataacttgagacttgatagatattagtgatgaattgaaaattatttttatcaccacgtgtgtttcaggatcatcgtcgacgcccgtcaaccaaccgaatggagtaaaataaatatcattaatatatgctctagatattagtatttttatcaatcctttgattatcatcttctcgtaggcgaatgattccatgatcaagagtgatttaagaacatcctccggagtattaatgggcttagtaaacagtccatcgttgcaataataaaagttatccaagttaaaggatattatgcattcgtttaaagatatcacctcatctgacggagacaattttttggtaggttttagagactttgaagctacttgtttaacaaagttattcatcgtcgtctactattctatttaattttgtagttaatttatcacatatcacattaattgactttttggtccatttttccatacgtttatattcttttaatcctgcgttatccgtttccgttatatccagtgatagatcgtgcaggttaaatagaatgctcttaaataatgtcatttttttatccgctaaaaatttaaagaatgtataaacctttttcagagatttgaaactcttaggtggtgtcctagtacacaatatcataaacaaactaataaacattccacattcagattccaacagctgattaacttccacattaatacagcctattttcgctccaaatgtacattcgaaaaatctgaataaaacatcgatgtcacaatttgtattatccaatacagaatgtctgtgattcgtgttaaaaccatcggagaaggaatagaaataaaaattattatagtggtggaattcagttggaatattgcctccggagtcataaaaggatactaaacattgttttttatcataaattacacatttccaatgagacaaataacaaaatccaaacattacaaatctagaggtagaacttttaattttgtctttaagtatatacgataagatatgtttattcataaacgcgtcaaatttttcatgaatcgctaaggagtttaagaatctcatgtcaaattgtcctatataatccacttcggatccataagcaaactgagagactaagttcttaatacttcgattgctcatccaggctcctctctcaggctctattttcatcttgacgacctttggattttcaccagtatgtattcctttacgtgataaatcatcgattttcaaatccatttgtgagaagtctatcgccttagatactttttcccgtagtcgaggtttaaaaaaatacgctaacggtatactagtaggtaactcaaagacatcatatatagaatggtaacgcgtctttaactcgtcggttaactctttcttttgatcgagttcgtcgctactattgggtctgctcaggtgccccgactctactagttccaacatcataccgataggaatacaagacactttgccggcggttgtagatttatcatatttctccactacatatccgttacaatttgttaaaaatttagatacatctatattgctacataatccagctagtgaatatatatgacataataaattggtaaatcctagttctggtattttactaattactaaatctgtatatctttccatttatcatggaaaagaatttaccagatatcttcttttttccaaactgcgttaatgtattctcttacaaatattcacaagatgaattcagtaatatgagtaaaacggaacgtgatagtttctcattggccgtgtttccagttataaaacatagatggcataacgcacacgttgtaaaacataaaggaatatacaaagttagtacagaagcacgtggaaaaaaagtatctcctccatcactaggaaaacccgcacacataaacctaaccacgaaacaatatatatacagtgaacacacaataagctttgaatgttatagttttctaaaatgtataacaaatacagaaatcaattcgttcgatgagtatatattaagaggactattagaagctggtaatagtttacagatattttccaattccgtaggtaaacgaacagatactataggtgtactagggaataagtatccatttagcaaaattccattggcctcattaactcctaaagcacaacgagagatattttcagcgtggatttctcatagacctgtagttttaactggaggaactggagtgggtaagacgtcacaggtacccaagttattgctttggtttaattatttatttggtggattctctactctagataaaatcactgactttcacgaaagaccagtcattctatctcttcctaggatagctttagttagattgcatagcaataccattttaaaatcattgggatttaaggtactagatggatctcctatttctttacggtacggatctataccggaagaattaataaacaaacaaccaaaaaaatatggaattgtattttctacccataagttatctctaacaaaactatttagttatggcactcttattatagacgaagttcatgagcatgatcaaataggagatattattatagcagtagcgagaaagcatcatacgaaaatagattctatgtttttaatgactgccacgttagaggatgacagggaacggctaaaagtatttttacctaatcccgcatttatacatattcctggagatacactgtttaaaattagcgaggtatttattcataataagataaatccatcttccagaatggcatacatagaagaagaaaagagaaatttagttactgctatacagatgtatactcctcctgatggatcatccggtatagtctttgtggcatccgttgcacagtgtcacgaatataaatcatatttagaaaaaagattaccgtatgatatgtatattattcatggtaaggtcttagatatagacgaaatattagaaaaagtgtattcatcacctaatgtatcgataattatttctactccttatttggaatccagcgttactatacgcaatgttacacacatttatgatatgggtagagtttttgtccccgctccttttggaggatcgcaagaatttatttctaaatctatgagagatcaacgaaaaggaagagtaggaagagttaatcctgggacatacgtatatttctatgatctgtcttatatgaagtctatacagcgaatagattcagaatttctacataattatatattgtacgctaataagtttaatctaacactccccgaagatttgtttataatccctacaaatttggatattctatggcgtacaaaggaatatatagactcgttcgatattagtacagaaacatggaataaattattatccaattattatatgaagatgatagagtatgctaaactttatgtactaagtcctattctcgctgaggagttggataactttgagaggacgggagaattaactagtattgtacgagaagccattttatctctaaatttacgaattaagattttaaattttaaacataaagatgatgatacgtatatacacttttgtaaaatattattcggtgtctataacggaacaaacgctactatatattatcatagacctctaacgggatatatgaatatgatttcagatactatatttgttcctgtagataataactaaaaatcaaactctaatgaccacatctttttttagagatgaaaaattttccacatctccttttgtagacacgactaaacattttgcagaaaaaagtttattagtgtttagataatcgtatacttcatcagtgtagatagtaaatgtgaacagataaaaggtattcttgctcaatagattggtaaattccatagaatatattaatcctttcttcttgagatcccacatcatttcaaccagagacgttttatccaatgatttacctcgtactataccacatacaaaactagattttgcagtgacgtcgtacctggtattcctaccaaacaaaattttacttttagttcttttagaaaattctaaggtagaatctctatttgccaatatgtcatctatggaattaccactagcaaaaaatgatagaaatatatattgatacatcgcagctggttttgatctactatactttaaaaacgaatcagattccataattgcctgtatatcatcagctgaaaaactatgttttacacgtattccttcggcatttctttttaatgatatatcttgtttagacaatgataaagttatcatgtccatgagagacgcgtctccgtatcgtataaatatttcattagatgttagacgcttcattaggggtatacttctataaggtttcttaatcagtccatcattggttgcgtcaagaactactatcggatgttgttgggtatctctagtgttacacatggccttactaaagtttgggtaaataactatgatatctctattaattatagatgcatatatttcattcgtcaaggatattagtatcgacttgctatcgtcattaatacgtgtaatgtaatcatataaatcatgcgatagccaaggaaaattcaaatagatgttcatcatataatcgtcgctataattcatattaatactttgacattgactaatttgtaatatagcctcgccacgaagaaagctctcgtattcagtttcatcgataaaggataccgttaaatataactggttgccgatagtctcatagtctattaagtggtaagtttcgtacaaatacagaatccctaaaatattatctaatgttggattaatctttaccataactgtataaaatggagacggagtcataactattttaccgtttgtacttactggaatagatgaaggaataatctccggacatgctggtaaagacccaaatgtctgtttgaagaaatccaatgttccaggtcctaatctcttaacaaaaattacgatattcgatcccgatatcctttgcattctatttaccagcatatcacgaactatattaagattatctatcatgtctattctcccaccgttatataaatcgcctccgctaagaaacgttagtatatccatacaatggaatacttcatttctaaaatagtattcgttttctaattctttaatgtgaaatcgtatactagaaagggaaaaattatctttgagttttccgttagaaaagaaccacgaaactaatgttctgattgcgtccgattccgttgctgaattaatggatttacaccaaaaactcatataacttctagatgtagaagcattcgctaaaaaattagtagaatcaaaggatataagtagatgttccaacaagtgagcaattcccaagatttcatctatatcattctcgaatccgaaattagaaattcccaagtagatatcctttttcatccgatcattgatgaaaatacgaactttattcggtaagacaatcatttactaaggagtaaaataggaagtaatgttcgtatgtcgttatcatcgtataaattaaaggtgtgttttttaccattaagtgacattataattttaccaatattggaattataatataggtgtatttgcgcactcgcgacggttgatgcatcggtaaatatagctgtatctaatgttctagtcggtatttcatcatttcgctgtctaataatagcgttttctctatctgtttccattacagctgcctgaagtttattggtcggataatatgtaaaataataagaaatacatacgaataacaaaaataaaataagatataataaagatgccatttagagatctaattttgttcaacttgtccaaattcctacttacagaagatgaggaatcgttggagatagtgtcttccttatgtagaggatttgaaatatcttatgatgacttgataacttactttccagataggaaataccataaatatatttctaaagtatttgaacatgtagatttatcggaggaattaagtatggaattccatgatacaactttgcgagatttagtttatcttagattgtacaagtattccaagtgtatacggccgtgttataaattaggagataatctaaaaggcatagttgttataaaggacaggaatatttatattagggaagcaaatgatgacttgatagaatatctcctcaaggaatacactcctcagatttatacatattctaatgagcgcgtccccataactggttcaaaattaattctttgtggattttctcaagttacatttatggcgtatacaacgtcgcatataacaacaaataaaaaggtagatgttctcgtttccaaaaaatgtatagatgaactagtcgatccaataaattatcaaatacttcaaaatttatttgataaaggaagcggaacaataaacaaaatactcaggaagatattttattcggtaacaggtggccaaactccataggtagctttttctatttcggattttagaatttccaaattcaccagcgatttatcggttttggtgaaatccaaggatttattaatgtccacaaatgccatttgttttgtctgtggattgtatttgaaaatggaaacgatgtagttagatagatgcgctgcgaagtttcctattagggttccgcgcttcacgtcacccagcatacttgaatcaccatcctttaaaaaaaatgataagatatcaacatggagtatatcatactcggattttaattcttctactgcatcactgacattttcacaaatactacaatacggtttaccgaaaataatcagtacgttcttcatttatgggtatcaaaaacttaaaatcgttactgctggaaaataaatcactgacgatattagatgataatttatacaaagtatacaatggaatatttgtggatacaatgagtatttatatagccgtcgccaattgtgtcagaaacttagaagagttaactacggtattcataaaatacgtaaacggatgggtaaaaaagggagggcatgtaaccctttttatcgatagaggaagtataaaaattaaacaagacgttagagacaagagacgtaaatattctaaattaaccaaggacagaaaaatgctagaattagaaaagtgtacatccgaaatacaaaatgttaccggatttatggaagaagaaataaaggcagaaatgcaattaaaaatcgataaactcacatttcaaatatatttatctgattctgataacataaaaatatcattgaatgagatactaacacatttcaacaataatgagaatgttacattattttattgtgatgaacgagacgcagaattcgttatgtgtctcgaggctaaaacacatttctctaccacaggagaatggccgttgataataagtaccgatcaggatactatgctatttgcatctactgataatcatcctaagatgataaaaaacttaactcaactgtttaaatttgttccctcggcagaggataactatttagcaaaattaacggcgttagtgaatggatgtgatttctttcctggactctatggggcatctataacacccaacaacttaaacaaaatacaattgtttagtgattttacaatcgataatatagtcactagtttggcaattaaaaattattatagaaagactaactctaccgtagacgtgcgtaatattgttacgtttataaacgattacgctaatttagacgatgtctactcgtatgttcctccttgtcaatgcactgttcaagaatttatattttccgcattagatgaaaaatggaacaattttaaatcatcttatttagagaccgttccgttaccctgtcaattaatgtacgcgttagaaccacgcaaggagattgatgtttcagaagttaaaactttatcatcttatatagatttcgaaaatactaaatcagatatcgatgttataaaatctatatcctcgatcttcggatattctaacgaaaactgtaacacgatagtattcggcatctataaggataatttactactgagtataaataattcattttactttaacgatagtctgttaataaccaatactaaaagtgataatataataaatataggttactagattaaaaatggtgttccaactcgtgtgctctacatgcggtaaagatatttctcacgaacgatataaattgattatacgaaaaaaatcattaaaggatgtactcgtcagtgtaaagaacgaatgttgtaggttaaaattatctacacaaatagaacctcaacgtaacttaacagtgcaacctctattggatataaactaatatggatccggttaattttatcaagacatatgcgcctagaggttctattatttttattaattataccatgtcattaacaagtcatttgaatccatcgatagaaaaacatgtgggtatttattatggtacgttattatcggaacacttggtagttgaatctacctatagaaaaggagttcgaatagtcccattggatagtttttttgaaggatatcttagtgcaaaagtatacatgttagagaatattcaagttatgaaaatagcagctgatacgtcattaactttattgggtattccgtatggatttggtcataatagaatgtattgttttaaattggtagctgactgttataaaaatgccggtgttgaaacatcgtctaaacgaatattaggtaaagatatttttctgagccaaaacttcacagacgataatagatggataaagatatatgattctaataatttaacattttggcaaattgattaccttaaagggtgagttaatatgcataactactcctccgttgttttttcccacgttctttttcttaacgttgtttgccatcactctcataatgtaaagatattctaaaatggtaaacttttgcatatcggacgcagaaattggtataaatgttgtaattgtattatttcccgtcaatggactagtcacagctccatcagttttatatcctttagagtatttctcactcgtgtctagcattctagagcattccatgatctgtttatcgttgatattggccggaaagatagattttttattttttattatattactattggcaattgtagatataacttctggtaaatatttttctaccttttcaatttcttctattttcaagccggctatatattctgctatattgttgctagtatcaataccttttctggctaagaagtcatatgtggtattcactatatcagttttaactggtagttccattagcctttccacttctgcagaataatcagaaattggttctttaccagaaaatccagctactataataggctcaccgatgatcattggcaaaatcctatattgtaccagattaatgagagcatatttcatttccaataattctgctagttcttgagacattgatttatttgatgaatctagttggttctctagatactctaccatttctgccgcatacaataacttgttagataaaatcagggttatcaaagtgtttagcgtggctagaatagtgggcttgcatgtattaaagaatgcggtagtatgagtaaaccgttttaacgaattatatagtctccagaaatctgtggcgttacatacatgagccgaatgacatcgaagattgtccaatatttttaatagctgctctttgtccattatttctatatttgactcgcaacaattgtagataccattaatcactgattcctttttcgatgccggacaatagcacaattgtttagctttggactctatgtattcagaattaatagatatatctcttaatacagattgcactatacattttgaaactatgtcaaaaattgtagaacgacgctgttctgcagccatttaactttaaataatttacaaaaatttaaaatgagcatccgtataaaaatcgataaactgcgccaaattgtggcatatttttcagagttcagtgaagaagtgtctataaatgtagactcgacggatgagttaatgtatatttttgccgccttgggcggatctgtaaacatttgggccattatacctctcagtgcatcagtgttctaccgaggagccgaaaacattgtgtttaatcttcctgtgtccaaggtaaaatcgtgtttgtgtagttttcacaatgatgccatcatagatatagaacctgatctggaaaataatctagtaaaactttctagttatcatgtagtaagtgtcgattgtaataaggaactgatgcctattaggacagatactactatttgtctaagtatagatcaaaagaaatcttatgtgtttaattttcacaagtatgaagaaaaatgttgtggtagaaccgtcattcatttagaatggttgttgggctttatcaagtgtattagtcagcatcagcatctggctattatgtttaaagatgacaatattattatgaagactcctggtaatactgatgcattttccagggaatattctatgactgaatgttctcaagaactacaaaagttttctttcaaaatagctatctcgtctctcaacaaactacgaggattcaaaaagagagtcaatgtttttgaaactagaatcgtaatggataatgacgataacattctaggaatgttgttttcggatagagttcaatcctttaagatcaacatctttatggcgtttttagattaatactttcaatgagataaatatgggtggcggagtaagtgttgagctccctaaacgggatccgcctccgggagtacccactgatgagatgttattaaacgtggataaaatgcatgacgtgatagctcccgctaagcttttagaatatgtgcatataggaccactagcaaaagataaagaggataaagtaaagaaaagatatccagagtttagattagtcaacacaggacccggtggtctttcggcattgttaagacaatcgtataatggaaccgcacccaattgctgtcgcacttttaatcgtactcattattggaaaaaggatggaaagatatcagataagtatgaagagggtgcagtattagaatcgtgttggccagacgttcacgacactggaaaatgcgatgttgatttattcgactggtgtcagggggatacgttcgatagaaacatatgccatcagtggatcggttcagcctttaataggagtaatagaactgtagagggtcaacaatcgttaataaatctgtataataagatgcaaacattatgtagtaaagatgctagtgtaccaatatgtgaatcatttttgcatcatttacgcgcacacaatacagaagatagcaaagagatgatcgattatattctaagacaacagtctgcggactttaaacagaaatatatgagatgtagttatcccactagagataagttagaagagtcattaaaatatgcggaacctcgagaatgttgggatccagagtgttcgaatgccaatgttaatttcttgctaacacgtaattataataatttaggactttgcaatattgtacgatgtaatactagcgtgaacaacttacagatggataaaacttcctcattaagattgtcatgtggattaagcaatagtgatagattttctactgttcccgtcaatagagcaaaagtagttcaacataatattaaacactcgttcgacctaaaattgcatttgatcagtttattatctctcttggtaatatggatactaattgtagctatttaaatgggtgccgcagcaagcatacagacgacggtgaatacactcagcgaacgtatctcgtctaaattagaacaagaagcgaatgctagtgctcaaacaaaatgtgatatagaaatcggaaatttttatatccgacaaaaccatggatgtaacctcactgttaaaaatatgtgctctgcggacgcggatgctcagttggatgctgtgttatcagccgctacagaaacatatagtggattaacaccggaacaaaaagcatacgtgccagctatgtttactgctgcgttaaacattcagacgagtgtaaacactgttgttagagattttgaaaattatgtaaaacaaacttgtaattctagcgcggtcgtcgataacaaattaaagatacaaaacgtaatcatagatgaatgttacggagccccaggatctccaacaaatttggaatttattaatacaggatctagcaaaggaaattgtgccattaaggcgttgatgcaattgactactaaggccactactcaaatagcacctagacaagttgctggtacaggagttcagttttatatgattgttatcggtgttataatattggcagcgttgtttatgtactatgccaagcgtatgctgttcacatccaccaatgataaaatcaaacttattttagccaataaggaaaacgtccattggactacttacatggacacattctttagaacttctccgatggttattgctaccacggatatgcaaaactgaaaatatattgataatattttaatagattaacatggaagttatcgctgatcgtctagacgatatagtgaaacaaaatatagcggatgaaaaatttgtagattttgttatacacggtctagagcatcaatgtcctgctatacttcgaccattaattaggttgtttattgatatactattatttgttatagtaatttatatttttacggtacgtctagtaagtagaaattatcaaatgttgttggcgttggtggcgctagtcatcacattaactattttttattactttatactataatagtactagactgacttctaacaaacatctcacctgccataaataaatgcttgatattaaagtcttctatttctaacactattccatctgtggaaaataatactctgacattatcgctaattgacacatcggtgagtgatatgcctataaagtaataatcttctttgggcacatataccagtgtaccaggttctaacaacctatttactggtgctcctgtagcatactttttctttaccttgagaatatccatcgtttgcttggtcaatagcgatatgtgattttttatcaaccactcgaaaaagtaattggagtgttcatatcctctacgggctattgtctcatggccgtgtatgaaatttaagtaacacgactgtggtagatttgttctatagagccggttgccgcaaatagatagaactaccaatatgtctgtacaaatgttaaacattaattgattaacagaaaaaacaatgttcgttctgggaatagaaaccagatcaaaacaaaattcgttagaatatatgccacgtttatacattgaatataaaataactacagtttgaaaaataacagtatcatttaaacatttaacttgcggggttaatttcacaactttactgtttttaagctgttcaaaatatagcatcgatccatgagaaatacgtttagccgcctttaatagaggaaatcccaccgcctttctggatctcaccaacgacgatagttctgaccagcaactcatttcttcatcatccacctgttttaacatataataggcaggagatagatatccgtcattgcaatattccttttcgtaggcacacaatctaatattgataaaatctccattctcttctctgcatttattatcttgtttcggtggctgattaggctgtagtcttggtttaggccttggtctatcgttgttgaatctattttggtcattaaatctttcatttcttcctggtatatttctatcacctcgtttggttggatttttgtctatattatcgtttgtaacatcggtacgggtattcatttatcacaaaaaaaacttctctaaatgagtctactgctagaaaacctcatcgaagaagataccatattttttgcaggaagtatatctgagtatgatgatttacaaatggttattgccggcgcaaaatccaaatttccaagatctatgctttctatttttaatatagtacctagaacgatgtcaaaatatgagttggagttgattcataacgaaaatatcacaggagcaatgtttaccacaatgtataatataagaaacaatttgggtctaggagatgataaactaactattgaagccattgaaaactatttcttggatcctaacaatgaagttatgcctcttattattaataatacggatatgactgccgtcattcctaaaaaaagtggtaggagaaagaataagaacatggttatcttccgtcaaggatcatcacctatcttgtgcattttcgaaactcgtaaaaagattaatatttataaagaaaatatggaatccgcatcgactgagtatacacctatcggagacaacaaggctttgatatctaaatatgcgggaattaatgtcctgaatgtgtattctccttccacatccatgagattgaatgccatttacggattcaccaataaaaataaactagagaaacttagtactaataaggaactagaatcgtatagttctagccctcttcaagaacccattaggttaaatgattttctgggactattggaatgtgttaaaaagaatattcctctaacagatattccgacaaaggattgattactataaatggagaatgttcctaatgtatactttaatcctgtgtttatagagcccacgtttaaacattctttattaagtgtttataaacacagattaatagttttatttgaagtattcgttgtattcattctaatatatgtattttttagatctgaattaaatatgttcttcatgcctaaacgaaaaatacccgatcctattgatagattacgacgtgctaatctagcgtgtgaagacgataaattaatgatctatggattaccatggatgacaactcaaacatctgcgttatcaataaatagtaaaccgatagtgtataaagattgtgcaaagcttttgcgatcaataaatggatcacaaccagtatctcttaacgatgttcttcgcagatgatgattcattttttaagtatttggctagtcaagatgatgaatcttcattatctgatatattgcaaatcactcaatatctagactttctgttattattattgatccaatcaaaaaataaattagaagccgtgggtcattgttatgaatctctttcagaggaatacagacaattgacaaaattcacagactctcaagattttaaaaaactgtttaacaaggtccctattgttacagatggaagggtcaaacttaataaaggatatttgttcgactttgtgattagtttgatgcgattcaaaaaagaatcctctctagctaccaccgcaatagatcctattagatacatagatcctcgtcgcgatatcgcattttctaacgtgatggatatattaaagtcgaataaagtgaacaataattaattctttattgtcatcatgaacggcggacatattcagttgataatcggccccatgttttcaggtaaaagtacagaattaattagacgagttagacgttatcaaatagctcaatataaatgcgtgactataaaatattctaacgataatagatacggaacgggactatggacgcatgataagaataattttgaagcattggaagcaactaaactatgtgatgtcttggaatcaattacagatttctccgtgataggtatcgatgaaggacagttctttccagacattgttgaattctgtgagcgtatggcaaacgaaggaaaaatagttatagtagccgcactcgatgggacatttcaacgtaaaccgtttaataatattttgaatcttattccattatctgaaatggtggtaaaactaactgctgtgtgtatgaaatgctttaaggaggcttccttttctaaacgattgggtgaggaaaccgagatagaaataataggaggtaatgatatgtatcaatcggtgtgtagaaagtgttacatcgactcataatattatattttttatctaaaaaactaaaaataaacattgattaaattttaatataatacttaaaaatggatgttgtgtcgttagataaaccgtttatgtattttgaggaaattgataatgagttagattacgaaccagaaagtgcaaatgaggtcgcaaaaaaactgccgtatcaaggacagttaaaactattactaggagaattattttttcttagtaagttacagcgacacggtatattagatggtgccaccgtagtgtatataggatcggctcctggtacacatatacgttatttgagagatcatttctataatttaggaatgattatcaaatggatgctaattgacggacgccatcatgatcctattctaaatggattgcgtgatgtgactctagtgactcggttcgttgatgaggaatatctacgatccatcaaaaaacaactgcatccttctaagattattttaatttctgatgtaagatccaaacgaggaggaaatgaacctagtacggcggatttactaagtaattacgctctacaaaatgtcatgattagtattttaaaccccgtggcatctagtcttaaatggagatgcccgtttccagatcaatggatcaaggacttttatatcccacacggtaataaaatgttacaaccttttgctccttcatattcagctgaaatgagattattaagtatttataccggtgagaacatgagactgactcgagttaccaaatcagacgttgtaaattatgaaaaaaagatgtactaccttaataagatcgtccgtaacaaagtagttgttaactttgattatcctaatcaggaatatgactattttcacatgtactttatgctgaggaccgtgtactgcaataaaacatttcctactactaaagcaaaggtactatttctacaacaatctatatttcgtttcttaaatattccaacaacatcaactgaaaaagttagtcatgaaccaatacaacgtaaaatatctagcaaaaattctatgtctaaaaacagaaatagcaagagatccgtacgcggtaataaatagaaacgtactactgagatatactaccgatatagagtataatgatttagttactttaataaccgttagacataaaattgattctatgaaaactgtgtttcaggtatttaacgaatcatccataaattatactccggttgatgatgattatggagaaccaatcattataacatcgtatcttcaaaaaggtcataacaagtttcctgtaaattttctatacatagatgtggtaatatctgacttatttcctagctttgttagactagatactacagaaactaatatagttaatagtgtactacaaacaggcgatggtaaaaagactcttcgtcttcccaaaatgttagagacggaaatagttgtcaagattctctatcgccctaatataccattaaaaattgttagatttttccgcaataacatggtaactggagtagagatagccgatagatctgttatttcagtcgctgattaatcaattagtagagatgagataagaacattataataatcaataatatatcttatatcttatatcttatatcttgtttagaaaaatgctaatattaaaatagctaacgctagtaatccaatcggaagccatttgatatctataatagggtatctaatttcctgatttaaatagcggacagctatattctcggtagctactcgtttggaatcacaaacattatttacatctaatttactatctgtaatggaaacgtttcccaatgaaatggtacaatccgatacattgcattttgttatatttttttttaaagaggctggtaacaacgcatcgcttcgtttacatggctcgtaccaacaataatagggtaatcttgtatctattcctatccgtactatgcttttatcaggataaatacatttacatcgtatatcgtctttgttagcatcacagaatgcataaatttgttcgtccgtcatgataaaaatttaaagtgtaaatataactattatttttatagttgtaataaaaagggaaatttgattgtatactttcggttctttaaaagaaactgacttgataaaaatggctgtaatctctaaggttacgtatagtctatatgatcaaaaagagattaatgctacagatattatcattagtcatgttaaaaatgacgacgatatcggtaccgttaaagatggtagactaggtgctatggatggggcattatgtaagacttgtgggaaaacggaattggaatgtttcggtcactggggtaaagtaagtatttataaaactcatatagttaagcctgaatttatttcagaaattattcgtttactgaatcatatatgtattcactgcggattattgcgttcacgagaaccgtattccgacgatattaacctaaaagagttatcgggacacgctcttaggagattaaaggataaaatattatccaagaaaaagtcatgttggaacagcgaatgtatgcaaccgtatcaaaaaattactttttcaaagaaaaaggtttgtttcgtcaacaagttggatgatattaacgttcctaattctctcatctatcaaaagttaatttctattcatgaaaagttttggccattattagaaattcatcaatatccagctaacttattttatacagactactttcccatccctccgctgattattagaccggctattagtttttggatagatagtatacccaaagagaccaatgaattaacttacttattaggtatgatcgttaagaattgtaacttgaatgctgatgaacaggttatccagaaggcggtaatagaatacgatgatattaaaattatttctaataacacttccagtatcaatttatcatatattacatccggcaaaaataatatgattagaagttatattgtcgcccgacgaaaagatcagaccgctagatctgtaattggtcccagtacatctatcaccgttaatgaggtaggaatgcccgcatatattagaaatacacttacagaaaagatatttgttaatgcctttacagtggataaagttaaacaactattagcgtcaaaccaagttaaattttactttaataaacgattaaaccaattaacaagaatacgccaaggaaagtttattaaaaataaaatacatttattgcctggtgattgggtagaagtagctgttcaagaatatacaagtattatttttggaagacagccgtctctacatagatacaacgtcatcgcttcatctatcagagctaccgaaggagatactatcaaaatatctcccggaattgccaactctcaaaatgctgatttcgacggagatgaagaatggatgatattggagcaaaatcctaaagccgtaattgaacaaagtattcttatgtatccgacgacgttactcaaacacgatattcatggagcccccgtttatggatctattcaagatgaaatcgtagcagcgtattcattgtttagaatacaagatctttgtttagatgaagtattgaacatcttggggaaatatggaagaaagttcgatcctaaaggtaaatgtaaattcagcggtaaagatatctatacttacttgataggtgaaaagattaattatccgggtctcttaaaggatggtgaaattattgcaaacgacgtagatagtaattttgttgtggctatgaggcatctgtcattggctggactcttatccgatcataagtcgaacgtggaaggtatcaactttattatcaagtcatcttatgtttttaagagatatctatctatttacggttttggggtgacattcaaagatctgagaccaaattcgacgttcactaataaattggaggccatcaacgtagaaaaaatagaacttatcaaagaagcatacgccaaatatctcaacgatgtaagagacgggaaaatagttccattatctaaagctttagaggcggactatgtggaatccatgttatccaacttgacaaatcttaatatccgagagatagaagaacatatgagacaaacgctgatagatgatccagataataacctcctgaaaatggccaaagcgggttataaagtaaatcccacagaactaatgtatattctaggtacttatggacaacagaggattgatggtgaaccagcagagactcgagtattgggtagagtcttaccttactatcttccagactctaaggatccagaaggaagaggttatattcttaattctttaacaaaaggattaacaggttctcaatattacttttcgatgctggttgccagatctcaatctactgatatcgtctgtgaaacatcacgtaccggaacactggctagaaaaatcattaaaaagatggaggatatggtggtcgacggatacggacaagtagttataggtaatacgctcatcaagtacgccgccaattataccaaaattctaggctcagtatgtaaacctgtagatcttatctatccagatgagtccatgacttggtatttggaaattagtgctctgtggaataaaataaaacagggattcgtttactctcagaaacagaaacttgcaaaaaagacattggcgccgtttaatttcctagtattcgtcaaacccaccactgaggataatgctattaaggttaaggatctgtacgatatgattcataacgtcattgatgatgtgagagagaaatacttctttacggtatctaatatagattttatggagtatatattcttgacgcatcttaatccttctagaattagaattacaaaagaaacggctatcactatctttgaaaagttctatgaaaaactcaattatactctaggtggtggaactcctattggaattatttctgcacaggtattgtctgagaagtttacacaacaagccctgtccagttttcacactactgaaaaaagtggtgccgtcaaacaaaaacttggtttcaacgagtttaataacctgactaatttgagtaagaataagaccgaaattatcactctggtatccgatgatatctctaaacttcaatctgttaagattaatttcgaatttgtatgtttgggagaattaaatccaaacatcactcttcgaaaagaaacagataggtatgtagtagatataatagtcaatagattatacatcaagagagcagaaattaccgaattagtcgtcgaatatatgattgaacgatttatctcctttagcgtcattgtaaaggaatggggtatggagacattcattgaggacgaggataatattagatttactgtctacctaaatttcgttgaaccggaagaattgaatcttagtaagtttatgatggttcttccgggtgccgccaacaagggcaagattagtaaattcaagattcctatctctgactatacgggatatgacgacttcaatcaaacaaaaaagctcaataagatgactgtagaactcatgaatctaaaagaattgggttctttcgatttggaaaacgtcaacgtgtatcctggagtatggaatacatacgatatcttcggtatcgaggccgctcgtgaatacttgtgcgaagccatgttaaacacctatggagaagggttcgattatctgtatcagccttgtgatcttctcgctagtttactatgtgctagttacgaaccagaatcagtgaataaattcaagttcggcgcagctagtactcttaagagagctacgttcggagacaataaagcattgttaaacgcggctcttcataaaaagtcagaacctattaacgataatagtagctgccacttttttagcaaggtccctaatataggaactggatattacaaatactttatcgacttgggtcttctcatgagaatggaaaggaaactatctgataagatatcttctcaaaagatcaaggaaatggaagaaacagaagacttttaattcttatcaataacatatttttctatgatctgtcttttaaacgatggattttccacaaatgcgcctctcaagtccctcatagaatgatacacgtataaaaaatatagcataggcgatgactccttatttttagacattagatatgccaaaatcatagccccgcttctatttactcccgcagcacaatgaaccaacacgggctcgtttcgttgatcacatttagataaaaaggcggtcacgtcgtcaaaatatttactaatatcggtagttgtatcatctaccaacggtatatgaataatattaatattagagttaggcaatgtatatttatccatcgtcaaatttaaaacatatttgaacttaacttcagatgatggtgcatccatagcatttttataatttcccaaatacacattattggttacccttgtcattatagtgggagatttggctttgtgcatatctccagttgaacgtagtagtaagtatttatacaaacttttcttatccatttataacgtacaaatggataaaactactttatcggtaaacgcgtgtaatttagaatacgttagagaaaaggctatagtaggcgtacaagcagccaaaacatcaacacttatattctttgttattatattggcaattagtgcgctattactctggtttcagacgtctgataatccagtctttaatgaattaacgagatatatgcgaattaaaaatacggttaacgattggaaatcattaacggatagcaaaacaaaattagaaagtgatagaggtaaacttctagccgctggtaaggatgatatattcgaattcaaatgtgtggatttcggcgcctattttatagctatgcgattggataagaaaacatatctgccgcaagctattaggcgaggtactggagacgcgtggatggttaaaaaggcggcaaaggtcgatccatctgctcaacaattttgtcagtatttgataaaacacaagtctaataatgttattacttgtggtaatgagatgttaaatgaattaggttatagcggttattttatgtcaccgcattggtgttccgattttagtaatatggaatagtgttagataaatgcggtaacaaatgttcctgtaaggaaccataacagcttagatttaacgttaaagatgagcataaacataataaacaaaattacaatcaaacctataacattaatatcaaacaatccaaaaaatgaaatcagtggagtagtaaacgcgtacataactcctggataacgtttagcagctgccgttcctattctagaccaaaaattcggtttcatgttttcgaagcggtgttctgcaacaagtcggggatcgtgttctacatatttggcggcattatccagtatctgcctattgatcttcatttcgttttcgattctggctatttcaaaataaaatcccgatgatagacctccagactttataatttcatctacgatgttcagcgccgtagtaactctaataatataggctgataagctaacatcataccctcctgtatatgtgaatatggtatgatttttgtccattacaagctcggttttaactttattgcctgtaataatttctctcatctgtaggatatctatttttttgtcatgcattgccttcaagacgggacgaagaaacgtaatatcctcaataacgttatcgttttctacaataactacatattctacctttttattttctaactcggtaaaaaaattagaatcccatagggctaaatgtctagcgatatttcttttcgtttcctctgtacacatagtgttacaaaaccctgaaaagaagtgagtatacttgtcatcatttctaatgtttcctccagtccactgtataaacgcataatccttgtaatgatctggatcatccttgactaccacaacatttcttttttctggcataacttcgttgtcctttacatcatcgaacttctgatcattaatatgctcatgaacattaggaaatgtttctgatggaggtctatcaataactggcacaacaataacaggagttttcaccgccgccatttagttattgaaattaatcatatacaactctttaatacgagttatattttcgtctatccattgtttcacatttacatatttcgacaaaaagatataaaatgcgtattccaatgcttctctgtttaatgaattactaaaatatacaaacacgtcactgtctggcaataaatgatatcttagaatattgtaacaatttattttgtattgcacatgttcgtgatctatgagttcttcttcgaatggcataggatctccgaatctgaaaacgtataaataggagttagaataataatatttgagagtattggtaatatataaactctttagcggtataattagtttttttctctcaatttctatttttagatgtgatggaaaaatgactaattttgtagcattagtatcatgaactctaatcaaaatcttaatatcttcgtcacacgttagctctttgaagtttttaagagatgcatcagttggttctacagatggagtaggtgcaacaattttttgttctacacatgtatgtactggagccattgttttaactataatggtgcttgtatcgaaaaactttaatgcagatagcggaagctcttcgccgcgactttctacatcgtaattgggttctaacgccgatctctgaatggatactagttttctaagttctaatgtgattctctgaaaatgtaaatccaattcctccggcattatagatgtgtatacatcggtaaataaaactatagtatccaacgatcccttctcgcaaattctagtcttaaccaaaaaatcgtatataaccacggagatggcgtatttaagagtggattcttctaccgttttgttcttggatgtcatataggaaactataaagtccgcactactgttaagaatgattactaacgcaactatatagttcaaattaagcattttggaaacataaaataactctgtagacgatacttgactttcgaataagtttgcagacaaacgaagaaagaacagacctctcttaatttcagaagaaaactttttttcgtattcctgacgtctagagtttatatcaataagaaagttaagaattagtcggttaatgttgtatttcattacccaagtttgagatttcataatattatcaaaagacatgataatattaaagataaagcgctgactatgaacgaaatagctatatggttcgctcaaaaatatagtcttgttaaacgtggaaacgataactgtatttttaatcacgtcagcggcatctaaattaaatataggtatatttattccacacactctacaatatgccacaccatcttcataataaataaattcgttagcaaaattattaattttagtgaaatagttagcgtcaactttcatagcttccttcaatctaatttgatgctcacacggtgcgaattctactctaacatcccttttccatgcctcaggttcatcgatctctataatatctagttttttgcgtttcacaaacacaggctcgtctctcgcgatgagatctgtatagtaactatgtaaatgataactagatagaaagatgtagctatatagatgacgatcctttaagagaggtataataactttaccccaatcagatagactgttgttatggtcttcggaaaaagaatttttataaatttttccagtattttccaaatatacgtacttaacatctaaaaaatccttaatgataataggaatggataatccgtctattttataaagaaatacatatcgcacattatacttttttttggaaatgggaataccgatgtgtctacataaatatgcaaagtctaaatattttttagagaatcttagttggtccaaattcttttccaagtacggtaatagatttttcatattgaacggtatcttcttaatctctggttctagttccgcattaaatgatgaaactaagtcactatttttataactaacgattacatcacctctaacatcatcatttaccagaatactgatcttcttttgtcgtaaatacatgtctaatgtgttaaaaaaaagatcatacaagttatacgtcatttcatctgtggtattcttgtcattgaaggataaactcgtactaatctcttctttaacagcctgttcaaatttatatcctatatacgaaaaaatagcaaccagtgtttgatcatccgcgtcaatattctgttctatcgtagtgtataacaatcgtatatcttcttctgtgatagtcgatacgttataaaggttgataacgaaaatatttttatttcgtgaaataaagtcatcgtaggattttggacttatattcgcgtctagtagatatgcttttatttttggaatgatctcaattagaatagtctctttagagtccatttaaagttacaaacaactaggaaattggtttatgatgtataatttttttagtttttatagattctttattctatacttaaaaaatgaaaataaatacaaaggttcttgagggttgtgttaaattgaaagcgagaaataatcataaattatttcattatcgcgatatccgttaagtttgtatcgtaatggcgtggtcaattacaaataaagcggatactagtagcttcacaaagatggctgaaatcagagctcatctaaaaaatagcgctgaaaataaagataaaaacgaggatattttcccggaagatgtaataattccatctactaagcccaaaaccaaacgagccactactcctcgtaaaccagcggctactaaaagatcaaccaaaaaggaggaagtggaagaagaagtagttatagaggaatatcatcaaacaactgaaaaaaattctccatctcctggagtcggcgacattgtagaaagcgtggctgctgtagagctcgatgatagcgacggggatgatgaacctatggtacaagttgaagctggtaaagtaaatcatagtgctagaagcgatctttctgacctaaaggtggctaccgacaatatcgttaaagatcttaagaaaattattactagaatctctgcagtatcgacggttctagaggatgttcaagcagctggtatctctagacaatttacttctatgactaaagctattacaacactatctgatctagtcaccgagggaaaatctaaagttgttcgtaaaaaagttaaaacttgtaagaagtaaatgcgtgcacttttttataaagatggtaaactctttaccgataataattttttaaatcctgtatcagacgataatccagcgtatgaggttttgcaacatgttaaaattcctactcatttaacagatgtagtagtatatgaacaaacgtgggaagaggcattaactagattaatttttgtgggaagcgattcaaaaggacgtagacaatacttttacggaaaaatgcatgtacagaatcgcaacgctaaaagagatcgtatttttgttagagtatataacgttatgaaacgaattaattgttttataaacaaaaatataaagaaatcgtccacagattccaattatcagttggcggtttttatgttaatggaaactatgttttttattagatttggtaaaatgaaatatcttaaggagaatgaaacagtagggttattaacactaaaaaataaacacatagaaataagtcccgatgaaatagttatcaagtttgtaggaaaggacaaagtttcacatgaatttgttgttcataagtctaatagactatataaaccgctattgaaactgacggatgattctagtcccgaagaatttctgttcaacaaactaagtgaacgaaaggtatacgaatgtatcaaacagtttggtattagaatcaaggatctccgaacgtatggagtcaattatacgtttttatataatttttggacaaatgtaaagtccatatctcctcttccgtcaccaaaaaagttaatagcgttaactatcaaacaaactgctgaagtggtaggtcatactccatcaatttcaaaaagagcttacatggcaacgactattttagaaatggtaaaggataaaaattttttagatgtagtatctaaaactacgttcgatgaattcctatctatagtcgtagatcacgttaaatcatctacggatggatgatatagatctttacacaaataattacaagaccgataaatggaaatggataagcgtataaaatctctcgcaatgacagctttcttcggagagctaaacacattagatattatggcattgataatgtctatatttaaacgccatccaaacaataccattttttcagtggataaggatggtcagtttatgattgatttcgaatacgataattataaggcttctcaatatttggatctgaccctcactccgatatctggagatgaatgcaagactcacgcatcgagtatagccgaacaattggcgtgtgcggatattattaaagaggatattagcgaatatatcaaaactactccccgtcttaaacgatttataaaaaaataccgcaatagatcagatactcgcatcagtcgagatacagaaaagcttaaaatagctctagctaaaggcatagattacgaatatataaaagacgcttgttaataagtaaatgaaaaaaaactagtcgtttataataaaacacgatatggatgccaacgtagtatcatcttctactattgcaacgtatatagacgctttagcgaagaatgcttcagaattagaacagaggtctaccgcatacgaaataaataatgaattggaactagtatttattaagccgccattaattactttgacaaatgtagtgaatatctctacgattcaggaatcgtttattcgatttaccgttactaataaggaaggtgttaaaattagaactaagattccattatctaaggtacatggtctagatgtaaaaaatgtacagttagtagatgctatagataacatagtttgggaaaagaaatcattagtgacggaaaatcgtcttcacaaagaatgcttgttgagactatcgacagaggaacgtcatatatttttggattacaagaaatatggatcctctatccgactagaattagtcaatcttattcaagcaaaaacaaaaaactttacgatagactttaagctaaaatattttctaggatccggtgcccagtctaaaagttctttattacacgctattaatcatccaaagtcaaggcctaatacatctctggaaatagaattcacacctagagacaatgaaaaagttccatatgatgaactaataaaggaattgacgactctatcacgtcatatatttatggcttctccagagaatgtaattctttctccgcctattaacgcacctataaagacttttatgttgcctaaacaagatatagtaggtctggatctggaaaatctatacgctgtaactaagactgacggcattcctataactatcagagttacatcaaacgggttgtattgttattttacacatcttggttatattattagatatcctgttaagagaataatagattccgaagtagtagtctttggtgaggcagttaaggataagaactggaccgtatatctcattaagctaatagagcctgtgaatgcaatcaatgatagactagaagaaagtaagtatgttgaatctaaactagtggatatttgtgatcggatagtattcaagtcaaagaaatacgaaggtccgtttactacaactagtgaagtcgtcgatatgttatctacatatttaccaaagcaaccagaaggtgttattctgttctattcaaagggacctaaatctaacattgattttaaaattaaaaaggaaaatactatagaccaaactgcaaatgtagtatttaggtacatgtccagtgaaccaattatctttggagaatcgtctatctttgtagagtataagaaatttagcaacgataaaggctttcctaaagaatatggttctggtaagattgtgttatataacggcgttaattatctaaataatatctattgtttggaatatattaatacacataatgaagtgggtattaagtccgtggttgtacctattaagtttatagcagaattcttagttaatggagaaatacttaaacctagaatcgataaaaccatgaaatatattaactcagaagattattatggaaatcaacataatatcatagtcgaacatttaagagatcaaagcatcaaaataggagatatctttaacgaggataaactatcggatgtgggacatcaatacgccaataatgataaatttagattaaatccagaagttagttattttacgaataaacgaactagaggaccgttgggaattttatcaaactacgtcaagactcttcttatttctatgtattgttccaaaacatttttagacgattccaacaaacgaaaggtattggcgattgattttggaaacggtgctgacctggaaaaatacttttatggagagattgcgttattggtagcgacggatccggatgctgatgctatagctagaggaaatgaaagatacaacaaattaaactctggaattaaaaccaagtactacaaatttgactacattcaggaaactattcgatccgatacatttgtctctagtgtcagagaagtattctattttggaaagtttaatatcatcgactggcagtttgctatccattattcttttcatccgagacattatgctaccgtcatgaataacttatccgaactaactgcttctggaggcaaggtattaatcactaccatggacggagacaaattatcaaaattaacagataaaaagacttttataattcataagaatttacctagtagcgaaaactatatgtctgtagaaaaaatagctgatgatagaatagtggtatataatccatcaacaatgtctactccaatgactgaatacattatcaaaaagaacgatatagtcagagtgtttaacgaatacggatttgttcttgtagataacgttgatttcgctacaattatagaacgaagtaaaaagtttattaatggcgcatctacaatggaagatagaccgtctacaaaaaactttttcgaactaaatagaggagccattaaatgtgaaggtttagatgtcgaagacttacttagttactatgttgtttatgtcttttctaagcggtaaataataatatggtatgggttctgatatccccgttctaaatgcattaaataattccaatagagcgatttttgttcctataggaccttccaactgtggatactctgtattgttaatagatatattaatacttttgtcgggtaacagaggttctacgtcttctaaaaataaaagtttgataacatctggcctgttcataaataaaaacttggcgattctatatatactcttattatcaaatctagccattgtcttatagatgtgagctactgtaggtgtaccatttgattttctttctaatactatatatttctctcgaagaagttcttgcacatcatctgggaataaaatactactgttgagtaaatcagttattttttttatatcgatattgatggacatttttatagttaaggataataagtatcccaaagtcgataacgacgataacgaagtatttatacttttaggaaatcacaatgactttatcagattaaaattaacaaaattaaaggagcatgtatttttttctgaatatattgtgactccagatacatatggatctttatgcgtcgaattaaatgggtctagttttcagcacggtggtagatatatagaggtggaggaatttatagatgctggaagacaagttagatggtgttctacatccaatcatatatctgaagatatacccgaagatatacacactgataaatttgtcatttatgatatatacacttttgacgctttcaagaataaacgattggtattcgtacaggtacctccgtcgttaggagatgatagtcatttgactaatccgttattgtctccgtattatcgtaattcagtagccagacaaatggtcaatgatatgatttttaatcaagattcatttttaaaatatttattagaacatctgattagaagccactatagagtttctaaacatataacaatagttagatacaaggataccgaagaattaaatctaacgagaatatgttataatagagataagtttaaggcgtttgtattcgcttggtttaacggcgtttcggaaaatgaaaaggtactagatacgtataaaaaggtatctaatttgatataatgaattcagtgactgtatcacacgcgccatatactattacttatcacgatgattgggaaccagttatgagtcaattggtagagttttataacgaagtagccagttggctgctacgagacgagacgtcgcctattcctgataagttctttatacagttgaaacaaccgcttagaaataaacgagtatgtgtgtgtggtatagatccgtatccgaaagatggaactggtgtaccgttcgaatcaccaaattttacaaaaaaatcaattaaggagatagcttcatctatatctagattaaccggagtaattgattataaaggttataaccttaatataatagacggggttataccctggaattattacttaagttgtaaattaggagaaacaaaaagtcacgcgatctactgggataagatttccaagttactgctgcagcatataactaaacacgttagtgttctttattgtttgggtaaaacagatttctcgaatatacgggcaaagttagaatccccggtaactaccatagtgggatatcatccagcggctagagaccgccaattcgagaaagatagatcatttgaaattatcaacgttttactggaattagacaacaaggtacctataaattgggctcaagggtttatttattaatgctttagtgaaattttaacttgtgttctaaatggatgcggctattagaggtaatgatgttatctttgtccttaagactataggtgtcccatcagcatgtagacaaaatgaagatccaagattcgtagaagcatttaaatgcgacgagttaaaaagatatattgataataatccagaatgtacactattcgaaagtcttagggatgaggaagcatactctatagtcagaattttcatggatgtagatttagacgcgtgtctagacgaaatagattatttaacggctattcaagattttattatcgaggtgtcaaactgtgtagctagattcgcgtttacagaatgcggtgccattcatgaaaatgtaataaaatccatgagatctaatttttcattgactaagtctacaaatagagataaaacaagttttcatattatctttttagacacgtataccactatggatacattgatagctatgaaacgaacactattagaattaagtagatcatctgaaaatccactaacaagatcgatagacactgccgtatataggagaaaaacaactcttcgggttgtaggtactaggaaaaatccaaattgcgacactattcatgtaatgcaaccaccgcatgataatatagaagattacctattcacttacgtggatatgaacaacaatagttattacttttctctacaacgacgattggaggatttagttcctgataagttatgggaaccagggtttatttcattcgaagacgctataaaaagagtttcaaaaatattcattaattctataataaactttaatgatctcgatgaaaataattttacaacggtaccactggtcatagattacgtaacaccttgtgcattatgtaaaaaacgatcgcataaacatccgcatcaactatcgttggaaaatggtgctattagaatttacaaaactggtaatccacatagttgtaaagttaaaattgttccgttggatggtaataaactgtttaatattgcacaaagaattttagacactaactctgttttattaaccgaacgaggagactatatagtttggattaataattcatggaaatttaacagcgaagaacccttgataacaaaactaattctgtcaataagacatcaactacctaaggaatattcaagcgaattactctgtccgaggaaacgaaagactgtagaagctaacatacgagacatgttagtagattcagtagagaccgatacctatccggataaacttccgtttaaaaatggtgtattggacctggtagacggaatgttttactctggagatgatgctaaaaaatatacgtgtactgtatcaaccggatttaaatttgacgatacaaagttcgtcgaagacagtccagaaatggaagagttaatgaatatcattaacgatatccaaccattaacggatgaaaataagaaaaatagagagctatatgaaaaaacattatctagttgtttatgtggtgctaccaaaggatgtttaacattcttttttggagaaactgcaactggaaagtcgacaaccaaacgtttgttaaagtctgctatcggtgacctgtttgttgagacgggtcaaacaattttaacagatgtattggataaaggacctaatccatttatcgctaacatgcatttgaaaagatctgtattctgtagcgaactacctgattttgcctgtagtggatcaaagaaaattagatctgataatattaaaaagttgacagaaccttgtgtcattggaagaccgtgtttctccaataaaattaataatagaaaccatgctacaatcattatcgatactaattacaaacctgtctttgataggatagataacgcattaatgagaagaattgccgtcgtgcgattcagaacacacttttctcaaccttctggtagagaggctgctgaaaataatgacgcgtacgataaagtcaaactattagacgaggggttagatggtaaaatacaaaataatagatatagatttgcatttctatacttgttggtgaaatggtacaaaaaatatcatgttcctattatgaaactatatcctacacccgaagagattcctgactttgcattctatctcaaaataggtactctgttagtatctagctctgtaaagcatattccattaatgacggacctctccaaaaagggatatatattgtacgataatgtggttactcttccgttgactactttccaacagaaaatatccaagtattttaattctagactatttggacacgatatagagagcttcatcaatagacataagaaatttgccaatgttagtgatgaatatctgcaatatatattcatagaggatatttcatctccgtaaatatatgctcatatatttatagaagatatcacatatctaaatgaataccggaattatagatttatttgataatcatgttgatagtataccaactatattacctcatcagttagctactctagattatctagttagaactatcatagatgagaacagaagcgtgttattgttccatattatgggatcaggtaaaacaataatcgctttgttgttcgccttggtagcttccagatttaaaaaggtttacattctagtgccgaacatcaacatcttaaaaattttcaattataatatgggtgtagctatgaacttgtttaatgacgaattcatagctgagaatatctttattcattccacaacaagtttttattctcttaattataacgataacgtcattaattataacggattatctcgctacaataactctatttttatcgttgatgaggcacataatatctttgggaataatactggagaacttatgaccgtgataaaaaataaaaacaagattccttttctactattgtctggatctcccattactaacacacctaatactctgggtcatattatagatttaatgtccgaagagacgatagattttggtgaaattattagtcgtggtaagaaagtaattcagacacttcttaacgaacgaggtgtgaatgtacttaaggatttgcttaaaggaagaatatcatattacgaaatgcctgataaagatctaccaacgataagatatcacggacgtaagtttctagatactagagtagtatattgtcacatgtctaaacttcaagagagagattatatgattactagacgacagctatgttatcatgaaatgtttgataaaaatatgtataacgtgtcaacggcagtattgggacaacttaatctgatgaataatttagatactttatttcaggaacaggataaggaattgtacccaaatctgaaaataaataatggcgtgttatacggagaagaattggtaacgttaaacattagttccaaatttaagtactttatcaatcggatacagacactcaacggaaaacattttatatacttttctaattctacatatggtggattggtaattaaatatatcatgctcagtaatggatattctgaatataatggttctcagggaactaatccacatatgataaacggcaaaccaaaaacatttgctatcgttactagtaaaatgaaatcgtctttagaggatctattagatgtgtataattctcctgaaaacgatgatggtagtcaattgatgtttttgttttcatcaaacattatgtccgaatcctatactctgaaagaggtaaggcatatttggtttatgactatcccagatactttttctcaatacaaccaaattcttggacgatctattagaaaattctcttacgccgatatttctgaaccagttaatgtatatcttttagccgccgtatattccgatttcaatgacgaagtaacgtcattaaacgattacacacaggatgaattaattaatgttttaccatttgacatcaaaaagctgttgtatctaaaatttaagacgaaagaaacgaatagaatatactctattcttcaagagatgtctgaaacgtattctcttccaccacatccatcaattgtaaaagttttattgggagaattggtcagacaatttttttataataattctcgtattaagtataacgactccaagttacttaaaatggttacatcagttataaaaaataaagaagacgctaggaattacatagatgatattgtaaacggtcacttctttgtatcgaataaagtatttgataaatctcttttatacaaatacgaaaacgatattattacagtaccgtttagactttcctacgaaccatttgtttggggagttaactttcgtaaagaatataacgtggtatcttctccataaaactgatgagatatataaagaaataaatgtcgagctttgttaccaatggatacctttccgttacattggaacctcatgagctgacgttagacataaaaactaatattaggaatgccgtatataagacgtatctccatagagaaattagtggtaaaatggccaagaaaatagaaattcgtgaagacgtggaattacctctcggcgaaatagttaataattctgtagttataaacgttccgtgtgtaataacctacgcgtattatcacgttggggatatagtcagaggaacattaaacatcgaagatgaatcaaatgtaactattcaatgtggagatttaatctgtaaactaagtagagattcgggtactgtatcatttagcgattcaaagtactgcttttttcgaaatggtaatgcgtatgacaatggcagcgaagtcactgccgttctaatggaggctcaacaaggtatcgaatctagttttgtttttctcgcgaatatcgtcgactcataagaaagagaatagcggtaagtataaacacgaatactatggcaataattgcgaatgttttattcccttcgatatatttttgataatatgaaaaacatgtctctctcaaatcggacaaccatctcataaaatagttctcgcgcgctggagaggtagttgctgctcgtataatctccccagaataatatacttgcgtgtcgtcgttcaatttatacggatttctatagttctctgttatataatacggttttccatcatgattagacgacgacaatagtgttctaaatttagatagttgatcagaatgaatgtttattggcgttggaaaaattatccatacagcgtctgcagagtgcttgatagttgttcctagatatgtaaaataatccaacgtactaggtagcaaattgtctagataaaatactgaatcaaacggcgcagacgtattagcggatctaatggaatccaattgattgactatcttttgaaaatatacatttttatgatccgatacttgtaagaatatagaaataatgataagtccatcatcgtgtttttttgcctcttcataagaactatattttttcttattccaatgaacaagattaatctctccagagtatttgtacacatctatcaagtgattggatccataatcgtcttcctttccccaatatatatgtagtgatgataacacatattcattggggagaaaccctccacttatatatcctcctttaaaattaatccttactagttttccagtgttctggatagtggttggtttcgactcattataatgtatgtctaacggcttcaatcgcgcgttagaaattgcttttttagtttctatattaataggagatagttgttgcggcatagtaaaaatgaaatgataactgtttaaaaatagctcttagtatgggaattacaatggatgaggaagtgatatttgaaactcctagagaattaatatctattaaacgaataaaagatattccaagatcaaaagacacgcatgtgtttgctgcgtgtataacaagtgacggatatccgttaataggagctagaagaacttcattcgcgttccaggcgatattatctcaacaaaattcagattctatctttagagtatccactaaactattacggtttatgtactacaatgaactaagagaaatctttagacggttgagaaaaggttctatcaacaatatcgatcctcacttcgaagagttaatattattgggtggtaaactagataaaaaggaatctattaaagattgtttaagaagagaattaaaagaggaaagtgatgaacgtataacagtaaaagaatttggaaatgtaattctaaaacttacaacacgggataaattatttaataaagtatatataagttattgcatggcgtgttttattaatcaatcgttggaggatttatcgcatactagtatttacaatgtagaaattagaaagattaaatcattaaatgattgtattaacgacgataaatacgaatatctgtcttatatttataatatgctagttaatagtaaatgaacttttacagatctagtataattagtcagattattaagtataatagacgactagctaagtctattatttgcgaggatgactctcaaattattacactcacggcattcgttaaccaatgcctatggtgtcataaacgagtatccgtgtccgctattttattaactactgataacaaaatattagtatgtaacagacgagatagttttctctattctgaaataattagaactagaaacatgtttagaaagaaacgattatttctgaattattccaattatttgtccaaacaggaaagaagtatactatcgtcatttttttctctatatccagctactgctgataatgatagaatagatgctatttatccgggtggcatacccaaaaggggtgagaatgttccagagtgtttatccagggaaattaaagaagaagttaatatagacaattcttttgtattcatagacactcggttttttattcatggcatcatagaagataccattattaataaattttttgaggtaatcttctttgtcggaagaatatctctaacgagtgatcaaatcattgatacatttaaaagtaatcatgaaatcaaggatctaatatttttagatccgaattcaggtaatggactccaatacgaaattgcaaaatatgctctagatactgcaaaactcaaatgttatggccatagaggatgttattacgaatcattaaaaaaattaactgaggatgattgattagaaaatataaattaatttaccatcgtgtatttttataacgggattgtccggcatatcatgtagatagttaccgtctacatcgtatactcgaccatctacgcctttaaatcctctatttattgacattaatctattagaattggaataccaaatattagtaccctcaattagtttattggtaatattttttttagacgatagatcgatggctcttgaaaccaaggttttccaaccggactcattgtcgatcggtgagaagtctttttcattagcatgaatccattctaatgatgtatgtttaaacactctaaacaattggacaaattcttttgatttgctttgaatgatttcaaataggtcttcgtctacagtaggcataccattagataatctagccattataaagtgcacgtttacatatctacgttctggaggagtaagaacgtgactattgagacgaatggctcttcctactatctgacgaagagacgcctcgttccaagtcatatctagaatgaagatatcattgattgagaagaagctaataccctcgcctccactagaagagaatacgcatgttttaatgcattctccgttagtgtttgattcttggttaaactcagccaccgccttgattctagtatcttttgttctagatgagaactctatattagagataccaaagactttgaaatatagtaataagatttctattcctgactgattaacaaatggttcaaagactagacatttaccatgggatgctaatattcccaaacatacatctataaatttgacgcttttctcttttaattcagtaaatagagagatatcagccgcactagcatcccctttcaatagttctccctttttaaaggtatctaatgcggatttagaaaactctctatttcttaatgaatttttaaaatcattatatagtgttgctatctcttgcgcgtattcgcccggatcacgattttgtctttcaggaaagctatcgaacgtaaacgtagtagccatacgtctcagaattctaaatgatgatatacctgtttttatttcagcgagtttagccttttgataaatttcttcttgctttttcgacatattaacgtatcgcattaatactgttttcttagcgaatgatgcagacccttctacgtcatcaaaaatagaaaactcgttattaactatgtacgaacataggcctcctagtttggagactaattctttctcatcaactagacgtttattctcaaatagcgattggtgttgtaaggatcctggtcgtagtaagttaaccaacatggtgaattcttgcacactattgacgataggtgtagccgataaacaaatcatcttatggttttttaacgcaatggttttagataaaaaattatatactgaacgagtaggacggatcttaccatcttctttgattaatgatttagaaatgaagttatgacattcatcaataatgacgcatattctactcttggaattaatagttttgatattagtaaaaaatttatttctaaaattttgatcatcgtaattaataaaaatacaatccttcgttatctctggagcgtatctgagtatagtgttcatccaaggatcttctatcaaagcctttttcaccaataagataatagcccaattcgtataaatatccttaagatgtttgagaatatatacagtagtcattgttttaccgacacccgtttcatggaacaataaaagagaatgcatactgtctaatcctaagaaaactcttgctacaaaatgttgataatccttgaggcgtactacgtccgaccccatcatttcaacaggcatattagtagttctgcgcaatgcataatcgatataggccgcgtgtgatttactcatttatgagtgataagtaataactatgttttaaaaatcacagcagtagtttaactagtcttctctgatgtttgttttcgatacttttcgaatcagaagtcatactagaataaagcagcgagtgaacgtaatagagagcttcgtatactctattcgaaaactctaagaacttattaatgaattccgtatccactggatcgtttaaaatactaaattgaacactgttcacatccttccaagaagaagacttagtgacggacttaacatgagacataaataaatccaaattttttttacaaacatcactagccaccataatggcgctatctttcaaccagctatcgcttacgcattttagcagtctaacatttttaaagagactacaatatattctcatagtatcgattacacctctaccgaataaagttggaagtttaataatacaatatttttcgtttacaaaatcaaataatggtcgaaacacgtcgaaggttaacatcttataatcgctaatgtatagattgttttcagtgagatgattattagatttaatagcatctcgttcacgtttgaacagtttattgcgtgcgctgaggtcggcaactacggcgtccgctttagtactcctcccataatactttacgctattaatctttaaaatttcatagactttatctagatcgctttctggtaacatgatatcatgtgtaaaaagttttaacatgtcggtcggcattctatttagatcattaactctagaaatctgaagaaagtaattagctccgtattccagactaggtaatgggcttttacctagagacagattaagttctggcaatgtttcataaaatggaagaaggacatgcgttccctcccggatattttttacaatttcatccatttacaactctatagtttgttttcattattattagttattatctcccataatcttggtaatacttaccccttgatcgtaagataccttatacaggtcattacatacaactaccaattgtttttgtacataatagattggatggttgacatccatggtggaataaactactcgaacagatagtttatctttccccctagatacattggccgtaatagttgtcggcctaaagaatatctttggtgtaaagttaaaagttagggttcttgttccattattgctttttgtcagtagttcattataaattctcgagatgggtccgttctctgaatatagaacatcatttccaaatctaacttctagtctagaaataatatcggtcttattcttaaaatctattcccttgatgaagggatcgttaatgaacaaatccttggcctttgattcggctgatctattatctccgttatagacgttacgttgactagtccaaagacttacaggaatagatgtatcgatgatgttgatactatgtgatatgtgagcaaagattgttctcttagtggcatcactatatgttccagtaatggcggaaaactttttagaaatgttatatataaaagaattttttcgtgttccaaacattagcagattagtatgaagataaacactcatattatcaggaacattatcaatttttacatacacatcagcatcttgaatagaaacgataccatcttctggaacctctacgatctcggcagactccggataaccagtcggtgggccatcactaacaataactagatcatccaacaatctactcacatatgcatctatataatctttttcatcttgtgagtaccctggatacgaaataaatttattatccgtatttccataataaggtttagtataaacagagagcgatgttgccgcatgaacttcagttacagtcgccgttggttggtttatttgacctattactctcctaggtttctctataaacgatggtttaatttgtacattcttaaccatatatccaataaagctcaattcaggaacataaacaaattctttgttgaacgtttcaaagtcgaacgaagagtcacgaataacgatatcggatactggattgaaggttaccgttacggtaatttttgaatcggatagtttaagactgctgaatgtatcttccacatcaaacggagttttaatataaacgtatactgtagatggttctttaatagtgtcattaggagttaggccaatagaaatatcattaagttcactagaatatccagagtgtttcaaagcaattgtattattgatacaattattatataattcttcgccctcaatttcccaaataacaccgttacacgaagagatagatacgtgattaatacatttatatccaacatatggtacgtaaccgaatcttcccatacctttaacttctggaagttccaaactcagaaccaaatgattaagcgcagtaatatactgatccctaatttcgaagctagcgatagcctgattgtctggaccatcgtttgtcataactccggatagagaaatatattgcggcatatataaagttggaatttgactatcgactgcgaagacattagaccgtttaatagagtcatccccaccgatcaaagaattaatgatagtattattcattttctatttaaaatggaaaaagcttacaataaactccgtagagaaatatctataatttgtgagttttccttaaagtaacagcttccgtaaacgccgtctttatctcttagtaagtttattgtatttataaccttttccttatcttcatagaatactaaaggcaacaaagaaatttttggttcttctctaagagctacgtgagacttaaccatagaagccaacgaatccctacatattttagaacagaaataccctacttcaccacccttgtatgtctcaatactaataggtctaaaaaccaaatcttgattacaaaaccaacacttatcaattacactatttgtcttaatagacacatctgccatagatttataatactttggtagtatacaagcgagtgcttcttctttagcgggcttaaagactgctttaggtgctgaaataaccacatctggaaggcttactcgcttagccatttaattacggaactatttttttatacttctaatgagcaagtagaaaacctctcatctacaaaaacgtactcgtgtccataatcctctaccatagtaacacgttttttagatctcatatgtgctaaaaagttttcccatactaattggttactattatttttcgtataatttttaacagtttgaggttttagatttttagttacagaagtgatatcgaatattttatccaaaaagaatgagtaattaattgtcttagaaggagtgttttcttggcaaaagaataccaagtgcttaaatatttctactacttcattaatcttttctgtactcagattcagtttctcatcttttacttgattgattatttcaaagactaacttataatcctttttatttattctctcgttagccttaagaaaactagatacaaaatttgcatctacatcatccgtggatatttgatttttttccatgatatccaagagttccgagataatttctccagaacattgatgagacaataatctccgcaatacatttctcaaatgaataagtttattagacacgtggaagtttgactttttttgtacctttgtacatttttgaaataccgactcgcaaaaaatacaatattcatatccttgttcagatactataccgttgtgtctacaaccgctacataatcgtagattcatgttaacactctacgtatctcgtcgtccaatattttatataaaaacattttatttctagacgttgccagaaaatcctgtaatatttttagttttttgggctgtgaataaagtatcgccctaatatggttaccgtcctccgccaatatagtagttaaattatccgcacatgcagaagaacacgcttaggcggattcagtacaatgttatatttttcgtaccaactcatttaaatatcataatctaaaatagttctgtaatatgtctagcgctaatatattgatcataatcctgtgcataaattaagatacaacaatgtctcgaaatcatcgacatggcttcttccatagttagaagatcgtcgtcaaagttagcaacgtgattcatcaacatttgctgttttgaggcagcaaatactgaaccatcgccattcaaccattcataaaaaccatcgtctgaatccattgataatttcttgtactggtttttgagagctcgcatcaatctagcatttctagctcccggattgaaaacagaaagaggatcgtacatccagggtccattttctgtaaatagaatcgtataatgtcccttcaagaagatatcagacgatccacaatcaaagaattggtctccgagtttgtaacaaactgcggactttaacctatacatgataccgtttagcataatttctggtgatacgtcaatcggagtatcatctattagagatctaaagccggtgtaacattctccaccaaacatattcttattctgacgtcgttctacataaaacatcattgctccattaacgataacaggggaatgaacagcactacccatcacattagttcccaatggatcaatgtgtgtaactccagaacatcttccatatcctatgttaggaggagcgaacaccactcttccactattgccatcgaatgccatagaataaatatccttggaattgatagaaatcggactgtcggatgttgtgatcatcttcataggattaacaacgatgtatggtgccgcctgaagtttcatatcgtaactgatgccgtttataggtctagccacagaaaccaacgtaggtctaaatccaactatagacaaaatagaagccaatatctgttcctcatctgtcataacttgagagcatccagtatgaataatcttcattagatggggatctaccgcatcatcatcgttacaataaaaaattcccattctaatgttcataattgcttttctaatcatggtatgcatgtttgctctctgaatctctgtggaaattagatctgatacacctgtaatcactatcggattatcctccgtaagacgattaaccaacaacatataattataagactttacttttctaaattcataaagttgctggattaggctataggtgtctccatgtacatacgcgttctcgagcgcaggaagtttaataccgaatagtgccatcagaataggatgaatatagtaattagtttctggttttctataaataaaagacaaatcttgtgaactagacatatcggtaaaatgcatggattggaatcgtgtagtcgacagaagaatatgatgattagatggagagtatattttatctaactctttgagttggtcaccgattctaggactagctcgagaatgaataagtactaaaggatgagtacatttcacagaaacactagcattgttcaatgtgctctttacatgggtaaggagttgaaatagctcgtttctatttgttctgacaatatttagtttattcataatgttaagcatatcctgaatagtaaagttagatgtgtcatacttgttagtagttagatatttagcaattgcattcccatcatttctcaatctcgtactccaatcatgtgtagatgctacttcatctatagaaaccatacaatcctttttgataggctgttgagattgattatttcctgcacgtttaggtttggtacgttgatttctagcccctgcggatataaagtcatcgtctacaatttgggacaatgaattgcatacactacaagacaaagatttatcagaagtgtgaatatgatcttcatctaccaaagaaagagtttgattagtataactagattttagtcctgcgttagatgttaaaaaaacatcgctattgaccacggcttccattatttatattcgtagtttttactcgaaagcgtgattttaatatccaatcttattacttttggaatcgttcaaaacctttgactagttgtagaatttgatctattgccctacgcgtatactcccttgcatcatatacgttcgtcaccagatcgtttgtttcggcctgaagttggtgcatatctttttcaacactcgacatgagatccttaagggccatatcgtctagattttgttgagatgctgctcctggatttggattttgttgtgctgttgtacatactgtaccaccagtaggtgtaggagtacatacagtggccacaataggaggttgaggaggtgtaaccgttggagtagtacaagaaatatttccatccgattgttgtgtacatgtagttgttggtaacgtctgagaaggttgggtagatggcggcgtcgtcgttttttgatctttattaaatttagagataatatcctgaacagcattgctcggcgtcaacgctggaaggagtgaactcgccggcgcatcagtatcttcagacagccaatcaaaaagattagacatatcagatgatgtattagtttgttgtcgtggttttggtgtaggagcagtactactaggtagaagaataggagccggtgtagctgttggaaccggctgtggagttatatgaatagttggttgtagcggttggataggctgtctgctggcggccatcatattatctctagctagttgttctcgcaactgtctttgataatacgactcttgagactttagtcctatttcaatcgcttcatcctttttcgtatccggatccttttcttcagaataatagattgacgactttggtgtagaggattctgccagcccctgtgagaacttgttaaagaagtccatttaaggctttaaaattgaattgcgattataagattaaatggcagacacagacgatattatcgactatgaatccgatgatctcactgaatacgaggatgatgaagaagaggaagaagatggagagtcactagaaactagtgatatagatcccaaatcttcttataagattgtagaatcagcatccactcatatagaagatgcgcattccaatcttaaacatatagggaatcatatatctgctcttaaacgacgctatactagacgtataagtctatttgaaatagcgggtataatagcagaaagctataacttgcttcaacgaggaagattacctctagtttcagaattttctgacgaaacgatgaagcaaaatatgctacatgtaattatacaagagatagaggagggttcttgtcctatagtcatcgaaaagaacggagaattgttgtcggtaaacgattttgacaaagatggtctaaaattccatctagactatattatcaaaatttggaaacttcaaaaacgatattagaatttatacgaatatcgttctctaaatgtcacaatcaagtctcgcatgttcagcaatttattgtcgtactttatatcgtgttcattaacgatatcttgcaaaatagtaatgattctatcttccttcgatagatattcttcagagattattgtcttatattctttcttgttatcagatatgaatttgataagactttgaacattattgatacccgtctgtttaattttttctacagatattttagttttggcagattctatcgtatctgtcaatagacatccaacatcgacattcgacgtcaattgtctataaatcaacgtataaattttagaaataacattagcgaattgttgtgcattgatgtcgttattctgaaacagtatgattttaggtagcattttcttaacaaagagaacgtatttattgttactcagttgaacagatgatatatccagattactaacgcatctgattccgtataccaaactttcagaagaaatggtatacaattgtttgtattcattcaatgtctctttttcagaaattagtttagagtcgaatactgcaataattttcaagagatagttttcatcagataagattttatttagtgtagatatgataaaactattgttttgttggagaacttgatacgccgcgttctctgtagtcgacgctctcaaatgggaaacaatctccattatttttttggaatcggatacaatatcttcggtatcttgacgcagtctagtatacatagagttaagagagattagagtttgtacattaagcaacatgtctctaaatgtggctacaaacttttccttttccacatcatctagtttattatataccgatttcacaacggcaccagatttaaggaaccagaatgaaaaactctgataactacaatatttcatcatagttacgattttatcatcttctatagttggtgtgatagcgcatacctttttctccaagactggaaccaacgtcataaaaatgtttaaatcaaaatccatatcaacatctgatgcgctaagaccagtctcgcgttcaagattatctttactaatggtgacgaactcatcgtataaaactctaagtttgtccattatttatttacagatttagttgtttaatttatttgtgctcttccagagttgggatagtatttttctaacgtcggtattatattattaggatctacgttcatatgtatcataatattaatcatccacgttttgataaatctatctttagcttctgaaataacgtatttaaacaaaggagaaaaatatttagctacggcatcagacgcaataacattttttgtaaatgtaacatatttagacgacagatcttcgttaaaaagttttccatctatgtagaatccatcagttgttaacaccattcccgcgtcagattgaataggagtttgaatagtttgttttggaaatagatccttcaataacttatagttgggtgggaaaaaatcgattttatcactagactctttcttttttactatcattacctcatgaactatttcttgaatgagtatatgtattttctttcctatatcggacgcgttcattggaaaatataccatgtcgttaactataagaatatttttatcctcgtttacaaactgaataatatcagatgtagttcgtaaacgaactatatcatcaccagcacaacatctaactatatgatatccactagtttcctttagtcgtttattatcttgttccatattagcagtcattccatcatttaagaaggcgtcaaagataatagggagaaatgacattttggattctgttacaactttaccaaaattaaggatatacggacttactatctttttctcaacgtcaatttgatgaacacacgatgaaaatgtacttcgatgagattgatcatgtagaaaacaacaagggatacaatatttccgcatatcatgaaatatattaagaaatcccaccttattatatttccccaaaggatccatgcacgtaaacattatgccgttatcattaataaagacttctttctcatcggatctgtaaaagttgttactgatttttttcattccaggatctagataattaataatgatgggttttctattcttattctttgtattttggcatatcctagaccagtaaacagtttccactttggtaaaatcagcagacttttgaacgctattaaacatggcattaatggcaataactaaaaatgtaaaatatttttctatgttaggaatatggtttttcactttaatagatatatggtttttggccaaaatgatagatatttttttatccgaggatagtaaaatattattagtcgccgtctctataaaaatgaagctagtctcgatatccaattttattctagaattgataggagtcgccaaatgtaccttatacgttatatctcccttgatgcgttccatttgtgtatctatatcggacacaagatctgtaaatagttttacgttattaatcatcacggtatcgccgtcgctagataatgctaatgtaccatccaagtcccaaatggagagatttaactgttcatcgtttagaataaaatgattaccggtcatattaataaagtgttcatcgtatctagataacaacgacttataattaatgtccaagtcttgaactcgctgaatgatcttttttaacccagttagttttagattggtacgaaatatattgttaaactttgattctacagtaatgtccaaatctagttgtggaaatacttccatcaacattgtttcaaacttgataatattattatctacatcttcgtacgatccaaattccggaatagatgtatcgcacgctctgaccacccagataaccaaaaagtcacacgctccaggatatacattgtataaaaagctatcgttttttagtagtgtttttttctgagtatatacgaagggattaaaaatagtattatcaacgtaactatattccaaattattcttatgagaatagataataatatcgtccttaatatctaacaaatttcctaaatatccctttaattgagtcattcgaagcgtcaatagaatatgtctcttaactatttccggctgttgtatatttaaatgacttcgtaaaaaataatatatgggcgacttctcatctatgtaatcatatggagtgagatatagggctcgttctacctcctgccccttacccacctgtaataccaattgcggacttactatatatcgcatatttatatcgtggggtaaagtgaaaatctactaccgatgatgtaagtcttacaatgttcgaaccagtaccagatcttaatttggaggcctccgtagaactaggggaggtaaatatagatcaaacaacacctatgataaaggagaatagcggttttatatcccgcagtagacgtctattcgcccatagatctaaggatgatgagagaaaactagcactacgattctttttacaaagactttattttttagatcatagagagattcattatttgttcagatgcgttgacgctgtaaaagacgtcactattaccaaaaaaaataacattatcgtggcgccttatatagcacttttaactatcgcatcaaaaggatgcaaacttacagaaacaatgattgaagcattctttccagaactatataatgaacatagtaagaaatttaaattcaactctcaagtatccatcatccaagaaaaactcggataccagtttggaaactatcacgtttatgattttgaaccgtattactctacagtagctctggctattcgagatgaacattcatctggcatttttaatatccgtcaagagagttatctggtaagttcattatctgaaataacatatagattttatctaattaatctaaaatctgatcttgttcaatggagtgctagtacgggcgctgtaattaatcaaatggtaaatactgtattgattacagtgtatgaaaagttacaactggtcatagaaaatgattcacaatttacatgttcattggctgtggaatcagaacttccaataaaattacttaaagatagaaatgaattatttacaaaattcattaacgagttaaaaaagaccagttcattcaagataagcaaacgcgataaggatacgctattaaaatattttacttaggactggagttagaatttatagacgactcatttcgtttatcattattactaccatcattattagtattcttcttgtcatcttgttcagaaatatacagcaatgctatacctaatactaaatacattatcatgctcgcaatggctctaacaacaacgaaccaaaatgaatttggtcgtagcttttgttcacaaaaatacataaagaaatgtctacataaatctatggcgccattggctacttgaaatagcgccagtcctcctacagattttaatatagctgtataacatgacatttattcatcatcaaaagagacagagtcaccatctgtcatatttagattttttttcatgtgttcaaagtatcctctactcatttcattataatagtttatcatacttagaattttaggacggatcaatgagtaagacttgactagatcgtcagtagtaatttgtgcatcgtctattctgcatccgcttcgtcgaataatgtatagcatcgctttgagattctccatagctatcaagtctttatacaatgacatggaaatatctgtgaatactttatacttctccaacatcgatgccttaacatcatcgcctactttagcattgaaaatacgttctattgtgtagatggatgtagcaagatttttaaacaacaatgccattttacacgatgattgcctcaagtctccaatcgtttgtttagaacgattagctacagagttcaacgcttggctgactagcatattattatctttagaaattgtattcttcaatgaggcgtttatcatatctgtgatttcgttagtcatattacagtctgactgggttgtaatgttatccaacatatcacctatggatacggtacacgtaccagcatttgtaataatcctatctaagatgttgtatggcattgcgcagaaaatatcttctcctgtaatatctccactctcgataaatctactcagattattcttaaatgccttattctctggagaaaagatatcagtgtccatcatttcattaatagtatacgcagaaaagataccacgagtatcaattctatccaagatacttatcggttccgagtcacagataatggtttcctctccttcgggagatcctgcatagaaatatctaggacaatagtttctatactgtctgtaactctgataatctctaaagtcactaactgataccatgaaattgagaagatcaaacgctgaagtaattaatttttctgcctcgtttttactacaactagttttcatcaatgtagtgacgatgtattgtttagttactcttggtctaatactgatgatagagatattattacttcccataatggatcttctagtagtcaccttaaagcccattgatgcaaatagcagatagataaagtcttggtatgactcctttctaatatagtacggactacctttgtcacccaactttatacccacataagccataacaacctctttaatagccgtttcatgaggtttatcagccatgagcctgagtagttggaagaatctcatgaatcccgtctcagaaagtcctatatgcatgatagatttatctttcctgggaaactctcgtatagtcatagatgaaatactcttcaaagtttctgaaataagattagtaacagtcttacctccgactactctaggtaacaaacaaactctaataggtgttttctctgcggagataatatcagaaaggatagagcaataagtagtattattgtgattataaagaccgaatacataacaggtagaatttataaacatcatgtcctgaaggtttttagacttgtattcctcgtaatccataccgtcccaaaacatggatttggtaactttgatagccgtagatctttgttccttcgccaacaggttaaagaaattaataaagaatttgttgtttctatttatgtccacaaattgcacgtttggaagcgccacggttacattcactgcagcattttgaggatcgcgagtatgaagtacgatgttattgtttactggtatatctggaaagaaatctaccagtctaggaataagagattgatatcgcatagaaatacaaaagttcataatctcatcatcgaagagcattttgttaccattgtaataaatatccactctgtcatatgtataaatgaagtactgttcaaacatgatgagatgtttatatgttggcatagtagtgagatcgacgtttggtaatggcaatgtattaagattaactccataatgtctagcagcatctgcgatgttataagtgttgtcaaagcggggtcgatcttgtgctgttatatattgtctaacacctataagattatcaaaatcttgtctgcttaatacaccgttaacaatttttgccttgaattcttttattggtgcattaataacatccttatagaggatgttaaacaaataagtattatcaaagttaagatctgggtatttcttttctgctagaacatccattgagtcggagccatctggtttaatataaccaccgataaatctagctctgtattctgtatccgtcaatctaatattaagaaggtgttgagtgaaaggtggaagatcgtaaaagctgtgagtattaatgataggattagtttccgaactaatgttaattggggtattaataatatctatatttccagcgttaagtgtaacattaaacagttttaattcacgtgacgtggtatcaattaaataattaatgcccaatttggatatagcagcctgaagctcatcttgtttagttacggatcctaatgagttattaagcaatatatcgaacggatgaacgaaggttgttttgagtttgtcgcatactttgtaatctagacatagatgcggaagaacggtagaaactatacgaaataaatattcagagtcctctaattgatcaagagtaactattgacttaataggcatcatttatttagtattaaatgacgaccgtaccagtgacggatatacaaaacgatttaattacagagttttcagaagataattatccatctaacaaaaattatgaaataactcttcgtcaaatgtctattctaactcacgttaacaacgtggtagatagagaacataatgccgccgtagtgtcatctccagaggaaatatcctcacaacttaatgaagatctatttccagatgatgattctccggccactattatcgaaagagtacaacctcatactactattattgacgatactccacctcctacgtttcgtagagagttattgatatcggaacaacgtcaacaacgagaaaaaagatttaatattacagtatcgaaaaatgctgaagcaataatggaatctagatctatgatatcttctatgccaacacaaacaccatccttgggagtagtttatgataaagataaaagaattcagatgttggaggatgaagtggttaatcttagaaatcaacgatctaatacaaaatcatctgataatttagataattttaccagaatactatttggtaagactccgtataaatcaacagaagttaataagcgtatagccatcgttaattatgcaaatttgaacgggtctcccttatcagtcgaggacttggatgtttgttcagaggatgaaatagatagaatctataaaacgattaaacaatatcacgaaagtagaaaacgaaaaattatcgtcactaacgtgattattattgtcataaacattatcgagcaagcattgctaaaactcggatttgaagaaatcaaaggactgagtaccgatatcacttcagaaattatcgatgtggagatcggagatgactgcgatgctgtagcatctaaactaggaatcggtaacagtccggttcttaatattgtattgtttatactcaagatattcgttaaacgaattaaaattatttaatttaatacattcccatatccagacaacaatcgtctggattaatctgttcctgtcgtctcataccggacgacatattaatctttttattagtaggcatctttttagatggtttctttttcccagcattaactgagtcgatacctagaagatcgtgattgatctctccgaccattccacgaacttctaattggccgtctctgacggtaccataaactattttaccagcattagtaacagcttggacaatctgaccatccatcgcattgtacgatgtagtagtaactgttgttctacgtctaggagcaccagaagtatttttggagcccttggaggttgatgtagaagaagacgaggattttgattttggtttacatgtaatacattttgaactctttgattttgtatcacatgcgccggcagtcacatctgtttgagaattaagattattgttgcctcctttgacggctgcatctccaccgatttgcgctagtagatttttaagctgtggtgtaatcttattaactgtttcgatataatcatcgtaactgcttctaacggctaaattttttttatccgccatttagaagctaaaaatatttttatttatacagaagatttaactagattatacaatgaactaatatgatccttttccagattatttacaaacttggtattttttggttctggaggaggcgaatttaaattcggacttggattcggattttgtgagttcttgatcttattatacatcgagtataggatggcgacggtaactgctacgcaaataccgatcaacaaaagaataccaatcatttattgacaataacttcactattgatcaagtatgcaatatatcatcttttcactaaataagtagtaataatgattcaacaatgtcgagatatatggacgataataatttagttcatggaaatatcgctatgattggtatgaatgactccgctaactctgtggggtgcgcagtgctttccccacatagaataaattagcattccgactgtgataataataccaagtataaacgccataatactcaatactttccatgtacgagtgggactggtagacttactaaagtcaataaaggcgaagatacacgaaagaatcaaaagaatgattccagcgattagcacgccggaaaaataatttccaatcataagcatcatgtccatttaactaataaaaattttaaatcgccgaatgaacaaagtggaatataaaccatataaaaacaatagtttgtactgcaaaaataatatctatttttgttttcgaagatatggtaaaattaaatagtagtacacagcatgttataactaacagcagcaacggctcgtaattacttatcatttactagacgaaaaggtggtgggatattttcttgctcaaataatacgaatatatcacccatccattttatgcgatgtttatatactctaatctttaatagatctatagacgacgggtttaccaacaatatagattttatcgattcatctaatttaaacccttccttaaacgtgaatgatctattatctggcataacgatgactctacctgatgaatcggacaatgtactgggccatgtagaataaattatcaacgaattatcgtctacgaacatttatatcatttgttttaattttaggacgcgaataaatagatataaaatagaaaataacagatattacaaccaatgttatggccgcgcccaaccaggtaggcagttttattttatcttttactacaggttctcctggatgatgtacgtcaccaacggcggacgtagttctagtacaattagacgtaagttctgcttgggaattttttaacgctaaagagttaacgttaatcgtgcacccaacgtatttacatctagttctttgaacatcttgattataatataaccattttctatctctagattcgtcggtgcactcatgtaaccaacataccctaggtcctaaatatttatctccggaattagattttggataattcgcgcaccaacaatttctatttcctttatgatcgttacaaaagacgtataatgccgtatccccaaaagtaaaataatcaggacgaataattctaataaactcagaacaatatctcgcatccatatgtttggagcaaatatcggaataagtagacatagccggtttccgttttgcacgtaaccattctaaacaattggggtttccaggatcgtttctacaaaatccagtcatgaaatcgtcacaatgttctgtcttgtaattattattaaatatttttggacagtgtttggtatttgtcttagaacaacattttgctacgctatcactatcgcccaggagataatccttttttataaaatgacatcgttgcccggatgctatataatcagtagcgtgttttaaatccttaatatattcaggagttacctcgttctgataatagattaatgatccaggacgaaatttgaaagaactacatggttctccatgaattaatacatattgtttagcaaattcaggaactataaaactactacaatgatctatcgacataccatctatcaaacaaaatttgggtttaatttctcccggagatgtttcataatagtacgtataactttcttctgcaaacttaacagctctattatattcaggataattaaaacctaattccatatatttgtctcgtatatctgctattcctggtgctattttgattctattaagagtaacagctgcccccattcttaataatcgtcagtatttaaactgttaaatgttggtatatcaacatctaccttatttcccgcagtataaggtttgttgcaggtatactgttcaggaatggttacatttatacttcttctatagtcctgtctttcgatgttcatcacatatgcaaagaacagaataaacaaaataatgtaagaaataatattaaatatctgtgaattcgtaaatacattgattgccataataattacagcagctacaatacacacaatagacattcccacagtgttgccattacctccacgatacatttgagttactaagcaataggtaataactaagctagtaagaggcaatagaaaagatgagataaatatcatcaatatagagattagaggagggctatatagagccaagacgaacaaaatcaaaccgagtaacgttctaacatcattatttttgaagattcccaaataatcattcattcctccataatcgttttgcatcatacctccatctttaggcataaacgattgctgctgttcctctgtaaataaatctttatcaagcactccagcacccgcagagaagtcgtcaagcatattgtaatatcttaaataactcatttatatattaaaaaatgtcactattaaagatggagtataatctttatgccgaactaaaaaaaatgacttgtggtcaacccctaagtctttttaacgaagacggggatttcgtagaagttgaaccgggatcatcctttaagtttctgatacctaagggattttacgcctctccttccgtaaagacgagtctagtattcgagacattaacaacgaccgataataaaatcactagtatcaatccaacaaatgcgccaaagttatatcctcttcaacgcaaagtcgtatctgaagtagtttctaatatgaggaaaatgatcgaatcaaaacgtcctctatacattactcttcacttggcgtgtggatttggtaagactattaccacgtgttatcttatggctacacacggtagaaaaaccgtcatttgcgtacccaataaaatgttaatacatcaatggaagacacaggtagaggcagtcggattggaacataagatatccatagatggagtaagtagtctattaaaggaactaaagactcaaagtccggatgtattaatagtagtcagtagacatctgacaaacgatgccttttgtaaatatatcaataagcattatgatttgttcatcttggatgaatcacatacgtataatctgatgaacaatacagcagttacaagatttttagcgtattatcctccgatgatgtgttattttttaactgctacacctagaccagctaaccgaatttattgtaacagtattattaatattgccaagttatccgatctaaaaaaaactatctatgcggtagatagtttttttgagccatattccacagataatattagacatatgataaaacgattagatggaccatctaataaatatcatatatatactgagaagttattatctgtagacgagcctagaaatcaacttattcttgataccctggtagaagaattcaagtcaggaactattaatcgaattttagttattactaaactacgtgaacatatggtattcttctacaaacgattattagatcttttcggaccagaggttgtatttataggagacgcccaaaatagacgtactccagatatggtcaaatcaatcaaggaactaaatagatttatattcgtatccaccttattttattccggtactggtttagatattcctagtttggattcgttgttcatttgctcggcagtaatcaacaatatgcaaatagagcaattactagggagggtatgtcgagaaacagaactattagataggacggtatatgtatttcctagcacatccatcaaagaaataaagtacatgataggaaatttcatgcaacgaattattagtctgtctgtagataaactaggatttaaacaaaaaagttatcggaaacatcaagaatccgatcccacttctgtatgtacaacatcctccagagaagaacgtgtattaaatagaatatttaactcgcaaaatcgttaagaagtttaagcgacgatccgcatgctgcgcaggccagtgtattacccctcatagtattaatataatccaatgatacttttgtgatgtcggaaatcttaaccaatttagactgacaggcagaacacgtcatgcaatcatcatcgtcatcgataactgtagtcttgggcttctttttgcggctcttcattccggaacgcacattggtgctatccatttaggtagtaaaaaataagtcagaatatgccctatagcacgatcgtgcaaaacctggtatatcgtctctatctttatcacaatatagtgtatcgacatctttattattattgacttcgtttatcttggaacatggaatgggaacatttttgttatcaacggccacctttgccttaattccagatgttgtaaaattataactaaacagtctatcatcgacacaaatgaaattcttgtttagacgtttgtagtttacgtatgcggctcgttcgcgtctcattttttcagatattgcaggtactataatattaaaaataagaatgaaataacataggattaaaaataaagttatcatgacttctagcgctgatttaactaacttaaaagaattacttagtctgtacaaaagtttgagattttcagattctgcggctatagaaaagtataattctttggtagaatggggaacatctacttactggaaaataggcgtgcaaaaggtagctaatgtcgagacgtcaatatctgattattatgatgaggtaaaaaataaaccgtttaatattgatccgggctattacattttcttaccggtatattttgggagcgtctttatttattcgaagggtaaaaatatggtagaacttggatctggaaactcttttcaaataccagatgatatgcgaagtgcgtgtaacaaagtattagacagcgataacggaatagactttctgagatttgttttgttaaacaatagatggataatggaagatgctatatcaaaatatcagtctccagttaatatatttaaactagctagtgagtacggattaaacatacccaaatatttagaaattgaaatagaggaagacacattatttgacgacgagttatactctattatagaacgctcttttgatgataaatttccaaaaatatccatatcgtatattaagttgggagaacttagacggcaagttgtagactttttcaaattctcgttcatgtatattgagtccatcaaggtagatcgtataggagataatatttttattcctagcgttataacaaaatcaggaaaaaagatattagtaaaagatgtagaccatttaatacgatccaaggttagagaacatacatttgtaaaagtaaaaaagaaaaacacattttccattttatacgactatgatggaaacggaacagaaactagaggagaagtaataaaacgaattatagacactataggacgagactattatgttaacggaaagtatttctctaaggttggtagtgcaggcttaaagcaattgactaataaattagatattaatgagtgcgcaactgtcgatgagttagttgatgagattaataaatccggaactgtaaaacgaaaaataaaaaaccaatcagcatttgatttaagcagagaatgtttgggatatccagaagcggattttataacgttagttaataacatgcggttcaaaatagaaaattgtaaggttgtaaatttcaatattgaaaatactaattgtttaaataacccgagtattgaaactatatatagaaactttaaccagttcgtctcaatctttaatgtcgtcaccgatgtcaaaaaaagattattcgagtgaaataatatgcgcctttgatataggtgcaaaaaatcctgccagaactgttttagaagtcaaggataactccgttagggtattggatatatcaaaattagactggagttctgattgggaaaggcgcatagctaaagatttgtcacaatatgaatacactacagttcttctagaacgtcagcctagaaggtcgccgtatgttaaatttatctattttattaaaggctttttatatcatacatcggctgccaaagttatttgcgtctcgcctgtcatgtctggtaattcatatagagatcgaaaaaagagatcggtcgaagcatttcttgattggatggacacattcggattgcgagactccgttccggatagacgcaaattagacgatgtagcggatagtttcaatttggctatgagatacgtattagataaatggaatactaattatacaccttataataggtgtaaatctaggaattacataaaaaaaatgtaataacgttagtaacgccattatggataatctatttacctttctacatgaaatagaagatagatatgccagaactatttttaactttcatctaataagttgcgatgaaataggagatatatatggtcttatgaaagaacgaatttcctcagaggatatgtttgataatatagtgtataataaagatatacatcatgccattaagaaactagtgtattgcgacatccaacttactaaacacattattaatcagaatacgtatccggtatttaacgattcttcacaagtgaaatgttgtcattatttcgatataaactcagataatagcaatattagctctcgtacagtagagatatttgagagggaaaagtcatctcttgtatcatatattaaaactaccaataagaagagaaaggtcaattacggcgaaataaagaaaactgttcatggaggcactaatgcaaattacttttccggtaaaaagtctgatgagtatctgagtactacagttagatccaacattaatcaaccttggatcaaaaccatttctaagagaatgagagtagatatcattaatcactctatagtaacgcgtggaaaaagctctatattacaaactatagaaattatttttactaatagaacatgtgtgaaaatattcaaggattctactatgcacattattctatccaaggacaaggatgaaaaggggtgtatacacatgattgacaaattattctatgtctattataatttatttctgttgttcgaagatatcatccaaaacgagtactttaaagaagtagctaatgttgtaaaccacgtacttacggctacggcattagatgagaaattattcctaattaagaaaatggctgaacacgatgtttatggagttagcaatttcaaaatagggatgtttaacctgacatttattaagtcgttggatcataccgttttcccctctctgttagatgaggatagcaaaataaagttttttaaggggaaaaagctcaatattgtagcattacgatctctggaggattgtataaattacgtgactaaatccgagaatatgatagaaatgatgaaggaaagatcgactattttaaatagcatagatatagaaacggaatcggtagatcgtctaaaagaattgcttctaaaatgaaaaaaaacactgattcagaaatggatcaacgactcggatataagtttttggtgcctgatcctaaagccggagttttttatagaccgttacatttccaatatgtatcgtattctaattttatattgcatcgattgcatgaaatcttgaccgtcaagcggccactcttatcgtttaagaataatacagaacgaattatgatagaaattagcaatgttaaagtgactcctccagattactcacctataatcgcgagtattaaaggtaagagttatgacgcattagccacgttcactgtaaatatctttaaagaggtaatgaccaaagagggtatatccatcactaaaataagtagttatgagggaaaagattctcatttgataaaaattccgctactaataggatacgggaataaaaatccacttgatacagccaagtatcttgttcctaatgtcataggtggagtctttatcaataaacaatctgtcgaaaaagtaggaattaatctagtagaaaagattacaacatggccaaaatttagggttgttaagccaaactcattcactttctcgttttcctccgtatcccctcctaatgtattaccgacaagatatcgccattacaagatatctctggatatatcacaattggaagcgttgaatatatcatcgacaaagacatttataacggtcaatattgttttgctgtctcaatatttatctagagtgagtctagaattcattagacgtagcttatcatacgatatgcctccagaagttgtctatctagtaaacgcgataatagatagtgctaaacgaattactgaatctattactgactttaatattgatacatacattaatgacctggtggaagctgaacacattaaacaaaaatctcagttaacgatcaacgagttcaaatatgaaatgctgcataactttttacctcatatgaactatacacccgatcaactaaagggattttatatgatatctttactaagaaagtttctctactgtatctaccacacttctagatatccagatagagattcgatggtttgtcatcgtatactaacatacggcaaatattttgagacgttggcacatgatgaattagagaattacataggcaacatccgaaacgatatcatgaacaatcacaagaacagaggcacttacgcggtaaacattcatgtactaacaactcctggacttaatcatgcattttctagcttattgagtggaaagttcaaaaagtcagacggtagttatcgaacacatcctcactattcatggatgcagaatatttctattcctaggagtgttggattttatccggatcaagtaaagatttcaaagatgttttctgtcagaaaataccatccaagtcaatatctttacttttgttcatcagacgttccggaaagaggtcctcaggtaggtttagtatctcaattgtctgtcttgagttccattacaaatatactaacgtctgagtatttggatttggaaaagaaaatttgtgagtatatcagatcatattataaagatgatataagttactttgaaacaggatttccaatcactatagaaaatgctctagtcgcatctcttaatccaaatatgatatgtgattttgtaactgactttagacgtagaaaacggatgggattcttcggtaacttggaggtaggtattactttagttagggatcacatgaatgaaattcgcattaatattggagcgggaagattagtcagaccattcttggttgtggataacggagagctcatgatggatgtgtgtccggagttagaaagcagattagacgatatgacattctctgacattcagaaagagtttccacatgtcatcgaaatggtagatatagaacaatttacttttagtaacgtatgtgaatcggttcaaaaatttagaatgatgtcaaaggatgaaagaaagcaatacgatttatgtgactttcctgccgaatttagagatggatatgtggcatcttcattagtgggaatcaatcacaattctggacccagagctattcttggatgtgctcaagctaaacaagctatctcttgtctgagttcggatatacgaaataaaatagacaatggaattcatttgatgtatccagagaggccaatcgtgattagtaaggctttagaaacttcaaagattgcggctaattgcttcggccaacatgttactatagcattaatgtcgtacaaaggtatcaatcaagaggatggaattatcatcaaaaaacaatttattcagagaggcggtctcgatatagttaccgcaaagaaacatcaagtagaaattccgttggaaaactttaataacaaagaaagagataggtctaatgcatattcgaaattagaaagtaatggattagttagactgaatgctttcttggaatccggagacgctatggcacgaaatatctcatcaagaactcttgaagatgattttgctagagataatcagattagcttcgatgtttccgagaaatataccgatatgtacaaatctcgcgttgaacgagtacaagtagaacttactgacaaagttaaggtacgagtattaaccatgaaagaaagaagacccattctaggagacaaatttaccactagaacgagtcaaaagggaacagtcgcgtatgtcgcggatgaaacggaacttccatacgatgaaaatggtatcacaccagatgtcattattaattctacatccatcttctctagaaaaactatatctatgttgatagaggttattttaacagccgcatattctgctaagccgtacaacaataagggagaaaaccgacctgtctgttttcctagtagtaacgaaacatccatcgatacatatatgcaattcgctaaacaatgttatgagcattcaaatccgaaattgtctgatgaagaattatcggataaaatcttttgtgaaaagattctctatgatcctgaaacggataagccttatgcatccaaagtattttttggaccaatttattacttgcgtctgaggcatttaactcaggacaaggcaaccgttagatgtagaggtaaaaagacgaagctcattagacaagcgaatgagggacgaaaacgtggaggaggtattaagtttggagaaatggagagagactgtttaatagcgcatggcgcagccaatactattacagaagttttgaaagattcggaagaagattatcaagatgtgtatgtttgtgaaaattgtggagacatagcagcacaaatcaagggtattaatacatgtcttagatgttcaaaacttaatctctctcctctcttaacaaaaattgataccacgcacgtatctaaagtatttcttactcaaatgaacgccagaggcgtaaaagtcaaattagatttcgaacgaaggcctccttcgttttataaaccattagataaagttgatctcaagccgtcttttctggtgtaatattctagtttggtagtagatacatatcaatatcatcaaattcgagatccgaattataaaatgggcgtggattgttaactatagaatcggacgtctgatattcgaaaatctgtggagtttcaggttttggtggaggtgtaactgctacttgggatactgaagtctgatattcagaaagctgggggatgttctggttcgacatccaccgatggtgtcacatcactaatcggttcggtaacgtctgtggatggaggtgctacttctacagaacctgtagcctcagttgtcaacggagatacatttttaatgcgaggaaatgtataatttggtaatggtttctcatgtggatctgaagaagaggtaagatatctactagaaagataccgatcacgttctagttctcttttgtagaacttaactttttctttctcagcatctagttgatattccaacctcttcacgttactacgttcagatttcaattcacgttcgcatgggttacctccgcagtttttacgagcgatttcacgttcagccttcatgcgtctctgtgatccgtttacgttaaaccataaatacatgggtgatcctataaacatgaatttatttctaattctcagagctatagttaattgaccgtgtaatatttgcttacatgcatacttgatacgctcattaataagatttttatcattgctcgttatctcagaatcgtatatataaggagtaccatcgtgattcttaccagatattatacaaaatactatatataaaatatattgaccaacgttagtaatcatataaatgtttaacgttttaaattttgtattcaatgatccattatcatacgctagcatggtcttatgatattcattctttaaaatataatattgtgttagccattgcattggagctcctaatggagattttctattctcgtccattttaggatatgctttcataaagtccctaataacttcgtgaataatgtttctatgttttctactgatgcatgtatttgcttcgatttttttatcccatgtttcatctatcatagatttaaacgcagtaatgctcgcaacattaacatcttgaaccgttggtacaattccgttccataaatttataatgttcgccatttatataactcattttttgaatatacttttaattaacaaaagagttaagttactcatatggacgccgtccagtctgaacatcaatctttttagccagagatatcatagccgctcttagagtttcagcgtgattttccaacctaaatagaacttcatcgttgcgtttacaacacttttctatttgttcaaactttgttgttacattagtaatctttttttccaaattagttagccgttgtttgagagtttcctcattgtcgtcttcatcggctttaacaattgcttcgcgtttagcctctggctttttatcagcctttgtagaaaaaaattcagttgctggaattgcaagatcgtcatctccggggaaaagagttccgtccatttaaagtacagattttagaaactgacactctgcgttatttatatttggtacaacacatggattataaatattgatgttaataacatcagaaaatgtaaagtctatacattgttgcatcgtgttaaattttctaatggatctagtattattgggtccaacttctgcctgaaatccaaatatggaagcggatacaaaaccgtttcctggataaaccacacatctccacttttgctttacatcagaaattgtgtcgttgacatcttgaactctcctatctaatgccggtgttccacctatagattttgaatattcgaatgctgcatgagtagcattaaattccttaatattgccataattttcatatattgagtaaccctggataaaaagtaaacacaccgcagccgtcgctaccacaataaaaaaaattgatagagagttcatttataatctattagaagctgacaaaatttttttacacgcatcagacaatgctttaataaatagttcaacatctacttttgtcatatcgaaccgatggtatgattctaacctagaattacatccgaaaaagttgactatgttcatagtcattaagtcattaacaaacaacattccagactctggattataagacgatactgtttcgtcacaatcacctaccttaatcatgtgattatgaatattggctattagagcaccttctaagaaatctataatatctttgaaacacgatttaaaatcaaaccacgaatatacttctacgaagaaagttagtttacccataggagagataactataaatggagatctaaatacaaaatccggatctatgatagttttaacattattatattctctattaaatacctccacatctaaaaatgttaattttgaaactatgtcttcgtttattaccgtacctgaactaaacgctataagctctattgtttgagaactctttaaacgatattcttgaaatacatgtaacaaagtttcctttaactcggtcggtttatctaccatagttacagaatttgtatccttatctataatataataatcaaaatcgtataaagttatataattatcgcgttcagattgggatcttttcaaatagactaaaaaccccatttctctagtaagtatcttatgtatatgtttgtaaaatatcttcatggtgggaatatgctctaccgcagttagccattcctcattgacagcggtagatgtattagacaaaactattccaatgtttaacaagggccattttacgagattattaaatccttgtttgataaatgtagccaatgagggttcgagttcaacgacgattgaattctcttcccgcggatgctgcatgatgaacgacgggatgttgttcgattgatttggaattctttttcgactttttgtttatattaaatattttaaaatttatagctgatagcaattcatgtaccacggataatgtagacgcgtattgcgcatcgatatctttattattagataaatttatcaataaatgtgagaagtttgcctcgttaaggtcttccatttaaatattatataaacatttgtgtttgtatcttattcgtcttttatggaatagttttttactagtaaagctgcaattacacactttgtccgtaaaacataaatataaacaccagcttttatcaatcgttccaaaaagtcgacggcggacatttttaacatggcatctattttaaatacacttaggtttttggaaaaaacatcattttataattgtaacgattcaataactaaagaaaagattaagattaaacataagggaatgtcatttgtattttataagccaaagcattctaccgttgttaaatacttgtctggaggaggtatatatcatgatgatttggttgtattggggaaggtaacaattaatgatctaaagatgatgctattttacatggatttatcatatcatggagtgacaagtagtggagtaatttacaaattgggatcgtctatcgatagactttctctaaataggactattgttacaaaagttaataattatgatgatacattttttgacgacgatgattgatcgctattgcacaattttgtttttttactttctaatatagcgtttagattctttttcatgtgcgaatattgatttactaaaatatcgatgtttaacttttgttctatgacgtccttatcggcggtatcggtacatatacgtaattcaccttcacaaaatacggagtcttcgataataatagccaatcgattattggatctagctgtctgtatcatattcaacatgtttaatatatcctttcgtttcccctttacaggcatcgatcgtagcatattttccgcgtctgagatggaaatgttaaaactacaaaaatgcgtaatgttagcccgtcctaatattggtacgtgtctataagtttggcatagtagaataatagacgtgtttaaatgccttccaaagtttaagaattctattagagtattgcattttgatagtttatcgcctacatcatcaaaaataagtaaaaagtgtgctgattttttatgattttgtgcgacagcaatacatttttctatgttacttttagttcgtatcagattatattctagagattcctgactactaacgaaattaatatgatttggccaaatgtatccatcataatctgggttataaacgggtgtaaacaagaatatatgtttatattttttaactagtgtagaaaacagagatagtaaatagatagtttttccagatccagatcctcccgttaaaaccattctaaacggcatttttaataaattttctcttgaaaattgtttttcttggaaacaattcataattatatttacagttactaaattaatttgataataaatcaaaatatggaaaactaaggtcgttagtagggaggagaacaaagaaggcatatcgtgatataaataacatttattatcatgatgacaccagaaaacgacgaagagcagacatctgtgttctccgctactgtttacggagacaaaattcaaggaaagaataaacgcaaacgcgtgattggtctatgtattagaatatctatggttatttcactactatctatgattaccatgtccgcgtttctcatagtgcgcctaaatcaatgcatgtctgctaacgaggctgctattactgacgccgctgttgccgttgctgctgcatcatctactcatagaaaggttgcgtctagcactacgcaatatgatcacaaagaaagctgtaatggtttatattaccagggttcttgttatatattacattcagactaccagttattctcggatgctaaagcaaattgcactgcggaatcatcaacactacccaataaatccgatgtcttgattacctggctcattgattatgttgaggatacatggggatctgatggtaatccaattacaaaaactacatccgattatcaagattctgatgtatcacaagaagttagaaagtatttttgtgttaaaacaatgaactaatatttatttttgtacattaataaatgaaatcgcttaatagacaaactgtaagtatgtttaagaagttgtcggtgccggccgctataatgatgatactctcaaccattattagtggcataggaacatttctgcattacaaagaagaactgatgcctagtgcttgcgccaatggatggatacaatacgataaacattgttatctagataccaacattaaaatgtccacagataatgcggtttatcagtgtcgtaaattacgagctagattgcctagacctgatactagacatctgagagtattgtttagtattttttataaagattattgggtaagtttaaaaaagaccaataataaatggttagatattaataatgataaagatatagatattagtaaattaacaaattttaaacaactaaacagtacgacggatgctgaagcgtgttatatatacaagtctggaaaactggttaaaacagtatgtaaaagtactcaatctgtactatgtgttaaaaaattctacaagtgacaacaaaaaatgaattaataataagtcgttaacgtacgccgccatggacgccgcgtttgttattactccaatgggtgtgttgactataacagatacattgtatgatgatctcgatatttcaatcatggactttataggaccatacattataggtaacataaaaactgtccaaatagatgtacgggatataaaatattccgacatgcaaaaatgctactttagctataagggtaaaatagttcctcaggattctaatgatttggctagattcaacatttatagcatttgtgccgcatacagatcaaaaaataccatcatcatagcatgcgactatgatatcatgttagatatagaagataaacatcagccattttatctattcccatctattgatgtttttaacgctacaatcatagaagcgtataacctgtatacagctggagattatcatctaatcatcaatccttcagataatctgaaaatgaaattgtcgtttaattcttcattctgcatatcagacggcaatggatggattataattgatgggaaatgcaatagtaattttttatcataaaagttgtaaagtaaataataaaacaataaatattgaactagtagtacgtatattgagcaatcagaaatgatgctggtacctcttatcacggtgacagtagttgcgggaacaatattagtatgttatatattatatatttgtaggaaaaagatacgtactgtctataatgacaataaaattatcatgacaaaattaaaaaagataaagagttctaattccagcaaatctagtaaatcaactgatagcgaatcagactgggaggatcactgtagtgctatggaacaaaacaatgacgtagataatatttctaggaatgagatattggacgatgatagcttcgctggtagtttaatatgggataacgaatccaatgttatggcgcctagcacagaacacatttacgatagtgttgctggaagcacgctgctaataaataatgatcgtaatgaacagactatttatcagaacactacagtagtaattaatgaaacggagactgttgaagtacttaatgaagataccaaacagaatcctaactattcatccaatcctttcgtaaattataataaaaccagtatttgtagcaagtcaaatccgtttattacagaacttaacaataaatttagtgagaataatccgtttagacgagcacatagcgatgattatcttaataagcaagaacaagatcatgaacacgatgatatagaatcatcggtcgtatcattggtgtgattagtttcctttttataaaattgaagtaatatttagtattattgctgccgtcacgttgtacaaatggagatattccctgtattcggcatttctaaaattagcaattttattgctaataatgactgtagatattatatagatacagaacatcaaaaaattatatctgatgagatcaatagacagatggatgaaacggtacttcttaccaacatcttaagcgtagaagttgtaaatgacaatgagatgtaccatcttattccccatagactatcgactattatactctgtattagttctgtcggaggatgtgttatctctatagataatgacgtcaatggcaaaaatattctaacctttcccattgatcatgctgtaatcatatccccactgagtaaatgtgtcgtagttagcaagggtcctacaaccatattggttgttaaagcggatatacctagcaaacgattggtaacatcgtttacaaacgacatactgtatgtaaacaatctatcactgattaattatttgccgttgtctgtattcattattagacgagttaccgactatttggatagacacatatgcgatcagatatttgcgaataataagtggtattccattataaccatcgacaataagcagtttcctattccatcaaactgtataggtatgtcctctgccaagtacataaattctagcatcgagcaagatactttaatacatgtttgtaacctcgagcatccattcgacttagtatacaaaaaaatgcagtcgtacaattctgtacctatcaaggaacaaatattgtacggtagaattgataatataaatatgagcattagtatttctgtgtattaatagatttctagtatggggatcattaatcatctctaatctctaaatacctcataaaacgaaaaaaaagctattatcaaatactgtacggaatggattcattctcttctctttttatgaaactctgttgtatatctactgataaaactggaagcaaaaaatctgatagaaagaataagaataagatcaagatcaaggattatatggaacacgattattataaaataacaatagttcctggttcctcttccacgtctactagctcgtggtattatactcatgcctagtaatagtctctttgcgttgacggaaagcagactagaaataacaggctaaaatgttcagacaccataatagttcccaacccagataataacagagtaccatcaacacattcctttaaactcaatcccaaacccaaaaccgttaaaatgtatccggccaattgatagtagataatgaggtgtacagcgcatgataatttacacagtaaccaaaatgaaaatactttagtaattataagaaatatagatggtaacgtcatcatcaacaatccaataatatgccggagagtaaacattgacggataaaacaaaaatgctccgcataactctatcatggcaataacacaaccaaatacttgtaagattcctaaattagtagaaaatacaacggatatcgatgtataagtgatctcgagaaataataagaataaagtaatgcccgtaaagataaacatcaacattgtttggtaatcattaaaccaattagtatgaagttgaactaatttcacagtagattttattccagtgttatcctcgcatgtataagtacctggtaagatatctttatattctataatcaatgagacatcactatccgataacgaatgaagtctagcactagtatgccatttacttaatattgtcgtcttggaagttttattataagttaaaatatcatggttatccaatttccatctaatatactttgtcggattatctatagtacacggaataatgatggtatcattacatgctgtatactctatggtctttgtagttgttataacaaccaacgtatagaggtatatcaacgatattctaactcttgacattttttatttatttaaaatgatacctttgttatttattttattctattttgctaacggtattgaatggcataagtttgaaacgagtgaagaaataatttctacttacttattagacgacgtattatacacgggtgttaatggggcggtatacacattttcaaataataaactaaacaaaactggtttaactaataataattatatcacaacatctataaaagtagaggatgcggataaggatacattagtatgcggaaccaataacggaaatcccaaatgttggaaaatagacggttcagacgacccaaaacatagaggtagaggatacgctccttatcaaaatagcaaagtaacgataatcagttacaacgaatgtgtactatctgacataaacatatcaaaagaaggaattaaacgatggagaagatttgacggaccatgtggttatgatttatacacggcggataacgtaattccaaaagatggtttacgaggagcattcgtcgataaagatggtacttatgacaaagtttacattcttttcactgatactatcggctcaaagagaattgtcaaaattccgtatatagcacaaatgtgcctaaacgacgaaggtggtccatcatcattgtctagtcatagatggtcgacgtttctcaaagtcgaattagaatgtgatatcgacggaagaagttatagacaaattattcattctagaactataaaaacagataatgatacgatactatatgtattcttcgatagtccttattccaagtccgcattatgtacctattctatgaataccattaaacaatctttttctacgtcaaaattggaaggatatacaaagcaattgccgtctccagctcctggtatatgtttaccagctggaaaagttgtttcacataccacgtttgaagtcatagaaaaatataatgtactagatgatattataaagcctttatctaaccaacctatcttcgaaggaccgtctggtgttaaatggttcgatataaaggagaaggaaaatgaacatcgggaatatagaatatacttcataaaagaaaattctatatattcgttcgatacaaaatctaaacaaactcgtagctcgcaagtcgatgcgcgactattttcagtaatggtaacttcgaaaccgttatttatagcagatatagggataggagtaggaatgccacaaatgaaaaaaatacttaaaatgtaatcttaatcgagtacaccacacgacaatgaacaaacctaagacagattatgctggttatgcttgctgcgtaatatgcggtctaattgtcggaattatttttacagcgacactattaaaagttgtagaacgtaaattagttcatacaccatcaatagataaaacgataaaagatgcatatattagagaagattgtcctactgactggataagctataataataaatgtatccatttatctactgatcgaaaaacctgggaggaaggacgtaatacatgcaaagctctaaatccaaattcggatctaattaagatagagactccaaacgagttaagttttttaagaagccttagacgaggctattgggtaggagaatccgaaatattaaaccagacaaccccatataattttatagctaaaaatgccacgaagaatggaaatatatttgtagcacaacgaatactcccaaactgcattcgtgttacactatataacaattacactacatttttatcataccactacttcggttagatgttttagaaaaaaataaatatcgccgtaccgttcttgtttttataaaaataacaattaacaattatcaaattttttctttaatattttacgtggttgaccattcttggtggtaaaataatctcttagtgttggaatggaatgctgtttaatgtttccgcactcatcgtatattttgacgtatgcagtcacatcgtttacgcaatagtcagactgtagttctatcatgcttcctacatcagaaggaggaacagttttaaagtctcttggttttaatctattgccattagttttcatgaaatcctttgttttatccacttcacattttaaataaatgtccactatacattcttctgttaattttactagatcgtcatgggtcatagaatttataggttccgtagtccatggatccaaactagcaaacttcgcgtatacggtatcgcgattagtgtatacaccaacagtatgaaaattaagaaaacagtttaatagatcaacagaaatatttaatcctccgtttgatacagatgcgccatatttatggatttcggattcacacgttgtttgtctgaggggttcgtctagcgttgcttctacgtaaacttcgattcccatatattctttattgtcagaatcgcataccgatttatcatcatacactgtttgaaaactaaatggtatacacatcaaaataataaataataacgagtacattctgcaatattgttatcgtaattggaaaaatagtgttcgagtgagttggattatgtgagtattggattgtatattttattttatattttatattttatattttgtaataagaataaaatgctaatgtcaagtttattccaatagatgtcttattaaaaaacatatataataaataacaatggctgaatggcataaaattatcgaggatatctcaaaaaataataagttcgaggatgccgccatcgttgattacaagactacaaagaatgttctagctgctattcctaacagaacatttgccaagattaatccgggtgaaattattcctctcatcactaatcgtaatattctaaaacctcttattggtcagaaatattgtattgtatatactaactctctaatggatgagaacacgtatgctatggagttgcttactgggtacgcccctgtatctccgatcgttatagcgagaactcataccgcacttatatttttgatgggtaagccaacaacatccagacgtgacgtgtatagaacgtgtagagatcacgctacccgtgtacgtgcaactggtaattaaaataaaaagtaatattcatatgtagtgtcaattttaaatgatgatgatgaaatggataatatccatattgacgatgtcaataatgccggtattggcatacagctcatcgatttttagatttcattcagaggatgtggaattatgttatgggcatttgtattttgataggatctataatgtagtaaatataaaatataatccgcatattccatatagatataattttattaatcgcacgttaaccgtagatgaactagacgataatgtcttttttacacatggttattttttaaaacacaaatatggttcacttaatcctagtttgattgtctcattatcaggaaacttaaaatataatgatatacaatgctcagtaaatgtatcgtgtctcattaaaaatttggcaacgagtacatctactatattaacatctaaacataagacttattctctacatcggtccacgtgtattactataataggatacgattctattatatggtataaagatataaatgacaagtataatgacatctatgattttactgcaatatgtatgctaatagcgtctacattgatagtgaccatatacgtgtttaaaaaaataaaaatgaactcttaattatgctatgctattagaaatggataaaatcaaaattacggttgattcaaaaattggtaatgttgttaccatatcgtataacttggaaaagataactattgatgttacaccaaaaaagaaaaggatgtattattagcgcaatcagttgctgtcgaagaggcaaaagatgtcaaggtagaagaaaaaaatattatcgatattgaagatgacgatgatatggatgtagaaagcgcgtaatactatctataaacataagtatataataaatactttttatttacggtactcttgtagtggtgataccctactcgattatttttttaaaaaaaaaatacttattctgattcttctaaccatttccgtgttcgtttgaatgccacatcgacgtcaaagataggggagtagttgaaatctagttctgcattgttggtacgcacctcaaatgtagtgttggatatcttcaacgtatagttgttgagtagtgatggttttctaaatagaattctcttcatatcattcttgcacgcgtacatttttagcatccatcttggaatcctagatccttgttctattcccaatggtttcatcaatagaagattaaacatatcgtacgaacacgatggagagtaatcgtagcaaaagtaagcatttcctttaatcttagatcccggatactggatatattttgcagccaacacgtgcatccatgcagcatttcctacatatacccggctatgtaccgcgttatcatcgactgtacgatacataatgttaccgtgttgcttacattgctcgtaaaagactttcgtcaatttgtctccttctccgtaaattccagtgggtcttaggcaacaagtatacaattttgctccattcatgattacggaattattggctttcataaccagttgctcggccatacgtttactttttgcgtatacatgtcctggtgatatatcataaagggtatgctcatggccgatgaatggatcaccgtgtttattgggtcctattgcttccatgctactagtatagatcaaatacttgattcctaggtccacacaagctgccaatatagtctgtgttccataatagtttactttcatgatttcattatcggtgtattttccaaatacatccactagagcagccgtatgaataatcagatttaccccatctagcgcttctctcaccttatcaaagtcgtttatatcacattgtatatagtttataaccttaactttcgaggttattggttgtggatcttctacaatatctatgactctgatttcttgaacatcatctgcactaattaacagttttactatatacctgcctagaaatccggcaccaccagtaaccgcgtacacggccattgctgccactcataatatcagactacttattctattttactaaataatggctgtttgtataatagaccacgataatatcagaggagttatttactttgaaccagtccatggaaaagataaagttttaggatcagttattggattaaaatccggaacgtatagtttgataattcatcgttacggagatattagtcaaggatgtgattccataggcagtccagaaatatttatcggtaacatctttgtaaacagatatggtgtagcatatgtttatttagatacagatgtaaatatatttacaattattggaaaggcgttatctatttcaaaaaatgatcagagattagcgtgtgaagttattggtatttcttacataaatgaaaagataatacattttcttacaattaacgagaatggcgtttgatatatcagttaatgcgtctaaaacaataaatgcattagtttacttttctactcagcaaaataaattagtcatacgtaatgaagttaatgatacacactacactgtcgaatttgatagggacaaagtagttgacacgtttatttcatataatagacataatgacaccatagagataagaggggtgcttccagaggaaactaatattggttgcgcggttaatacgccggttagtatgacttacttgtataataagtatagttttaaactgattttagcagaatatataagacacagaaatactatatccggcaatatttattcggcattgatgacactagatgatttggctattaaacagtatggagacattgatctattatttaatgagaaacttaaagtagactccgattcgggactatttgactttgtcaactttgtaaaggatatgatatgttgtgattctagaatagtagtagctctatctagtctagtatctaaacattgggaattgacaaataaaaagtataggtgtatggcattagcgaacatatatctgatagtattccaatatctgagctatctagactacgatacaatctatgtaagtatctacgcgggcacactgagagcatagaggatgaatttgattattttgaagacgatgattcgtctacatgttctgccgtaaccgacagggaaacggatgtataattttttttatagcgtgaaggatatgataaaaaatataattgttgtatttatcccattccaatcaccttatatgattctgtaaaaaaattatactgtaacacaataaaggagtcttatagatgtatagaggtcagatactggtttgataaactgtttattccacataagtatgtttgactttatggttagacccgcatactttaacaaatcactgaaaattggagttaggtattgacctctcagaatcagttgccgttctggaacattaaatgtattttttatgatatactccaacgcatttatgtgggcatacaacaagtcattactaatggagtattccaagagttttagttgtctagtatttaacaagagaagagatttcaacagactgtttatgaactcgaatgccgcctcattgtcgcttatattgatgatgtcgaattctcccaatatcatcaccgatgagtagctcatcttgttatcgggatccaagttttctaaagatgtcattaaaccctcgatcatgaatggatttatcatcatcgtttttatgttggacatgagcttagtccgtttgtccacatctatagacgacgatttctgaattatttcatatatccctctctttaactccaggaacttgtcaggatggtctactttaatatgttctcgtctaagagatgaaaatctttggatggttgcacgcgacttttctctaaaggatgacgttgcccaagatcctctcttaaatgaatccatcttatccttggacaagatggacagtctattttccttagatggtttaatatttttgttacccatgatctataaaggtagacctaatcgtctcggatgaccatatatttattttcagttttattatacgcataaattgtaaaaaatatgttaggtttacgaaaatgtctcgtggggcattaatcgtttttgaaggattggacaaatctggaaaaacaacacaatgtatgaacatcatggaatctataccggcaaacacgataaaatatcttaactttcctcagagatccactgtcactggaaagatgatagatgactatctaactcgtaaaaaaacctataatgatcatatagttaatctattattttgtgcaaatagatgggagtttgcatcttttatacaagaacaactagaacagggaattactttaatagttgatagatacgcattttctggagtagcgtatgccgccgctaaaggcgcgtcaatgactctcagtaagagttatgaatctggattgcctaaacccgacttagttatattcttggaatctggtagcaaagaaattaatagaaacgtcggcgaggaaatttatgaagatgttacattccaacaaaaggtattacaagaatataaaaaaatgattgaagaaggagatattcattggcaaattatttcttctgaattcgaggaagatgtaaagaaggagttgattaagaatatagttatagaggctatacacacggttactggaccagtggggcaactgtggatgtaatagtgaaattacattttttataaatagatgttagtacagtgttataaatggatgaagcatattactctggcaacttggaatcagtactcggatacgtgtccgatatgcataccgaactcgcatcaatatctcaattagttattgccaagatagaaactatagataatgatatattaaacaaggacattgtaaattttatcatgtgtagatcaaacttggataatccatttatctctttcctagatactgtatatactattatagatcaagagaactatcagactgagttgattaattcattagacgacaatgaaattatcgattgtatagttaataagtttatgagcttttataaggataacctagaaaatatagtagatgctatcatcactctaaaatatataatgaataatccagattttaaaactacgtatgccgaagtactcggttccagaatagccgatatagatattaaacaagtgatacgtaagaatatactacaattgtctaatgatatccgcgaacgatatttgtgaaaaatattaaaaaaaaatactttttttattaaatgacgtcgcttcgcgaatttagaaaattatgctgtgatatatatcacgcatcaggatataaagaaaaatctaaattaattagagactttataacagatagggatgataaatatttgatcattaagctattgcttcccggattagacgatagaatttataacatgaacgataaacaaattataaaattatatagtataatatttaaacaatctcaggaagatatgctacaagatttaggatacggatatataggagacactattaggactttcttcaaagaaaacacagaaatccgtccaagagataaaagcattttaactttagaagacgtggatagtttcttaactacgttatcatccgtaactaaagaatcgcatcaaataaaattattgactgatatcgcatccgtttgtacatgtaatgatttaaaatgtgtagtcatgcttattgataaagatctaaaaattaaagcgggtcctcggtacgtacttaacgctattagtcctaatgcctatgatgtgtttagaaaatctaataacttgaaagagataatagaaaattcatctaaacaaaatctagactctatatctatttctgttatgactccaattaatcccatgttagcggaatcgtgtgattctgtcaataaggcgtttaaaaaatttccatcaggaatgtttgcggaagtcaaatacgatggtgaaagagtacaagttcataaaaataataacgagtttgccttctttagtagaaacatgaaaccagtactctctcataaagtggattatctcaaagaatacataccgaaagcatttaaaaaagctacgtctatcgtattggattctgaaattgttcttgtagacgaacataatgtaccgctcccgtttggaagtttaggtatacacaaaaagaaagaatataaaaactctaacatgtgtttgttcgtgtttgactgtttgtactttgatggattcgatatgacggacattccattgtacgaacgaagatcttttctcaaagatgttatggttgaaatacccaatagaatagtattctcagagttgacgaatattagtaacgagtctcagttaactgacgtattggatgatgcactaacgagaaaattagaaggattggtcttaaaagatattaatggagtatacgaaccgggaaagagaagatggttaaaaataaagcgagactatttgaacgagggttccatggcagattctgccgatttagtagtactaggtgcctactatggtaaaggagcaaagggtggtatcatggcagtctttctaatgggttgttacgacgatgaatccggtaaatggaagacggtaactaaatgttccggtcacgatgataatacgttaagggttttgcaagaccaattaacgatgattaaaattaacaaggatcccaaaaaaattccagagtggttagtagttaataaaatctatattcccgattttgtagtagaggatccgaaacaatctcagatatgggaaatttcaggagcagagtttacatcttccaagtcccataccgcaaatggaatatccattagatttcctagatttactaggataagagaggataaaacgtggaaagaatctactcatctaaacgatttagtaaacttgactaaatcttaatagttacatacaaactgaaaattaaaataacaccatttagttggtggtcgccatggatggtgttattgtatactgtctaaacgcgttagtaaaacatggcgaggaaataaatcatataaaaaatgatttcatgattaaaccatgttgtgaaagagtttgtgaaaaagttaagaacgttcacattggcggacaatctaaaaacaatacagtgattgcagatttgccatatatggataatgctgtatcggatgtatgcaattcactgtataaaaagaatgtatcaagaatatccagatttgctaatttgataaagatagatgacgatgacaagactcctactggtgtatataattattttaaacctaaagatgttattcctgttatcatatctataggaaaggataaagatgtctgtgaactattaatctcatcagacatatcgtgtgcatgcgtggagttaaattcatataaagtagccattcttcccatggatgtttccttttttaccaaaggaaatgcatcattgattattctcctgtttgatttctctatcgatgcagcacctctcttaagaagtgtaaccgataataatgttattatatctagacaccagcgtctacatgacgagcttccgagttccaattggttcaagttttacataagtataaagtccgactattgttctatattatatatggttgttgatggatctgtgatgcatgcgatagctgataatagaactcacgcaattattagcaaaaatatattagacaatactacgattaacgatgagtgtagatgctgttattttgaaccacagattaggattcttgatagagatgagatgctcaatggatcatcgtgtgatatgaacagacattgtattatgatgaatttacctgatgtaggcgaatttggatctagtatgttggggaaatatgaacctgacatgattaagattgctctttcggtggctggtaatttaataagaaatcgagactacattcccgggagacgaggatatagctactacgtttacggtatagcctctagataatttttttaagcacgaaataaaaaacataattttaaaccaatctatttcatactattttgtgtgatcaccatggacataaagatagatattagtatttctggtgataaatttacggtgactactaggagggaaaatgaagaaagaaaaaaatatctacctctccaaaaagaaaaaactactgatgttatcaaacctgattatcttgagtacgatgacttgttagatagagatgagatgtctactattctagaggaatattttatgtacagaggtctattaggcctcagaataaaatatggacgactctttaacgaaattaaaaaattcgacaatgatgcggaagaacaattcggtactatagaagaactcaagcagaaacttagattaaattctgaagagggagcagataactttatagattatataaaggtacaaaaacaggatatcgtcaaacttactgtatacgattgcatatctatgataggattgtgtgcatgcgtggtagatgtttggagaaatgagaaactgttttctagatggaaatattgtttacgagctattaaactgtttattaatgatcacatgcttgataagataaaatctatactgcagaatagactagtatatgtggaaatgtcatagaaagttaaaagttaatgagagcaaaaatatataaggttgtattccatatttgttattttttctgtaatagttaaaaaaatacattcgatggtctatctatcagattattatgtgttataaggtactttttctcataataaactagagtatgagtaagatagtgtttttcaaaacatataaatctaaaattgatggatgagatatacagctattaatttcgaaaatatattttaatctgataactttaaacatggatttttgatggtggtttaacgttttaaaaaaagattttgttattgtagtatatgataatattaaaagatggatataaagaatttgctgactgcatgtactattttttacattactacattggctacggcagatatacctactccgccaccaacgggtcatgtgacaagggagaatatcttgataagaggcataatcaatgttgtaatcggtgtccacctggagaatttgccaaggttagatgtaatggtaacgataacacaaaatgtgaacgctgcccacctcatacatataccacaatcccaattattctaatggatgtcatcaatgtagaaaatgcccaacaggatcatttgataaggtaaagtgtaccggaacacagaacagtaaatgttcgtgtcttcctggttggtattgcgctactgattcttcacagactgaagattgttgaaattgtataccaaaaaggagatgtccatgcggatactttggtggaatagatgaacaaggaaatcctatttgtaaatcgtgttgtgttggtgaatattgcgactacctacgtaattatagacttgatccatttcctccatgcaaactatctaaatgtaattaattatgattttgatgataatgttaccatacattatatcgctacttggttagtgtattattcagtatgaagacctattaataattacttatcttttgacgatcttgttataattataatataaaaatacttatggcatagtaactcataattgctgacgcgataaattcgtaataatctgttttgttcaaaggaatctacaggcataaaaataaaaatataatttataatatactcttacaacgccatcatgaataacagcagtgaattgattgctgttattaatggatttagaaatagtggacgattttgtgatattaatatagttattaatgatgaaaggataaacgctcataaactcatcctatctggagcctccgaatatttttccattctgttttccaataattttatcgattctaatgaatacgaagttaatctaagtcatttagattatcaaagtgttaacgatttgatcgattacatttatgggatacctttgagcctaactaacgataacgtgaaatatattctttcaaccgctgattttttacaaattggatctgccattacggagtgtgaaaattacatacttaaaaatctttgttctaaaaactgtatcgatttctacatatacgctgataaatataataacaagaaaatagaatcagcgtcgtttaacacaatattacaaaatattttgagactcatcaacgatgaaaactttaaatacttaacagaggaatcaatgataaaaattttaagcgatgatatgttaaatataaaaaatgaggatttcgccccactaattctcattaaatggttagagagtactcaacaatcatgcaccgtcgagttacttaaatgcctcagaatatcattgctttccccacaagttataaaatcactttatagtcatcgactggttagttcaatctacgaatgtataacattcttaaacaatatagcattcttggatgaatcatttcctagataccatagcatcgagttgatatctatcggtataagtaattcgcgtgataaaatttccataaactgctacaatcataaaaaaaatacatgggaaatgatatcttcacgtagatataggtgtagtttcgcagtggccgtcctggataatattatttatatgatgggtggatatgatcagtccccgtatagaagttcaaaggttatagcgtacaatacatgtacaaattcttggatatatgatataccagagctaaaatatcctcgttctaattgtgggggactggctgatgacgaatacatttattgtataggcggcatacgcgatcaggattcatcgttgacatctagtattgataaatggaagccatcaaaaccatattggcagaagtatgctaaaatgcgcgaaccaaaatgtgatatgggggttgcgatgttaaacggattaatatatgttataggtggaatcgttaaaggtgacacgtgtaccgacgcactagagagtttatcagaagatggatggatgaagcatcaacgtcttccaataaaaatgtccaatatgtcgacgattgttcatgatggcaagatttatatatctggaggttacaacaatagtagtgtagttaatgtaatatcgaatctagtccttagctataatccgatatatgatgaatggaccaaattatcatcattaaacattcctagaattaatcccgctctatggtcagcgcataataaattatatgtaggaggaggaatatctgatgatgttcgaactaatacatctgaaacatacgataaagaaaaagattgttggacattggataatggtcacgtgttaccacgcaattatataatgtataaatgcgaaccgattaaacataaatatccattggaaaaaacacagtacacgaatgattttctaaagtatttggaaagttttataggtagttgatagaacaaaatacataattttgtaaaaataaatcactttttatactaatatgacacgattaccaatacttttgttactaatatcattagtatacgctacaccttttcctcagacatctaaaaaaataggtgatgatgcaactctatcatgtaatcgaaataatacaaatgactacgttgttatgagtgcttggtataaggagcccaattccattattcttttagctgctaaaagcgacgtcttgtattttgataattataccaaggataaaatatcttacgactctccatacgatgatctagttacaactatcacaattaaatcattgactgctagagatgccggtacttatgtatgtgcattctttatgacatcgcctacaaatgacactgataaagtagattatgaagaatactccacagagttgattgtaaatacagatagtgaatcgactatagacataatactatctggatctacacattcaccagaaactagttctgagaaacctgattatatagataattctaattgctcgtcggtattcgaaatcgcgactccggaaccaattactgataatgtagaagatcatacagacaccgtcacatacactagtgatagcattaatacagtaagtgcaacatctggagaatccacaacagacgagactccggaaccaattactgataaagaagaagatcatacagtcacagacactgtctcatacactacagtaagtacatcatctggaattgtcactactaaatcaaccaccgatgatgcggatctttatgatacgtacaatgataatgatacagtaccatcaactactgtaggtagtagtacaacctctattagtaattataaaaccaaggactttgtagaaatatttggtattaccgcattaattatattgtcggccgtggcaatattctgtattacgtattatatatgtaataaacgttcacgtaaatacaaaacagagaacaaagtctagatttttgacttacataaatgtctgggatagtaaaatctatcatattgagcggaccatctggttcaggaaagacagccatagccaaaagactatgggaatatatttggatttgtggtgtcccataccactagatttcctcgtcctatggaacgagaaggtgtcgattaccattacgttaacagagaggccatctggaagggaatagccgccggaaactttctagaacatactgagtttttaggaaatatttacggaacttctaaaactgctgtgaatacagcggctattaataatcgtatttgtgtgatggatttaaacatcgacggtgttagaagttttaaaaatacttacctaatgccttactcggtgtatataagacctacctctcttaaaatggttgagaccaagcttcgttgtagaaacactgaagctaacgatgagattcatcgtcgcgtgatattggcaaaaacggatatggatgaggccaacgaagcaggtctattcgacactattattattgaagatgatgtgaatttagcatatagtaagttaattcagatactacaggaccgtattagaatgtattttaacactaattaaagacttaagacttaaaacttgataattaataatataactcgtttttatatgtggctatttcaacgtctaatgtattagttaaatattaaaacttaccacgtaaaacttaaaatttaaaatgatatttcattgacagatagatcacacattatgaactttcaaggacttgtgttaactgacaattgcaaaaatcaatgggtcgttggaccattaataggaaaaggtggatttggtagtatttatactactaatgacaataattatgtagtaaaaatagagcccaaagctaacggatcattatttaccgaacaggcattttatactagagtacttaaaccatccgttatcgaagaatggaaaaaatctcacaatataaagcacgtaggtcttatcacgtgcaaggcatttggtctatacaaatccattaatgtggaatatagattcttggtaattaatagattaggtgtagatctagatgcggtgatcagagccaataataatagattaccaaaaaggtcggtgatgttgatcggaatcgaaatcttaaataccatacaatttatgcacgagcaaggatattctcacggagatattaaagcgagtaatatagtcttggatcaaatagataagaataaattatatctagtggattacggattggtttctaaattcatgtctaatggcgaacatgttccatttataagaaatccaaataaaatggataacggtactctagaatttacacctatagattcgcataaaggatacgttgtatctagacgtggagatctagaaacacttggatattgtatgattagatggttgggaggtatcttgccatggactaagatatctgaaacaaagaattgtgcattagtaagtgccacaaaacagaaatatgttaacaatactgcgactttgttaatgaccagtttgcaatatgcacctagagaattgctgcaatatattaccatggtaaactctttgacatattttgaggaacccaattacgacgagtttcggcacatattaatgcagggtgtatattattaagtgtggtgtttggtcgatgtaaaatttttgtcgataaaaattaaaaaataacttaatttattattgatctcgtgtgtacaaccgaaatcatggcgatgttttacgcacacgctctcggtgggtacgacgagaatcttcatgcctttcctggaatatcatcgactgttgccaatgatgtcaggaaatattctgttgtgtcagtttataataacaagtatgacattgtaaaagacaaatatatgtggtgttacagtcaggtgaacaagagatatattggagcactgctgcctatgtttgagtgcaatgaatatctacaaattggagatccgatccatgatcaagaaggaaatcaaatctctatcatcacatatcgccacaaaaactactatgctctaagcggaatcgggtacgagagtctagacttgtgtttggaaggagtagggattcatcatcacgtacttgaaacaggaaacgctgtatatggaaaagttcaacatgattattctactatcaaagagaaggccaaagaaatgagtacacttagtccaggacctataattgattaccacgtctggataggagattgtatctgtcaagttactgctgtggacgtacatggaaaggaaattatgagaatgagattcaaaaagggtgcggtgcttccgatcccaaatctggtaaaagttaaacttggggagaatgatacagaaaatctttcttctactatatcggcggcaccatcgaggtaaccacctctctggaagacagcgtgaataatgtactcatgaaacgtttggaaactatacgccatatgtggtctgttgtatatgatcattttgatattgtgaatggtaaagaatgctgttatgtgcatacgcattcatctaatcaaaatcctataccgagtactgtaaaaacaaatttgtacatgaagactatgggatcatgcattcaaatggattccatggaagctctagagtatcttagcgaactgaaggaatcaggtggatggagtcccagaccagaaatgcaggaatttgaatatccagatggagtggaagacactgaatcaattgagagattggtagaggagttcttcaatagatcagaacttcaggctggtaaattagtcaaatttggtaattctattaattgttaaacatacatctgtttcagctaagcaactaagaacacgtatacggcagcagcttcctttatactctcatcttttaccaacacaaagggtggatatttgttcattggagttgataataatacacacaaagtatttggattcacggtgggttacgactacctcagactggtagagaatgatatagaaaagcatatcaaaagactttgtgttgtgcatttctgtgagaagaaagaggacatcaagtacgcgtgtcgattcatcaaggtatataaacctggggatgaggctacctcgacatacgtgtgcgctatcaaagtggaaagatgctgttgtgctgtgtttgcagattggccagaatcatggtatatggatactaatggtatcaagaagtattctccagatgaatgggtgtcacatataaaattttaattaatgtaactatagagaacaaataataggttgtaatatcatatagacaataactaacaattaattagtaactgttatctcttttttaactaaccaactaactatatacctattaatacatcgtaattatagttcttaacatctattaatcattgattcgcttctttaattttttataaactaacattgttaattgaaaagggataacatgttacagaatataaattatatatggatttttttaaaaaggaaatacttgactggagtgtatatttatctcttcattatatagcacgcgtgtgttccaattcttccacatcccatataatacaggattataatctcattcgaacatacgagaaagtggataaaacaatagttgattttttatctaggttgccaaatttattccatattttagaatatggggaaaatattctacatatttattctatggatgatgctaatacgaatattataattttttttctagatagagtattaaatattaataagaacgggtcatttatacacaatctcaggttatcatcatccattaatataaaagaatatgtatatcaattagttaataatgatcatccagataataggataagactaatgcttgaaaatggacgtagaacaagacattttttgtcctatatatcagatacagttaatatctatatatgtattttaataaatcatggattttatatagatgccgaagacagttacggttgtacattattacatagatgtatatatcactataagaaatcagaatcagaatcatacaatgaattaattaagatattgttaaataatggatcagatgtagataaaaaagatacgtacggaaacacaccttttatcctattatgtaaacacgatatcaacaacgtggaattgtttgagatatgtttagagaatgctaatatagactctgtagactttaatagatatacacctcttcattatgtctcatgtcgtaataaatatgattttgtaaagttattaatttctaaaggagcaaatgttaatgcgcgtaataaattcggaactactccattttattgtggaattatacacggtatctcgcttataaaactatatttggaatcagacacagagttagaaatagataatgaacatatagttcgtcatttaataatttttgatgctgttgaatctttagattatctattatccagaggagttattgatattaactatcgtactatatacaacgaaacatctatttacgacgctgtcagttataatgcgtataatacgttggtctatctattaaacagaaatggtgattttgagacgattactactagtggatgtacatgtatttcggaagcagtcgcaaacaacaacaaaataataatggaagtactattgtctaaacgaccatctttgaaaattatgatacagtctatgatagcaattactaaaaataaacaacataatgcagatttattgaaaatgtgtataaaatatactgcgtgtatgaccgattatgatactcttatagatgtacagtcgctacagcaatataaatggtatattttaaaatgtttcgatgaaatagatatcatgaagagatgttatataaaaaataaaactgtattccaattagttttttgtatcaaagacattaatactttaatgagatacggtaaacatccttctttcgtgaagtgcactagtctcgacgtatacggaagtcgtgtacgtaatatcatagcatctattagatatcgtcagagattaattagtctattatccaagaagctggatgcgggagataaatggtcgtgttttcctaacgaaataaaatataaaatattggaaaactttaacgataacgaactgtccacatatctaaaaatcttataaacactattaaaatataaaatctaagtaggataaaatcacactacatcattgtttccttttagtgctcgacagtgtatactatttttaacactcataaataaaaatgaaaacgatttccgttgttacgttgttatgcgtactacctgctgttgtttattcaacatgtactgtacccactatgaataacgctaaattaacgtctaccgaaacatcgtttaataataaccagaaagttacgtttacatgtgatcagggatatcattcttcggatccaaatgctgtctgcgaaacagataaatggaaatacgaaaatccatgcaaaaaaatgtgcacagtttctgattacatctctgaactatataataaaccgctatacgaagtgaattccaccatgacactaagttgcaacggcgaaacaaaatattttcgttgcgaagaaaaaaatggaaatacttcttggaatgatactgttacgtgtcctaatgcggaatgtcaacctcttcaattagaacacggatcgtgtcaaccagttaaagaaaaatactcatttggggaatatatgactatcaactgtgatgttggatatgaggttattggtgcttcgtacataagttgtacagctaattcttggaatgttattccatcatgtcaacaaaaatgtgatataccgtctctatctaatggattaatttccggatctacattttctatcggtggcgttatacatcttagttgtaaaagtggttttatactaacgggatctccatcatccacatgtatcgacggtaaatggaatcccgtactcccaatatgtgtacgaactaacgaagaatttgatccagtggatgatggtcccgacgatgagacagatttgagcaaactctcgaaagacgttgtacaatatgaacaagaaatagaatcgttagaagcaacttatcatataatcatagtggcgttaacaattatgggcgtcatatttttaatctccgttatagtattagtttgttcctgtgacaaaaataatgaccaatataagttccataaattgctaccgtaaatataaatccgttaaaataattaataattaataattaataattaataacgaacaagtatcaaaagattaaagacttatagctagaatcaattgagatgtcttcttcagtggatgttgatatctacgatgccgttagagcatttttactcaggcactattataacaagagatttattgtgtatggaagaagtaacgccatattacataatatatacaggctatttacaagatgcgccgttataccgttcgatgatatagtacgtactatgccaaatgaatcacgtgttaaacaatgggtgatggatacacttaatggtataatgatgaatgaacgcgatgtttctgtaagcgttggcaccggaatactattcatggaaatgtttttcgattacaataaaaatagtatcaacaatcaactaatgtatgatataattaatagcgtatctataattctagctaatgagagatatagaagcgcttttaacgacgatggtatatacatccgtagaaatatgattaacaagttgtacggatacgcatctctaactactattggcacgatcgctggaggtgtttgttattatctgttgatgcatctagttagtttgtataaataattatttcaatatactagttaaaattttaagattttaaatgtataaaaaactaataacgtttttatttgtaataggtgcattagcatcctattcgaataatgagtacactccgtttaataaactgagtgtaaaactctatatagatggagtagataatatagaaaattcatatactgatgataataatgaattggtgttaaattttaaagagtacacaatttctattattacagagtcatgcgacgtcggatttgattccatagatatagatgttataaacgactataaaattattgatatgtataccattgactcgtctactattcaacgcagaggtcacacgtgtagaatatctaccaaattatcatgccattatgataagtacccttatattcacaaatatgatggtgatgagcgacaatattctattactgcagagggaaaatgctataaaggaataaaatatgaaataagtatgatcaacgatgatactctattgagaaaacatactcttaaaattggatctacttatatatttgatcgtcatggacatagtaatacatattattcaaaatatgatttttaaaaatttaaaatatattatcacttcagtgacagtagtcaaataacaaacaacaccatgagatatattataattctcgcagttttgttcattaatagtatacacgctaaaataactagttataagtttgaatccgtcaattttgattccaaaattgaatggactggggatggtctatacaatatatcccttaaaaattatggcatcaagacgtggcaaacaatgtatacaaatgtaccagaaggaacatacgacatatccgcatttccaaagaatgatttcgtatctttctgggttaaatttgaacaaggcgattataaagtggaagagtattgtacgggactatgcgtcgaagtaaaaattggaccaccgactgtaacattgactgaatacgacgaccatatcaatttgtacatcgagcatccgtatgctactagaggtagcaaaaagattcctatttacaaacgcggtgacatgtgtgatatctacttgttgtatacggctaacttcacattcggagattctgaagaaccagtaacatatgatatcgatgactacgattgcacgtctacaggttgcagcatagactttgccacaacagaaaaagtgtgcgtgacagcacagggagccacagaagggtttctcgaaaaaattactccatggagttcggaagtatgtctgacacctaaaaagaatgtatatacatgtgcaattagatccaaagaagatgttcccaatttcaaggacaaaatggccagagttatcaagagaaaatttaataaacagtctcaatcttatttaactaaatttctcggtagcacatcaaatgatgttaccacttttcttagcatgcttaacttgactaaatattcataactaatttttattaatgatacaaaaacgaaataaaactgcatattatacactggttaacgcccttataggctctaaccattttcaagatgaggtccctgattatagtccttctgttcccctctatcatctactccatgtctattagacgatgtgagaagactgaagaggaaacatggggattgaaaatagggttgtgtataattgccaaagatttctatcccgaaagaactgattgcagtgttcatctcccaactgcaagtgaaggattgataactgaaggcaatggattcagggatatacgaaacaccgataaattataaaaaaagcaatgtgtccgctgtttccgttaataatactattttcgtaactggcggattattcataaataactctaatagcacgatcgtggttaacaatatggaaaaacttgacatttataaagacaaacaatggtcgattatagaaatgcctatggctagggtatatcacggcatcgactcgacatttggaatgttatattttgccggaggtctatccgttaccgaacaatatggtaatttagagaaaaacaacgagatatcttgttacaatcctagaacgaataagtggtttgatatttcatatactatttataagatatccatatcatcattgtgtaaactaaataacgtcttctatgtatttagtaaggacattggatatgtggaaaagtatgatggtgcatggaagttagtacatgatcgtctccccgctataaaggcattatcaacttctccttattgattgaaaatgaaaatataaatagtttttatgtatagcagtattaccctatagttttattgcttactactaacatggatacagatacagatacagatacagatacagatacagatacagatacagatacagatgttacaaatgtagaagatatcataaatgaaatagatagagagaaagaagaaatactaaaaaatgtagaaattgaaaataataaaaacattaacaagaatcatccaagtggatatattagagaagcactcgttattaatacaagtagtaatagtgattccattgataaagaagttatagaatgtatcagtcacgatgtaggaatatagatcatatctactaatttttataatcaatacaaaacataaaaaacaactcgttattacatagcaggcatggaatccttcaagtattgttttgataacgatggcaagaaatggattatcggaaatactttatattctggtaattcaatactctataaggtcagaaaaaatttcactagttcgttctacaattacgtaatgaagatagatcacaaatcacacaagccattgttgtctgaaatacgattctatatatctgtattggatcctttgactatcgacaactggacacgggaacgtggtataaagtatttggctattccagatctgtatggaattggagaaaccgatgattatatgttcttcgttataaagaatttgggaagagtattcgccccaaaggatactgaatcagtcttcgaagcatgtgtcactatgataaacacgttagagtttatacactctcgaggatttacccatggaaaaatagaaccgaggaatatactgattagaaataaacgtctttcactaattgactattctagaactaacaaactatacaagagtggaaactcacatatagattacaacgaggacatgataacttcaggaaatatcaattatatgtgtgtagacaatcatcttggagcaacagtttcaagacgaggagatttagaaatgttgggatattgcatgatagaatggttcggtggcaaacttccatggaaaaacgaaagtagtataaaagtaataaaacaaaaaaaagaatataaaaaatttatagctactttctttgaggactgttttcctgaaggaaatgaacctctggaattagttagatatatagaattagtatacacgttagattattctcaaactcctaattatgacagactacgtagactgtttatacaagattgaaattatattctttttttatagagtgtggtagtgttacggatatctaatattaatattagactatctctatcgcgctacacgaccaatatcgattactatgaatatcttctatgaaaggagagaatgtattcatttctccagcgtcaatctcgtcagtattgacaatactgtattatggagctaatggatccactgctgaacagctatcaaaatatgtagaaacggaggagaacacggataaggttagcgctcagaatatctcattcaaatccataaataaagtatatgggcgatattctgccgtgtttaaagatttctttttgggaaaaattggcgataagtttcaaactgttgacttcactgattgtcgcactatagatgcaatcaacaagtgtgtagatatctttactgaggggaaaatcaatccactattggatgaaccattgtctcctagcaattagtgccgtatactttaaagcaaaatggttgacgccattcgaaaaggaatttaccagtgattatcccttttacgtatcaccaacggaaatggtagatgtaagtatgatgtctatgtacggcgagctatttaatcacgcatctgtaaaggaatcattcggcaacttttcaatcatagaactgccatatgttggagatactagtatgatggtcattcttccagacaagattgatggattagaatccatagaacaaaatctaacagatacaaattttaagaaatggtgtaactctctggatgctatgtttatagatgttcacattcccaagtttaaggtaacaggctcgtataatctggtggatactctagtaaagtcaggactgacagaggtgttcggttcaactggagattatagcaatatgtgtaatttagatgtgagtgtcgacgctatgatccacaaaacgtatatagatgtcaatgaagagtatacagaagcagctgcagcaacttgtgcactggtgtcagactgtgcatcaacaattacaaatgagttctgtgtagatcatccgttcatctatgtgattaggcatgttgatggaaaaattcttttcgttggtagatattgctctccaacaactaattgttaaccattttttttaaaaaaaatagaaaaaacatgtggtattagtgcaggtcgttgttcttccaattgcaattggtaagatgacagccaactttagtacccacgtcttttcaccacagcactgtggatgtgacagactgaccagtattgatgacgtcaaacaatgtttgactgaatatatttattggtcgtcctatgcataccgcaacaggcaatgcgctggacagttgtattccacactcctctcttttagagatgatgcggaattagtgttcatcgacattcgcgagctggtaaaaaatatgccgtgggatgatgtcaaagattgtacagaaatcatccgttgttatataccggatgagcaaaaaaccatcagagagatttcggccatcatcggactttgtgcatatgctgctacttactggggaggtgaagaccatcccactagtaacagtctgaacgcattgtttgtgatgcttgagatgctcaattacgtggattataacatcatattccggcgtatgaattgatgagttgtacatcttgacattttcttctttcttctcttctccctttcccagaaacaaacttttttacccactataaaataaaatgagtatactacctgttatatttcttcctatatttttttattcttcattcgttcagacttttaacgcgtctgaatgtatcgacaaagggtaatattttgcatcattcatggagttagaaaacgagccagtaatcttaccatgtcctcaaataaatacgctatcatccggatataatatattagatattttatgggaaaaacgaggagcggataatgatagaattataccgatagataatggtagcaatatgctaattctgaacccgacacaatcagactctggtatttatatatgcattaccacgaacgaaacctactgtgacatgatgtcgttaaatttgacaatcgtgtctgtctcagaatcaaatatagattttatctcgtatccacaaatagtaaatgagagatctactggcgaaatggtatgtcccaatattaatgcatttattgctagtaacgtaaacgcagatattatatggagcggacatcgacgccttagaaataagagacttaaacaacggacacctggaattattaccatagaagatgttagaaaaaatgatgctggttattatacatgtgttttagaatatatatacggtggcaaaacatataacgtaaccagaattgtaaaattagaggtacgggataaaataatacatcctactatgcaattaccagaaggtgttgtaacttcaataggtagtaatttgactattgcgtgtagagtatcgttgagacctcccacaacggatgcagacgtcttttggataagtaatggtatgtattacgaagaagatgatggggacggagacggtagaataagtgtagcaaataaaatctatatgaccgataagagacgtgttattacatcccggttaaacattaatcctgtcaaggaagaagatgctacaacgtttacgtgtatggcgtttactattcctagcatcagcaaaacagttactgttagtataacgtgaatgtatgttgttacatttccatgtcaattgagtttataagaatttttatacattatcttccaacaagcaattgacgaacgtattgctatgattaactcccacgatactatgcatattattaatcattaacttgcagactatacctagagctattttgacatactcgtgttcttgtgtaattgcagtatctatattattaaagtacgtaaatctagctatagttttattatttaattttagataatataccgtctccttatttttaaaaattgccacatcctttattaaatcatgaatgggaatttctatgtcatcgttagtatattgtgaacaacaagagcagatatctataggaaagggtggaatgcgatacattgatctatgtagttttaaaacacacgcaaactttgaagaatttatataaatcattccatcgatacatccttctatgttgacatgtatatatccaggaattcttttattaatgtcaggaaatgtataaactaaaacattgcccggaagcggagcttctaccggagttatatccgttcttaacttacaaaatgtaaccaatacctttgcatgacttgttttgttcggcaacgttagtttaaacttgacgaatggattaattacaatagcatgatccgcgcatctattaagtttttttactttaacgcccttgtatgtttttacagagactttatctaaatttctagtacttgtatgtgttataaatataacgggatatagaaccgaatcacctaccttagatacccaattacattttatcagatccagataataaacaaattttgtcgccctaactaattctatattgttatatattttacaattggttatgatatcatgtaataacttggaatctaacgcacatcgtcgtacgtttacacaattgtgatttagtgtagtatatctacacatgtatttttccgcgctatagtattctggactagtgataaaactatcgttatatctgtcttcaatgaactcatcgagatattgctctctgtcatattcatacacctgcataaactttctagacatcttacaatccgtgttattttaggatcatatttacatatttactggtataaagatgttagattagttaatgggaatcgtctataataatgaatattaaacaattatatgaggacttttaccacaaagcatcataaaaatgagtcgtcgtctgatttatgttttaaatatcaaccgcaaatcaactcataaaatacaagagaatgaaatatatacatattttagtcattgcaatatagaccatacttctacagaacttgattttgtagttaaaaactatgatctaaacagacgacaacatgtaactgggtatactgcactacactgctatttgtataataattactttacaaacgatgtactgaagatattattaaatcatgacgtaaatgtaacgatgaaaaccagtagcggacgtatgcctgtttatatattgcttactagatgttgtaatatttcacatgatgtagtgatagatatgatagacaaagataaaaaccacttatcgcatagagactattccaacctactactagagtatataaaatctcgttacatgttattgaaggaagaggatatcgatgagaacatagtatcaactttattagataagggaatcgatcctaactttaaacaagacggatatacagcgttacattattattatttgtgtctcgcacacgtttataaaccaggtgagtgtagaaaaccgataacgataaaaaaggccaagcgaattatttctttgtttatacaacatggagctaatctaaacgcgttagataattgtggtaatacaccattccatttgtatcttagtattgaaatgtgtaataatattcatatgactaaaatgctgttgacttttaatccgaatttcaaaatatgtaataatcatggattaacgcctatactatgttatataacttccgactacatacaacacgatattcttgttatgttaatacatcactatgaaacaaatgttggagaaatgccgatagatgagcgtcgtatgatcgtattcgagtttatcaaaacatattctacacgtcctgcagattcgataacttatttgatgaataggtttaaaaatataaatatttatacccgctatgaaggaaagacattattacacgtagcatgtgaatataataatacacaagtaatagattatcttatacgtatcaacggagatataaatgcgttaaccgacaataacaaacacgctacacaactcattatagataacaaagaaaattccccatataccattaattgtttactgtatatacttagatatattgtagataagaatgtgataagatcgttggtggatcaacttccatctctacctatcttcgatataaaatcatttgagaaattcatatcctactgtatacttttagatgacacattttacgataggcacgttaagaatcgcgattctaaaacgtatcgatacgcattttcaaaatacatgtcgttcgataaatacgatggtataataactaaatgtcacgacgaaacaatgttactcaaactgtccactgttctagacactacactatatgcagttttaagatgtcataattcgagaaagttaagaagatacctcaccgagttaaaaaaatataataacgataagtcctttaaaatatattctaatattatgaatgagagataccttaatgtatattataaagatatgtacgtgtcaaaggtatatgataaactatttcctgttttcacagataaaaattgtctactaacattactaccttcagaaattatatacgaaatattatacatgctgacaattaacgatctttataatatatcgtatccacctaccaaagtatagttgtatttttctcatgcgatgtgtgtaaaaaaactgatattatataaatattttagtgccgtataataaagatgacgatgaaaatgatggtacatatatatttcgtatcattatcattattgttattgctattccacagttacgccatagacatcgaaaatgaaatcacagaattcttcaataaaatgagagatactctaccagctaaagactctaaatggttgaatccagcatgtatgttcggaggcacaatgaatgatatggccactctaggagagccattcagtgcaaagtgtcctcctattgaagacagtcttttatcgcacagatataaagactatgtggttaaatgggagaggctagaaaagaatagacggcgacaggtttctaataaacgtgttaaacatggtgatttatggatagccaactatacatctaaattcagtaaccgtaggtatttgtgcaccgtaactacaaagaatggtgactgtgttcagggtatagttagatctcatattaaaaaacctccttcatgcattccaaaaacatatgaactaggtactcatgataagtatggcatagacttatactgtggaattctttacgcaaaacattataataatataacttggtataaagataataaggaaattaatatcgacgacattaagtattcacaaacgggaaaggaattaattattcataatccagagttagaagatagcggaagatacgactgttacgttcattacgacgacgttagaatcaagaatgatatcgtagtatcaagatgtaaaatacttacggttataccgtcacaagaccacaggtttaaactaatactagatccgaaaatcaacgtaacgataggagaacctgccaatataacatgcactgctgtgtcaacgtcattattgattgacgatgtactgattgaatgggaaaatccatccggatggcttataggattcgattttgatgtatactctgttttaactagtagaggcggtatcaccgaggcgaccttgtactttgaaaatgttactgaagaatatataggtaatacatataaatgtcgtggacacaactattattttgaaaaaacccttacaactacagtagtattggagtaaatatacaatgcatttttatatacattactgaattattattactgaattattattactgaattattattaattatatcgtatttgtgctatagaatggatgaagatacgcgactatctaggtatttgtatctcaccgatagagaacatataaatgtagactctattaaacagttgtgtaaaatatcagatcctaatgcatgttatagatgtggatgtacggctttacatgagtacttttataattatagatcagtcaacggaaaatacaagtatagatacaacggttactatcaatattattcatctagcgattatgaaaattataatgaatattattatgatgattatgatagaactggtatgaacagcgagagcgatagtgagagtgataatatatcaatcaaaacagaatatgagaatgaatatgaattctatgatgaaacacaagatcaaagtacacaacacaatgacttataaaaatactaaaactggagagactgattacacgtacctctctaatgggggttgcctgcatactatcgtaatggggtcgatggttgattattgattagtatattccttattcacacaaaaagaacatttttataaacatgaaaccactgtctaaatgtaattatgatcttgatttatagatgaagatcagcctttagaggattttaaccagtatgtttaatatgaaaaaaataaacataacatattttgagattaagcgctattgtgcttaattattttgctctataaactgaatatatagccacaattattgacgggcttgtttatgaccggcaatcatgaatttacagaaattatctctggctatatatcttactgcgacatgttcgtggtgttatgaaacatgcataagaaaaactgcgttgtatcatgacattcaattggagcatgtagaagacaataaagatagtgtagcgtcgctaccgtacaagtagtcaatcaaagagaacgtagtagattgttggctacatttaattggacagatatagctgagggtgttagaaatgagttcattaaaatatgtgatatcaacggaacatatttatataattatactattgctgttagtataattattgattccacggaagaactaccaacagttactccaattacaacaacatatgaaccttctacatataattatactatcgatgatagcactgttattactactgaagaactacaagtgactcctcatatggatctccatcgatgatacatgtattaaaatactttccgaataagtcttttaaatattgtattaattatgaaaaactatgctatgcgagtatgatgcaaagatgtttaatgatacgatactagattttatctctagcgagagatgtcgttagaatcatttatcataactacgtttaataataattcatcaacgaatatcgataacatgtgtcatttatacgttaaagtctgtccgtcttctctattgtttagactgtttgtagaatgctgtgatataaacaaactagtagaaggtacgactccgttacactgttatctaatgaatgaaggatttgaatcatctgttttaaaaaacctattaaaggagtatgtcatgaatacgtttaatgttcatgacatccattacacaaatatttaactcatgatgaagttgagaatgatatgctttctgatagtatagatagctttagctaatataaaaatatattaatccactatatattctagacttgatttaaaaccgataaactactactacgtactgtataagttgttaaaaaaaggagcagaccctaattatgtagatgatagaggtaatacttttcttcattacttctgcatctatatgtccacttatgagaaaacgtcattcaataagatgcatcgtgaaaagaaatttattaaagagttggtaaaatatgaaaccgaaagtaaataatataggaaatacacctctacataactacgtatctcaatatgatatcactctcattcctcatccacaacccattaaaaaaatggaaattaaagccctctattagcataaacggctacaggtctacctttacaatggcctttccttgtgcccagttcagaccctgtcattgccacgctactaaggactccctgaataccgtggccgacgtcagacattgtctgactgaatacatcctgtgggtttctcatagatggacccatagagaaagcgcagggtctctctacaggcttctcatctctttcagaactgatgcaacggagctctttggtggtgagttgaaggattcacttccgtgggacaatatcgacaattgcgtggagatcattaaatgtttcatcagaaatgactccatgaaaaccgccgaagaacttcgtgcaatcattggactttgtactcaatcagctatcgtctctggaagagtcttcaacgataagtatatcgacatactacttatgctgcgaaagattctgaacgagaacgactatctcaccctcttggatcatatccgcactgctaaatactaaatctccttcatgctctctcactacactttttatcatcttatgaggaatgattgccttcatcatttttcgtgaaataggaataattagcaccagaatagctatggattattgtggtagagagtgcactattctatgtcgtctactggatgaagatgtgacgtacaaaaaaataaaactagagattgaaacgtgtcacaacttatcaaaacatatagatagacgaggaaacaatgcgctacattgttacgtctccaataaatgcgatacagacattaagattgttcgactgttactctctcgcggagtcgagagactttgtagaaacaacgaaggattaactccgctaggagcatacagtaagcatagatacgtaaaatctcagattgtgcatctactgatatccagctattcgaattcctctaacgaactcaagtcgaatataaatgatttcgatctgtcttcggataatatcgacttacgtctgctaaaatacctaattgtggataaacggatacgtccgtccaagaatacgaattatgcaatcaatggtctcggattggtggatatatacgtaacgacgcctaatccgagaccagaagtattgctatggcttcttaaatcagaatgttacagcaccggttacgtatttcgtacctgtatgtacaacagtgatatgtgtaagaactctcttcattactatatatcgtctcatagagaatctcaatctctatccaaggatgtaattaaatgtttgatcaataacaatgtttccatccatggcagagacgaaggaggatctttacccatccaatactactggtctttctcaaccatagatatagagattgttaaattattattaataaaggatgtggacacgtgtagagtatacgacgtcagccctatattagaggcgtattatctaaacaagcgatttagagtaaccccatataatgtagacatggaaatcgttaatcttcttattgagagacgtcatactcttgtcgacgtaatgcgtagtattacttcgtacgattccagagaatataaccactacatcatcgataacattctaaagagatttagacaacaggatgaatccatcgtacaagccatgttgataaactacttacattacggcgatatggtcgttcgatgcatgttagataacggacaacaactatcctctgcacgactactttgttaataataatctcgtcgatgtaaacgtcgtaaggtttatcgtggaaaatatggacacgcggctgtaaatcacatatctaacaatggccgtctatgtatgtacggtctgatattatcgagatttaataattgcgggtatcactgttatgaaaccatactaatagatgtatttgatatactaagcaagtacatggatgatatagatatgatcgataatgagaataaaactctactatattacgcggtcgatgtcaataatatacaatttgcaaagcggttattggaatatggagcgagtgttacaacatcacgctcgataatcaatacggccatccagaaaagcagttaccaaagagaaaacaaaacgaggatagttgatttattacttagctaccatcccactctagagactatgattgacgcatttaatagagatatacgctatctatatcctgaaccattattcgcctgtatcagatacgccttaatcctagatgatgattttccttctaaagtaagtatgatatcgccggtcatcataaggaactaaagcgctatagagtagacattaatagaatgaagaatgcctacatatcaggcgtctccatgtttgatatattatttaaacgaagcaaacgccacagactgagatacgcaaagaatccgacatcaaatggtacaaaaaagaactaacgtccatcattacagaaactgtaaagaacagtgagaggatcgactccatagtggacaacattaatacagacgataacttgatttcgaaattacccatggagatactttattactccattaaataatttatcatggagtgataatgtcctgtttcatttgtttccatgacatattacaaaatcgattccgtccaagatgataaaaacatttaccggcatcataaacacggagtttattttatatgtctcgcataaacattactaaaaaaatatattgttctgtttttctttttctttttctttttctttcgtacatctctaattatgaaaaagtaaatgatgaaatgtatgagatgggcgagatggacgagattgtgagcatcgttcgcgacagtatgtggtacatacctaacgtatttatggacgacggtaagaatgaaggtcacgtttctgtcaacaatgtttgtcatatgtattttacgttctttgatgtggatacatcgtctcatctgtttaagctagttattaaacactgcgatctgaataaacgaggtaactctccattacattgctatacgatgaatacacgatttaatccatctgtattaaagatattgttacaccacggcatgcgtaactttgatagcaaggatgaaaaaggacaccactatctgattcattcactatcaatcgataacaagatctttgatatactaacggacaccattgatgactttagtaaatcatccgatctattgctgtgttatcttagatataaattcaatgggagcttaaactactacgttctgtacaaaggatccgaccctaattgcgccgacgaggatgaactcacttctcttcattactactgtaaacacatatccacgttctacaaaagcaattattacaagttaagtcacactaagatgcgagccgagaagcgattcatctacgcgataatagattatggagcaaacattaacgcggttacacacttaccttcaacagtataccaaacatagtcctcgtgtggtgtatgctcttttatctcgaggatacgtaataatcttgattgtacacccatcatggaacgattgtgcaacaggtcatattctcataatgttactcaattggcacgaacaaaaggaagaaggacaacatctactttatctattcataaaacataatcaaggatacactctcaatatactacggtatctactagataggttcgacattcagaaagacgaatacatataccgcctttcaaaattgtaacaacaatgttgcctcatacatcggatacgacatcaaccttccgactaaagacggtattcgacttggtgtttgaaaacagaaacatcatatacaaggcggatgttgtgaatgacatcatccaccacagactgaaagtatctctacctatgattaaatcgttgttctacaagatgtcagaattctctccctacgacgattactacgtaaaaaagatactagcctactgcctattaagggacgagtcattcgcggaactacatagtaaattctgtttaaacgaggactataaaagtgtatttatgaaaaatatatcattcgataagatagattccatcatcgtgacataagtcgcctcaaagagattcgaatctccgacaccgacctgtatacggtatcacagctatcttgaagccatacattcggacagacacatttcatttcccatgtacgacgatctcatagaacagtgccatctatcgatggagcgtaaaagtaaactcgtcgacaaagcactcaataaattagagtctaccatcggtcaatctagactatcgtatttgcctccggaaattatgcgcaatatcatctaaacagtatgttgtacggaaagaaccattacaaatattatccatgatagaaagaaaatatctatatgattggagaagtaggaaacaggaacacgacaacgattactacattattaaattatgaagtccgtattatactcgtatatattgtttctctcatgtataataataaacggaagagatatagcaccgcatgcaccatccgatggaaagtgtaaagacaacgaatacaaacgccataatttgtgtccgggaacatacgcttccagattatgcgatagcaagactaacacacaatgtacgccgtgtggttcgggtaccttcacatctcgcaataatcatttacccgcttgtctaagttgtaacggaagacgcgatcgtgtaacactactcacaatagaatctgtgaatgctctcccggatattattgtcttctcaaaggatcatccggatgcaaggcatgtgtttcccaaacaaaatgtggaataggatacggagtatccggagacgtcatctgttctccgtgtggtctcggaacatattctcacaccgtctcttccgcagataaatgcgaacccgtacccagaaatacctttaactatatcgatgtggaaattaatctgtatcccgtcaacgacacgtcgtgtactcggacgaccactaccggtctcagtgaatccatctcaacgtcggaactaactattactatgaatcataaagactgtaatcccgtatttcgtgatggatacttctccgttcttaataaggtagcgacttcaggattctttacaggagaaaggtgtgcactctgaatttcgagattaaatgcaataacaaagattcttcctccaaacagttaacgaaagcaaagaatgatgacggtatcatgccgcattcggagactgtatatctagcgtcgacatctatatactatatagtaataccaatactcaagactacgaaactgatacaatctcttatcatgtgggtaatgttctcgatgtcgatagccatatgcccggtagttgcgatatacataaactgatcactaattccaaacccacccgctttttatagtaagtttttcacccataaataataaatacaataattaatttctcgtaaaagtagaaaatatattctaatttattgcatggtaaggaagtagaatcataaagaacagtactcaatcaatagcaattatgaaacaatatatcgtcctggcatgcatgtgcctgccagtcttcagcaatcatcctcatcctcctcctcgtgtacggaagaagaaaacaaacatcatatgggaatcgatgttattatcaaagtcacaaagcaagaccaaacaccgaccaatgataagatttgccaatccgtaacggaaattacagagtccgagtcagatccagatcccgaggtggaatcagaagatgattccacatcagtcgaggatgtagatcctcctaccacttattactccatcatcggtggaggtctgagaatgaactttggattcaccaaatgtcctcagattaaatccatctcagaatccgctgatggaaacacagtgaatgctagattgtccagcgtgtccccaggacaaggtaaggactctcccgcgatcactcgtgaagaagctctggctatgatcaaagactgtgaggtgtctatcgacatcagatgtagcgaagaagagaaagacagcgacatcaagacccatccagtactcgggtctaacatctctcataagaaagtgagttacgaagatatcatcggttcaacgatcgtcgatacaaaatgtgtcaagaatctagagtttagcgttcgtatcggagacatgtgcaaggaatcatctgaacttgaggtcaaggatggattcaagtatgtcgacggatcggcatctgaaggtgcaaccgatgatacttcactcatcgattcaacaaaactcaaagcgtgtgtctgaatcgataactctattcatctgaaattggatgagtagggttaatcgaacgattcaggcacaccacgaattaaaaaagtgtaccggacactatattccggtttgcaaaacaaaaatgttcttaactacattcacaaaaagttacctctcgttacttcttctttttctgtctcaatagtgtgatacgattatgacactattcctattcctattcctatttcctttcagggtatcacaaaaatattaaacctctttctgatggtctcataaaaaaagttttacaaaaatatttttattctctttctctctttgatggtctcataaaaaaagttttacaaaaatatttttattctctttctctctttgatggtctcataaaaaaagttttacaaaaatatttttattctctttctctctttgatggtctcataaaaaaagttttacaaaaatatttttattctctttctctctttgatggtctcataaaaaaagttttacaaaaatatttttattctctttctctctttgatggtctcataaaaaaagttttacaaaaatatttttattctctttctctctttgatggtctcataaaaaaagttttacaaaaatatttttattctctttctctcttcgatggtctcacaaaaaaagttttacaaaaatatttttattctctttctctctttgatggtctcataaaaaaagttttacaaaaatatttttattctctttctctctttgatggtctcataaaaaatattaaacctctttctgatggtgtcactaaaatatttttattctcattctcattttctctttctctcttcaatggagtcataaaatatttttattctctttctctcttcgatggtctcacaaaaatattaaacctctttctgatggtgtcactaaaatatttttattctcattctcattttctctttctctcttcaatggagtcataaaatatttttattctctttctctcttcgatggtctcacaaaaatattaaacctctttctgatggagtcgtaaaaaagttttatctctttctctcttcgatggtctcactaaaatattttttattctctttctgatgcatcaactatttcttaaacaataacgtccaacaacatatactcgtcgagcttatcaacatcccctatgcccatctaggttaccagacaattgtatatcataaaataatgtttataatttacacgttaaaatcatataataaaacgtagatcgtataatattttttggtatataaatgatctagtaaaatccatgtaggggatactgctcacattttttctttggtacaaaatttcacacaagtttttatacagacaaattcttgtccatatattttaaaacattgacttttgtactaagaaaaatatctagactaactatctctttctctttctctcttcgatggtctcacaaaaatattaaacctctttctgatggagtcgtaaaaaagttttatctctttctctcttcgatggtctcacaaaaatattaaacctctttctgatggagtcgtaaaaaagttttatctctttctctcttcgatggtctcacaaaaatattaaacctctttctgatggagtcgtaaaaaagttttatctttctctcttcgatggtctcacaaaaatattaaacctctttctgatggagtcgtaaaaaagttttatctctttctctcttcgatggtctcacaaaaatattaaacctctttctgatggagtcgtaaaaaagttttatctctttctctcttcgatggtctcacaaaaatattaaacctctttctgatggagtcgtaaaaaagttttatctctttctctcttcgatggtctcacaaaaatattaaacctctttctgatggagtcgtaaaaaagttttatctctttctctcttcgatggtctcacaaaaatattaaacctctttctgatggagtcgtaaaaaagttttatctctttctctcttcgatggtctcacaaaaatattaaacctctttctgatggagtcgtaaaaaagttttatctctttctctcttcgatggtctcacaaaaatattaaacctctttctgatggagtcgtaaaaaagttttatctctttctctcttcgatggtctcacaaaaatattaaacctctttctgatggagtcgtaaaaaagttttatctctttctctcttcgatggtctcacaaaaatattaaacctctttctgatggagtcgtaaaaaagttttatctctttctctcttcgatggtctcacaaaaatattaaacctctttctgatggagtcgtaaaaaagttttatctctttctctcttcgatggtctcacaaaaatattaaacctctttctgatggagtcgtaaaaaagttttatctctttctctcttcgatggtctcacaaaaatattaaacctctttctgatggagtcgtaaaaaagttttatctctttctctcttcgatggtctcacaaaaatattaaacctctttctgatggagtcgtaaaaaagttttatctctttctctcttcgatggtctcacaaaaatattaaacctctttctgatggagtcgtaaaaaagttttatctctttctctcttcgatggtctcacaaaaatattaaacctctttctgatggagtcgtaaaaaagttttatctctttctctcttcgatggtctcacaaaaatattaaacctctttctgatggagtcgtaaaaaagttttatctctttctctcttcgatggtctcacaaaaatattaaacctctttctgatggagtcgtaaaaaagttttatctctttctctcttcgatggtctcacaaaaatattaaacctctttctgatggagtcgtaaaaaagttttatctctttctctcttcgatggtctcacaaaaatattaaacctctttctgatggagtcgtaaaaaagttttatctctttctctcttcgatggtctcacaaaaatattaaacctctttctgatggagtagtcgtaaaaaagttttatctctttctctcttcgatggtctcacaaaaatattaaacctctttctgatggagtcgtaaaaaagttttatctctttctctcttcgatggtctcacaaaaatattaaacctctttctgatggagtcgtaaaaaagttttatctctttctctcttcgatggtctcacaaaaatattaaacctctttctgatggagtcgtaaaaaagttttatctctttctctcttcgatggtctcacaaaaatattaaacctctttctgatggagtcgtaaaaaagttttatctctttctccttcgatggtctcacaaaaatattaaacctctttctgatggagtcgtaaaaaagttttatctctttctccttcgatggtctcacaaaaatattaaacctctttctgatggagtcgtaaaaaagttttatctctttctcctttctcacaaaaatattaaacctctttctgatggagtcgtaaaaaagttttatctctttctcctttctcacaaaaatattaaacctctttctgatggagtctccttcgatggtctcacaaaaatattaaacctctttctgatggagtcgtaaaaaagttttatctctttctccttcgatggtctcacaaaaatattaaacctctttctgatggagtcgtaaaaaagttttatctctttctccttcgatggtctcacaaaaatattaaacctctttctgatggagtcgtaaaaaagttttatctctttctccttcgatggtctcacaaaaatattaaacctctttctgatggagtcgtaaaaaagttttatctctttctcctttctcacaaaaatattaaacctctttctgatggagtcgtaaaaaagttttatctctttctccttcgatggtctcacaaaaatattaaacctctttctgatggagtcgtaaaaaagttttatctctttctccttcgatggtctcacaaaaatattaaacctctttctgatggagtcgtaaaaaagttttatctctttctccttcgatggtctcacaaaaatattaaacctctttctgatggtctctataaagcgattgatttttcttaccctctagagtttcctacggtcgttggtcacacatttttttctagacactaaataaatagtaaaattaaattaattataaaattatgtatatgatttactaactttagttagataagttagtaatacataaattttagtatattaatattatattttaaa

SEQ ID NO: 64 - DNA, 194410 bp, Artificial Sequence
  GLV-1h310 (SEL-Tyrp1-SEL-mTyr)
ttatgagaccatcaaagagagaaagagaataaaaatatttttgtaaaactttttttatgagaccatcaaagagagaaagagaataaaaatatttttgtaaaacttttttatgagaccatcaaagagagaaagagaataaaaatatttttgtaaaacttttttatgagaccatcaaagagagaaagagaataaaaatatttttgtaaaactttttttatgagaccatcaaagagagaaagagaataaaaatatttttgtaaaactttttttatgagaccatcaaagagagaaagagaataaaaatatttttgtaaaactttttttatgagaccatcaaagagagaaagagaataaaaatatttttgtaaaactttttttatgagaccatcaaagagagaaagagaataaaaatatttttgtaaaactttttttatgagaccatcaaagagagaaagagaataaaaatatttttgtaaaactttttttatgagaccatcaaagagagaaagagaataaaaatatttttgtaaaactttttttatgagaccatcaaagagagaaagagaataaaaatatttttgtaaaactttttttatgagaccatcaaagagagaaagagaataaaaatatttttgtaaaactttttttatgagaccatcaaagagagaaagagaataaaaatatttttgtaaaactttttttatgagaccatcaaagagagaaagagaataaaaatatttttgtaaaactttttttatgagaccatcaaagagagaaagagaataaaaatatttttgtaaaactttttttatgagaccatcagaaagaggtttaatatttttgtgatactctgaaaggaaataggaataggaataggaatagtgtcataatcgtatcacactattgagacagaaaaagaagaagtcgcgagaggtaactttttgtgaatgtagttaagaacatttttgttttgcaaaccggaatatagtgtccggtacacttttttaattcgtggtgtgcctgaatcgttcgattaaccctactcatccaatttcagatgaatagagttatcgattcagacacacgctttgagttttgttgaatcgatgagtgaagtatcatcggttgcaccttcagatgccgatccgtcgacatacttgaatccatccttgacctcaagttcagatgattccttgcacatgtctccgatacgaacgctaaactctagattcttgacgcattttgtatcgacgatcgttgaaccgatgatatcttcgtaactcactttcttatgagagatgttagacccgagtactggatgggtcttgatgtcgctgtctttctcttcttcgctacatctgatgtcgatagacacttcacagtctttgatcatagcaagagcttcttcatgagtgatcgcgggagagtccttaccttgtcctggggacacgctggacaatctagcattcactgtgtttccatcagcggattctgagatggatttaatctgaggacatttggtgaatccaaagttcattctcagacctccaccgatgatggagtaataagtggtaggaggatctacatcctcgactgatgtggaatcatcttctgattccacctcgggatctggatctgactcggactctgtaatttccgttacggattggcaaatcttatcattggtcggtgtttggtcttgctttgtgactttgataataacatcgattcccatatgatgtttgttttcttcttccgtacacgaggaggaggatgaggatgattgctgaagactggcaggcatagcagctgccgccaggcacatgcatgccaggacgatatattgtttcataattgctattgattgagtactgttctttatgattctacttccttaccgtgcaataaattagaatatattttctacttttacgagaaattaattattgtatttattatttatgggtgaaaaacttactataaaaagtgggtgggtttggaattagtgatcagtttatgtatatcgcaactaccgggcatatggctatcgacatcgagaacattacccacatgataagagattgtatcagtttcgtagtcttgagtattggtattactatatagtatatagatgtcgcccactagagttactgtctccgaatgcggcatgatagtatcattctttgctttcgttaactgtttggaggaagaatctttgttattgcatttaatctcgaaattcagagtgcacacctttctcctgtaaagaaacctgaagtcgctaccttattaagaacggagaagtatccatcacgaaatacgggattacagtctttatgattcatagtaatagttagttccgacgttgagatggattcgctgagaccggtagtggtcgtccgagtacacgacgtgtcgttaactggatacaggttaatttccacatcgatatagttaaacgtatttctgggtacgggttcgcatttatctgcggaagagacggtgtgagaatatgttccgagaccacacggagaacagatgacgtctccggatactccgtatcctattccacattttgtttgggaaacacatgccttgcatccggatgatcctttgagaagacaataatatccgggagagcattcacagattctattgtgagtcgtgttacacgatcgcgtcttccgttacaacttagacaagcgggtaaatgattattgcgagatgtgaaggtacccgaaccacacggcgtacatcgtgtgttagtcttgctatcgcataatctggaagcgtatgttcccggacacaaattatggcgtttgtattcgttgtctttacactttccatcggatggtgcatgcggtgctatatctcttccgtttattattatacatgagagaaacaatatatacgagtataatacggacttcatgatttaataatgtagtaatcgttgtcttgttcctgtttcctacttctccaatcatatagatattttctttctatcatggataatatttgtaatggttctttccgtacaacatactgtttagatgatattgcgcataatttccggaggcaaatacgatagtctagattgaccgatggtagactctaatttattgagtgctttgtcgacgagtttacttttacgctccatcgatagatggcactgttctatgagatcgtcgtacatgggaaatgaaatgtgactgtctgaatgtatggctttaagatagctgtgataccgtatacaggtcggtgtcggagattcgaatctctttgaggcgacttatgtcacgatgatggaatctatcttatcgaatgatatatttttcataaatacacttttatagtcctcgtttaaacagaatttactatgtagttccgcgaatgactcgtcccttaataggcagtaggctagtatcttttttacgtagtaatcgtcgtagggagagacatcttgtagaacaacgatttcgttttgttttctcttctgtaactgcttttctggatggccgtattgattatcgagcgtgatactcgctccatattccaataaccgctttgcaaattgtatattattgacatcgaccgcgtaatatagtagagttatcgatcatatctatatcatccatgtacttgcttagtatatcaaatacatctatcagtatggtttcataacagtgatacccgcaattattaaatctcgataatatcagaccgtacatacatagacggccattgttcgatacgtgatttacagccgcgtgtccatattttccacgataaaccttacgacgtttacatcgacgagattattattaacaaagtagtcgtgtagaggatagttgttgtccgttatctaacatgcatcgaacgaccatatcgccgtaatgtaagtagtttatcagtatggcttgtacgatggattcatcctgttgtctaaatctctttagaatgttatcgatgatgtagtggttatattctctggaatcgtacgaagtaatactacgcattacgtcgacaagagtatgacgtctctcaataagaagattaacgatttccatgtctacattatatggggttactctaaatcgcttgtttagataatacgcctctaatatagggctgacgtcgtatactctacacgtgtccacatcctttattaataataatttaacaatctctatatctatggttgagaaagaccagtagtattggatgggtaaagatcctccttcgtctctgccatggatggaaacattgttatcgatcaaacatttaattacatccttggatagagattgagattctctatgagacgatatatagtaatgaagagagttcttacacatatcactgtcgtacatacaggtacgaaatacgtaaccggtgctgtaacattctgatttaagaagccatagcaatacttctggtctcggattaggcgtcgttacgtatatatccaccaatccgagaccattgattgcataattcgtattcttggacggacgtatccgtttatccacaattaggtattttagcagacgtaagtcgatattatccgaatacagatcgaaatcatttatattcgacttgagttcgttagaggaatttgaatagctggatatcagtagatgcacaatctgagattttacgtatctatgcttactgtatactcctagcggagttaatccttcgttgtttctacaaagtctctcgactccgcgagagaacaatcttaatgtctgtatcgcatttattggagacgtaacaatgtagcgcattgtttcctcgtctatctatatgttttgataagttgtgacacgtttcaatttctagttttatttttttgtacgtcacatcttcatccagtagacgacatagaatagtgcactctctaccacaataatccatagctattctggtgctaattattcctatttcacgaaggcaatcattcctcataagatgataaaaagtgtagtggagatttagtatttagcagtgcggatatgatccaagagggtgagatagtcgttctcgttcagaatctttcgcagcataagtagtatgtcgatatacttatcgttgaagactctttataaaagtctatttgtttatatttattgcggatagcagtatttccctataaaaagtatacgtcctgtggtgtctttaatcatgtacatgaatggatggtttatgtagaccttcgtacgatataccatcgaaaagttaatcgtaaatactcctgtaacggccgatgcttctgtatactcctcattaacatctataaacgtcgtatgtagaaatttttctacagtgatagtttcattacacatcttgctaaaatctgcataatatccgaatatattagtaagtcctaaattttctaaaatcggtaccagattatacggttctgtcatttccactttaaactttggcatatacaagtctatacttttagtagataacataccacaccattttttaaatttttcatctgttatatttttttctatgttatatataccttctatgtcgtccggtagtataattaccatactagagtttccctcgtatggaatatcgataatagagaatcctccgaataattcattaatatgtacatattgcaagttattctcggtacccaccatcatatcaacgctggtaactatattcttagaaatataaaacttgtctgtatatgtaagatgtttagaaaatggatatttccacattgctttaaaatggacggcgctaacaactgtcatacgagtattaatggatagcggactagtcaataaggaattaattttaccatttgtcattgtcttaacccattcgttgattagttcctttgtttggttagcattattaaagtttacagtttgaaaatcgtcttttattttttgtaggaaggaggcgtggaactcgatactatcgctaccgtatattttatttgcggtagctagtgtcgcacaatacggaatatctacctccatgtcatcattattgtcatcgggtgtattctcattcatattctctatatattttgatagttgttcagctgtagaaccagctgctccatgatttagaatagataaagtagataaaatggaaactggagaaatcaaaacattttcatcagggtgttttaagattagttctttaaagatatccatggtatagacctaacgataacgatatatatcataaataaataatgttaaatttcaatttatgtttgtaccccgtattcatacttaacaaattggtattgcgtacacaatcaatcatattacataccattaataatgcaagcataaaaaattgttagtagatgtttctaaatataggttccgtaagcaaagaatataagaatgaagcggtaatgataaaatcaatcgttatctaaaatgatcatactcatttattttattctattatattaacacatacatttttaacagcaacacattcaatattgtattgttatttttatattatttacacaattaacaatatattattagtttatattactgaattaataatataaaattcccaatcttgtcataaacacacactgagaaacagcataaacacagaatccatcaaaaatgttgataaattatctgatgttgttgttcgctgctatgataatcagatcattcgccgatagtggtaacgctatcgaaacgacattgccagaaattacaaacgctacaacagatattccagctatcagattatgcggtccagagggagatggatattgtttacacggtgactgtatccacgctagagatattgacggtatgtattgtagatgctctcatggttatacaggcattagatgtcagcatgtagtattagtagactatcaacgttcagaaaacccaaacactacaacgtcatatatcccatctcccggtattatgcttgtattagtaggcattattatgtgttgtctattatctgtttataggttcactcgacgaactaaactacctatacaagatatggttgtgccataatttttataaatttttttatgagtatttttacaaaaatgtataaagtgtatgtcttatgtatatttataaaaatgctaagtatgcgatgtatctatgttatttgtatttatctaaacaatacctctacctctagatattatacaaaaattttttatttcggcatattaaagtaaaatctagttaccttgaaaatgaatacagtgggtggttccgtatcaccagtaagaacataatagtcaaatacagtatccgattgagattttgcatacaatactagtctagaaagaaatttgtaatcatcttctgtgacgggagtccatatatctgtatcatcgtctagtttatcagtgtcccatgctatattcctgttatcatcattagttaatgaaaataactctcgtgcttcagaaaagtcaaatattgtatccatacatacatctccaaaactatcgcttatacgtttatctttaacgatacctatacctagatggttatttactaacagacattttccagatctattgactataactcctatagtttccacatcaaccaagtaatgatcatctattgttatataacaataacataactcttttccatttttatcagtatgtatatctatatcaacgtcgtcgttgtagtgaatagtagtcattgatctattatatgaaacggatatgtctagaacggcaattgttttacgtccagttaacactttcgttgatttaaagtctagagtctttgcaaacataatatccttatccgactttatatttcctgtagggtggtataattttattttgcctccacatatcggtgtttccaaatatattactagacaatattccatatagttattagttaagggtacccaattagaacacgtacgcttattatcatcatttggatcgtatttcataaaagttattgtgttatcgatgtcaacacattctacattttttaatcgtctatatagtatttttctgatattttctataatatcagaattgtcttccatcggaagttgtatactatcggaatcagttacatgtttaaataattctctgatgtcattccttatacaatcaaattcattattaaacagtttaatagtctgtagacctttatcgtcgtaaatatccattgtcttattagttacgcttatttttatgtgtttttacgttgctttattatattttataagaatgattgtttgacgaatcacgagaactattaagacacattattaggtatatattataaaaaagtttttgattacgatgttataagaggaaagaggacacattaacatcatacatcaattaactacattcttataacatcgtaatcaaaagaattgcaattttgatgtataacaactgtcaatgggttatggaattgtatattacatattatacggtatgttggtaacgacaaataccggtcggtaattgtctgccggtgtaatagaattatatatatctatctattacaccggccttgtatacataataataagttgtggtagtatgatctccatatttataatttaggactttgtattcagtatttttggaatcataaaaaataaaaaaaagttttactaatttaaaatttaaaaagtatttacatttttttcactgtttagtcgcggatatggaattcgatcctgccaaaatcaatacatcatctatagatcatgtaacaatattacaatacatagatgaaccaaatgatataagactaacagtatgcattatccgaaatattatatcaatatcacaaaaataaatacacatttggctaatcaatttcgggcttggaaaaaacgtatcgccggaagggactatatgactaacttatctagagatacaggaatacaacaatcaaaacttactgaaactatacgtaactgtcaaaaaaatagaaacatatatggtctatatatacactacaatttagttattaattggataaccgatgtgattatcaatcaatattaagagggttggtaaattggtacatagctaataatacctatactccaaatacacccaataatacaacaaccatttctgagttggatatcatcaaaatactaaataaatacgaggacgtgtatagagtaagtaaagaaaaagaatgtggaatttgctatgaagttgtttactcaaaacgatagatactttggtttattggattcgtgtactcatatattttgcataacatgcatcaatatatggcatagaacacgaagagaaaccggtgcgtcggataattgtcctatatgccgtacccgttttagaaacataacaatgagcaagttctataagctagttaactaataaataaaaagtttaatttgttgacgacgtatgtcgttattttttctcgtataaaagattaatttgattctaatataatctttagtattggataaatatcaattcaaattaattccattagattatatcataaataaaaatagtagcacacaactacttcagcaaacattctttttataaatgccatctagcgtagcgaggacacaagtgaacctataattatcaaatttattagtatcagtcacatgaaggactttacgtagagtgacgattccactatctgtggtacgaacggtttcatcttctttgatgccatcacccagatgttctataaacttggtatcctcgtccgatttcatatcctttgccaaccaatacatatagctaaactcaggcatatgttccacacatcctgaacaatgaaattctccagaagatgttacaatgtctagatttggacatttggtttcaaccgcgttaacatatgagtgaacacacccatacatgaaagcgatgagaaataggattctcatcttgccaaaatatcactagaaaaaatttatttatcagttttaaaggtataaaaaatacttattgttgctcgaatattttgtatttgatggtatacggaagattagaaatgtaggtattatcatcaactgattctatggttttatgtattctatcatgtttcactattgcgttggaaataatatcatatgcttccacatatattttattttgttttaactcataatactcacgtaattctggattattggcatatctatgaataattttagctccatgatcagtaaatattaatgagaacatagtattaccacctaccattatttttttcatctcattcaattcttaattgcaaagatctatataatcattatagcgttgacttatggactctggaatcttagacgatgtacagtcatctataatcatggcatatttaatacattgttttatagcatagtcgttatctacgatgttagatatttctctcaatgaatcaatcacacaatctaatgtaggtttatgacataatagcattttcagcagttcaatgtttttagattcgttgatggcaatggctatacatgtatatccgttatttgatctaatgttgacatctgaaccggattctagcagtaaagatactagagattgtttattatatctaacagccttgtgaagaagtgtttctcctcgtttgtcaatcatgttaatgtctttaagataaggtaggcaaatgtttatagtactaagaattgggcaagcataagacatgtcacaaagacccttttttgtatgtataagtgtaaaaattataacatccatagttggatttacataggtgtccaatcgggatctctccatcatcgagataattgatggcatctcccttccttttttagtagatatttcatcgtgtaagaatcaatattaatatttctaaagtatccgtgtatagcctctttatttaccacagctccatattccactagagggatatcgccgaatgtcatatactcaattagtatatgttggaggacatccgagttcattgttttcaatatcaaagagatggtttccttatcatttctccatagtggtacaatactacacattattccgtgcggctttccattttccaaaaacaatttgaccaaatctaaatctacatctttattgtatctataatcactatttagataatcagccataattcctcgagtgcaacatgttagatcgtctatatatgaataagcagtgttatctattcctttcattaacaatttaacgatgtctatatctatatgagatgacttaatataatattgaagagctgtacaatagtttttatctataaaagacggcttgattccgtgattaattagacatttaacaacttccggacgcacatatgctctcgtatccgactctgaatacagatgagagatgatatacagatgcaatacggtaccgcaatttcgtagttgataatcatcatacgcgtatcagtactcgtcctcataaagaacactgcagccattttctatgaacaaatcaataattttagaaacaggatcattgtcattacataattttctataactgaacgatggttttcacatttaacactcaagtcaaatccatgttctaccaacacctttatcaagtcaacgtctacatttttggatttcatatagctgaatatattaaagttatttatgttgctaaatccagtggcttctagtagagccatcgctatatccttattaactttaacatgtctactatttgtgtattcttctaatggggtaagctgtctccaatttttgcgtaatggattagtgccactgtctagtagtagtttgacgacctcgacattattacaatgctcattaaaaaggtatgcgtgtaaagcattattcttgaattggttcctggtatcattaggatctctgtctttcaacatctgtttaagttcatcaagagccacctcctcattttccaaatagtcaaacattttgactgaatgagctactgtgaactctatacacccacacaactaatgtcattaaatatcatgtcaaaaacttgtacaattattaataaaaataatttagtgtttaaattttaccagttccagattttacacctccgttaatacctccattaaccccactggacgatcctcctccccacattccaccgccaccagatgtataagttttagatcctttattactaccatcatgtccatggataaagacactccacatgccgccactaccccctttagaagacatattaataagacttaaggacaagtttaacaataaaattaatcacgagtaccctactaccaacctacactattatatgattatagtttctatttttacagtaccttgactaaagtttctagtcacaagagcaatactaccaacctacactattatatgattatagtttctatttttataggaacgcgtacgagaaaatcaaatgtctaatttctaacggtagtgttgataaacgattgttatccgcggatacctcctctatcatgtcgtctattttcttactttgttctattaacttattagcattatatattatttgattataaaacttatattgcttattagcccaatctgtaaatatcggattattaacatatcgtttctttgtaggtttatttaacatgtacatcactgtaagcatgtccttaccatttattttaatttgacgcatatccgcaatttctttttcgcagtcggttataaattctatatatgatggatacatgctacatgtgtacttataatcgactaatatgaagtacttgatacatattttcagtaacgatttattattaccacctatgaataagtacctgtgatcgtctaggtaatcaactgttttcttaatacattcgatggttggtaatttactcagaataatttccaatatcttaatatataattctgctatttctgggatatatttatctgccagtataacacaaatagtaatacatgtaaacccatattttgttattatattaatgtctgcgccattatctattaaccattctactaggctgacactatgcgactcaatacaatgataaagtatactacatccatgtttatctattttgtttatatcatcaatatacggcttacaaagttttagtatcgataacacatccaactcacgcatagagaaggtagggaataatggcataatatttattaggttatcatcattgtcattatctacaactaagtttccattttttaaaatatactcgacaactttaggatctctattgccaaatttttgaaaatatttatttatatgcttaaatctatataatgtagctccttcatcaatcatacatttaataacattgatgtatactgtatgataagatacatattctaacaatagatcttgtatagaatctgtatatcttttaagaattgtggatattaggatattattacataaactattacacaattctaaaatataaaacgtatcacggtcgaataatagttgatcaactatataattatcgattttgtgatttttcttcctaaactgtttacgtaaatagttagatagaatattcattagttcatgaccactatagttactatcgaataacgcgtcaaatatttcccgtttaatatcgcatttgtcaagataataatagagtgtggtatgttcacgataagtataataacgcatctctttttcgtgtgaaattaaatagtttattacgtccaaagatgtagcataaccatcttgtgacctagtaataatataataatagagaactgttttacccattctatcatcataatcagtggtgtagtcgtaatcgtaatcgtctaattcatcatcccaattataatattcaccagcacgtctaatctgttctattttgatcttgtatccatactgtatgttgctacatgtaggtattcctttatccaataatagtttaaacacatctacattgggatttgatgttgtagcgtatttttctacaatattaataccatttttgatactatttatttctatacctttcgaaattagtaatttcaataagtctatattgatgttatcagaacatagatattcgaatatatcaaaatcattgatatttttatagtcgactgacgacaataacaaaatcacaacatcgtttttgatattattatttttcttggtaacgtatgcctttaatggagtttcaccatcatactcatataatggatttgcaccactttctatcaatgattgtgcactgctggcatcgatgttaaatgttttacaactatcatagagtatcttatcgttaaccatgattggttgttgatgctatcgcattttttggtttctttcatttcagttatgtatggatttagcacgtttgggaagcatgagctcatatgatttcagtactgtagtgtcagtactattagtttcaataagatcaatctctagatctatagaatcaaaacacgataggtcagaagataatgaatatctgtaggcttcttgttgtactgtaacttctggttttgttagatggttgcatcgtgctttaacgtcaatggtacaaattttatcctcgctttgtgtatcatattcgtccctactataaaattgtatattcagattatcatgcgatgtgtatacgctaacggtatcaataaacggagcacaccatttagtcataaccgtaatccaaaaatttttaaagtatatcttaacgaaagaagttgtgtcattgtctacggtgtatggtactagatcctcataagtgtatatatctagagtaatgtttaatttattaaatggttgataatatggatcctcgtgacaatttccgaagatggaaataagacataaacacgcaataaatctaattgcggacatggttactccttaaaaaaatacgaataatcaccttggctatttagtaagtgtcatttaacactatactcatattaatccatggactcataatctctatacgggattaacggatgttctatatacggggatgagtagttctcttctttaactttatactttttactaatcatatttagactgatgtatgggtaatagtgtttgaagagctcgttctcatcatcagaataaatcaatatctctgtttttttgttatacagatgtattacagcctcatatattacgtaatagaacgtgtcatctaccttattaactttcaccgcatagttgtttgcaaatacggttaatcctttgacctcgtcgatttccgaccaatctgggcgtataatgaatctaaactttaattgcttgtaatcattcgaaataatttttagtttgcatccgtagttatcccctttatgtaactgtaaatttctcaacgcgatatctccattaataatgatgtcgaattcgtgctgtatacccatactgaatggatgaacgaataccgacggcgttaatagtaatttactttttcatctttacatattgggtactagttttactatcataagtttataaattccacaagctactatggaataagccaaccatcttagtataccacacatgtcttaaagtttattaattaattacatgttgttttatatatatcgctacgaatttaaagagaaattagtttaggaagaaaaattatctatctacatcatcacgtctctgtattctacgatagagtgctactttaagatgcgacagatccgtgtcatcaaatatatactccattaaaatgattattccggcagcgaacttgatattggatatatcacaacctttgttaatatctacgacaatagacagcagtcccatggttccataaacagtgagtttatctttctttgaagagatattttgtagagatcttataaaactgtcgaatgacatcgcatttatatctttagctaaatcgtatatgttaccatcgtaatatctaaccgcgtctatcttaaacgtttccatcgctttaaagacgtttccgatagatggtctcatttcatcagtcatactgagccaacaaatataatcgtgtataacatctttgatagaatcagactctaaagaaaacgaatcggctttattatacgcattcatgataaacttaatgaaaaatgtttttcgttgtttaagttggatgaatagtatgtcttaataattgttattatttcattaattaatatttagtaacgagtacactctataaaaacgagaatgacataactaatcataactagttatcaaagtgtctaggacgcgtaattttcatatggtatagatcctgtaagcattgtctgtattctggagctattttctctatcgcattagtgagttcagaatatgttataaatttaaatcgaataacgaacataactttagtaaagtcgtctatattaactcttttattttctagccatcgtaataccatgtttaagatagtatattctctagttactacgatctcatcgttgtctagaatatcacatactgaatctacatccaattttagaaattggtctgtgttacatatctcttctatattattgttgatgtattgtcgtagaaaactattacgtagaccattttctttataaaacgaatatatagtactccaattatctttaccgatatatttgcacacataatccattctctcaatcactacatctttaagattttcgttgttaagatatttggctaaactatataattctattagatcatcaacagaatcagtatatatttttctagatccaaagacgaactctttggcgtcctctataatattcccagaaaagatattttcgtgttttagtttatcgagatctgatctgttcatatacgccatgattgtacggtacgttatgataaccgcataaaataaaaatccattttcatttttaaccaatactattcataattgagattgatgtaatactttgttactttgaacgtaaagacagtacacggatccgtatctccaacaagcacgtagtaatcaaatttggtgttgttaaacttcgcaatattcatcaatttagatagaaacttatactcatcatctgttttaggaatccatgtattattaccactttccaacttatcattatcccaggctatgtttcgtccatcatcgttgcgcagagtgaataattcttttgtattcggtagttcaaatatatgatccatgcatagatcggcaaagctattgtagatgtgatttttcctaaatctaatataaaactcgtttactagcaaacactttcctgatttatcgaccaagacacatatggtttctaaatctatcaagtggtggggatccatagttatgacgcagtaacatatattattacattcttgactgtcgctaatatctaaatatttattgttatcgtattggattctgcatatagatggcttgtatgtcaaagatatagaacacataaccaatttatagtcgcgctttacattctcgaatctaaagttaagagatttagaaaacattatatcctcggatgatgttatcactgtttctggagtaggatatattaaagtctttacagatttcgtccgattcaaataaatcactaaataatatcccacattatcatctgttagagtagtatcattaaatctattatattttatgaaagatatatcactgctcacctctatatttcgtacatttttaaactgtttgtataatatctctctgatacaatcagatatatctattgtgtcggtagacgataccgttacatttgaattaatggtgttccattttacaacttttaacaagttgaccaattcatttctaatagtatcaaactctccatgattaaatattttaatagtatccattttatatcactacggacacaaagtagctgacataaaccattgtataatttttatgttttatgtttattagcgtacacattttggaagttccggcttccatgtatttcctggagagcaagtagatgatgaggaaccagatagtttatatccgtacttgcacttaaagtctacattgtcgttgtatgagtatgatcttttaaacccgctagacaagtatccgtttgatattgtaggatgtggacatttaacaatctgacacgtgggtggatcggaccattctcctcctgaacacaggacactagagttaccaatcaacgaatatccactattgcaactataagttacaacgctcccatcggtataaaaatcctcgtatccgttatgtcttccgttggatatagatggaggggattggcatttaacagattcacaaataggtgcctcgggattccataccatagatccagtagatcctaattcacaatacgatttagattcaccgatcaactgatatccgctattacaagagtacgttatactagagccaaagtctactccaccaatatcaagttggccattatcgatatctcgaggcgatgggcatctccgtttaatacattgattaaagagtgtccatccagtacctgtacatttagcatatataggtcccattttttgctttctgtatccaggtagacatagatattctatagtgtctcctatgttgtaattagcattagcatcagtctccacactattcttaaatttcatattaatgggtcgtgacggaatagtacagcatgatagaacgcatcctattcccaacaatgtcaggaacgtcacgctctccaccttcatatttatttatccgtaaaaatgttatcctggacatcgtacaaataataaaaagcccatatatgttcgctattgtagaaattgtttttcacagttgctcaaaaacgatggcagtgacttatgagttacgttacactttggagtctcatctttagtaaacatatcataatattcgatattacgagttgacatatcgaacaaattccaagtatttgattttggataatattcgtattttgcatctgctataattaagatataatcaccgcaagaacacacgaacatctttcctacatggttaaagtacatgtacaattctatccatttgtcttccttaactatatatttgtatagataattacgagtctcgtgagtaattccagtaattacatagatgtcgccgtcgtactctacagcataaactatactatgatgtctaggcatgggagacttttttatccaacgatttttagtgaaacattccacatcgtttaatactacatatttctcatacgtggtataaactccacccattacatatatatcatcgtttacgaataccgacgcgcctgaatatctaggagtaattaagtttggaagtcttatccatttcgaagtgccgtgtttcaaatattctgccacacccgttgaaatagaaaattctaatcctcctattacatataactttccatcgttaacacaagtactaacttctgattttaacgacgacatattagtaaccgttttccattttttcgttttaagatctacccgcgatacggaataaacatgtctattgttaatcatgccgccaataatgtatagacaattatgtaaaacatttgcattatagaattgtctatctgtattaccgactatcgtccaatattctgttctaggagagtaatgggttattgtggatatataatcagagtttttaatgactactatattatgttttataccatttcgtgtcactggctttgtagatttggatatagttaatcccaacaatgatatagcattgcgcatagtattagtcataaacttgggatgtaaaatgttgatgatatctacatcgtttggatttttatgtatccactttaataatatcatagctgtaacatcctcatgatttacgttaacgtcttcgtgggataagatagttgtcagttcatcctttgataattttccaaattctggatcggatgtcaccgcagtaatattgttgattatttctgacatcgacgcattatatagttttttaattccatatcttttagaaaagttaaacatccttatacaatttgtgaaattaatattatgaatcatagtttttacacatagatctactacaggcggaacatcaattattatggcagcaactagtatcatttctacattgtttatggtgatgtttatcttcttccagcgcatatagtctaatagcgattcaaacgcgtgatagtttataccattcaatataatcgcttcatcctttagatggtgatcctgaatgcgtttaaaaaaattatacggagacgccgtaataatttccttattcacttgtataatttccccattgatagaaaatattacgctttccattcttaaagtactataagtaattatagtataatgtaaacgtttatatattcaatatttttataaaaatcattttgacattaattcctttttaaatttccgtctatcatctatagaaacgtattctatgaatttataaaatgcttttacgtgtcctatcgtaggcgatagaaccgctaaaaagcctatcgaatttctacaaaagaatctgttatatggtatagggagagtataaaacattaaatgtccgtacttattaaagtattcagtagccaatcctaactctttcgaatacttattaatggctcttgttctgtacgaatctatttttttgaacaacggacctagtggtatatcttgttctatgtatctaaaataatgtctgactagatccgttagtttaatatccgcagtcatcttgtctagaatggcaaatctaactgcgggtttaggctttagtttagtttctatatctacatctatgtctttatctaacaccaaaaatataatagctaatattttattacaatcatccggatattcttctacgatctcactaactaatgtttctttggttatactagtatagtcactatcggacaaataaagaaaatcagatgatcgatgaataatacatttaaattcatcatctgtaagatttttgagatgtctcattagaatattattagggttagtactcattatcattcggcagctattacttattttattatttttcaccatatagatcaatcattagatcatcaaaatatgtttcaatcatcctaaagagtatggtgaatgactcttcccatctaatttctgaacgttcaccaatgtctctagccactttggcactaatagcgatcattcgcttagcgtcttctatattattaactggttgatttaatctatctagcaatggaccgtcggacagcgtcattctcatgttcttaatcaatgtacatacatcgccgtcatctaccaattcatccaacaacataagctttttaaaatcatcattataataggtttgatcgttgtcatttctccaaagaatatatctaataagtagagtcctcatgcttagttaacaactattttttatgttaaatcaattagtacaccgctatgtttaatacttattcatattttagtttttaggattgagaatcaatacaaaaattaatgcatcattaattttagaaatacttagtttccacgtagtcaatgaaacatttgaactcatcgtacaggacgttctcgtacaggacgtaactataaaccggtttatatttgttcaagatagatacaaatccgataactttttttacgaattctacgggatccactttaaaagtgtcataccgggttctttttatttttttaaacagatcaatggtgtgatgttgattaggtcttttacgaatttgatatagaatagcgtttacatattctccataatggtcaatcgccatttgttcgtatgtcataaattctttaattatatgacactgtgtattatttagttcatccttgttcattgttaggaatctatccaaaatggcaattatactagaactataggtgcgttgtatacacatattgatgtgtctgtttatacaatccatgatatttggatccatgctactaccttcgggtaaaattgtagcatcatataccatttctagtactttaggttcattattatccattgcagaggacgtcatgatcgaatcataaaaaaatatattatttttatgttattttgttaaaaataatcatcgaatacttcgtaagatactccttcatgaacataatcagttacaaaacgtttatatgaagtaaagtatctacgatttttacaaaagtccggatgcataagtacaaagtacgcgataaacggaataataatagatttatctagtctatctttttctatagctttcatagttagatacatggtctcagaagtaggattatgtaacatcagcttcgataaaatgactgggttatttagtcttacacattcgctcatacatgtatgaccgttaactacagagtctacactaaaatgattgaacaatagatagtctaccattgtttcgtattcagatagtacagcgtagtacatggcatcttcacaaattatatcattgtctaatagatatttgacgcatcttatggatcccacttcaacagccatcttaaaatcatattgctttcctttatcattaataatttctagaacatcatctctatcataaaagatacaaatattaactgtttgatccgtaataacattgctagtcaatagcaatttgttaataagatgcgctgggctcaatgtcttaataagaagtgtaagaggactatctccgaatttgttttgtttattaacatccgttgatggaagtaaaagatctataatgtctacattcttgactgttttagagcatacaatatggagaggtgtatttccatcatgatctggttttgagggactaattcctagtttcatcatccatgagattgtagaagcttttggattgtctgacataagatgtctatgaatatgatttttgccaaatttatccactatcctggcttcgaatccgatggacattatttttttaaacactctttctgaaggatctgtacacgccaacaacggaccacatccttcttcatcaaccgagttgttaatcttggctccatactgtaccaataaatttattctctctatgacttcatcatctgttcccgagagataatatagaggtgttttatgctgtttatcacacgcgtttggatctgcgccgtgcgtcagcagcatcgcgactattctattattattaattttagaagctatatgcaatggataatttccatcatcatccgtctcatttggagagtatcctctatgaagaagttcttcgacaaatcgttcatctagtcctttaattccacaatacgcatgtagaatgtgataattatttccagaaggttcgatagcttgtagcatattcctaaatacatctaaatttttactattatatttggcataaagagatagataatactcggccgacataatgttgtccattgtagtataaaaattaatatttctatttctatttctgtatatttgcaacaatttactctctataacaaatatcataacttagtttttttatgtcaagaaggcactggtttagttcatctataaatgtcacgccataactaccacgcatgccatactcagaattatgataaagatatttatccttggggtgtaggtaatggggattaatctttgttggatcagtctctaagttaacacatgtcacacatgatccatttatagttatatcacacgatgatgatttatgaattgattccggaagatcgctatcgtattttgtggttccacaattcatttccatacatgttattgtcacactaatattatgatgaactttatctagccgctgagtggtaaacaacagaacagatagtttattatctttaccaacaccctcagccgctgccacaaatctctgatccgtatccatgatggtcatgtttatttctagtccgtatccagtcaacactatgttagcatttctgtcgatatagctttcactcatatgacactcaccaataatagtagaattaatgtcgtaatttacaccaatagtgagttcggcggcaaagtaccaataccggtaatcttgtcgaggaggacatatagtattcttgtattctaccgaatacccgagagatgcgatacaaaagagcaagactaatttgtaaaccatcttactcaaaatatgtaacaatagtacgatgcaatgagtaagacaataggaaatctatcttatatacacataattattctatcaattttaccaattagttagtgtaatgttaacaaaaatgtgggagaatctaattagtttttctttacacaattgacgtacatgagtctgagttccttgtttttgctaattatttcatccaatttattattcttgacgatatcgagatcttttgtataggagtcaaacttgtattcaacatgcttttctataatcattttagctatttcggcatcatccaatagtacattttccagattagcagaatagatattaatgtcgtatttgaacagagcctgtaacatctcaatgtctttattatctatagccaatttaatgtccggaatgaagagaagggaattattggtgtttgtcgacgtcatatagtcgagcaagagaatcatcatatccacgtgtccattttttatagtgatgtgaatacaactaaggagaatagccagatcaaaagtagatggtatctctgaaagaaagtaggaaacaatacttacatcattaagcatgacggcatgataaaatgaagttttccatccagttttcccatagaacatcagtctccaatttttcttaacaaacagttttaccgtttgcatgttaccactatcaaccgcataatacaatgcggtgtttcccttgtcatcaaattgtgaatcatccagtccactgaatagcaaaatctttactattttggtatcttccaatgtggctgcctgatgtaatggaaattcattctctagaagatttttcaatgctccagcgttcaacaacgtacatactagacgcacgttattatcagctattgcataatacaaggcactatgtccatggacatccgccttaaatgtatctttactagagagaaagcttttcagctgcttagacttccaagtattaattcgtgacagatccatgtctgaaacgagacgctaattagtgtatattttttcattttttataattttgtcatattgcaccagaattaataatatctttaatagatctgattagtagatacatggctatcgcaaaacaacatatacacatttaataaaaataatatttattaagaaaattcagatttcacgtacccatcaatataaataaaataatgattccttacaccgtacccatattaaggagattccaccttacccataaacaatataaatccagtaatatcatgtctgatgatgaacacaaatggtgtattaaattccagtttttcaggagatgatctcgccgtagctaccataatagtagatgcctctgctacagttccttgttcgtcgacatctatctttgcattctgaaacattttataaatatataatgggtccctagtcatatgtttaaacgacgcattatctggattaaacatactaggagccatcatttcggctatcgacttaatatccctcttattttcgatagaaaatttagggagtttaagattgtacactttattccctaattgagacgaccaatagtctaattttgcagccgtgatagaatctgtgaaatgggtcatattatcacctattgccaggtacatactaatattagcatccttatacggaaggcgtaccatgtcatattctttgtcatcgattgtgattgtatttccttgcaatttagtaactacgttcatcatgggaaccgttttcgtaccgtacttattagtaaaactagcattgcgtgttttagtgatatcaaacggatattgccatatacctttaaaatatatagtattaatgattgcccatagagtattattgtcgagcatattagaatctactacattagacataccggatctacgttctactatagaattaattttattaaccgcatctcgtctaaagtttaatctatataggccgaatctatgatattgttgataatacgacggtttaatgcacacagtattatctacgaaactttgataagttagatcagtgtacgtatatttagatgttttcagcttagctaatcctgatattaattctgtaaatgctggacccagatctctttttctcaaatccatagtcttcaataattctattctagtattacctgatgcaggcaatagcgacataaacatagaaaacgaataaccaaacggtgagaagacaatattatcatcttgaatatttttatacgctactataccggcattggtaaatccttgtagacgataggcggacgctgaacacgctaacgatagtatcaataacgcaatcatgattttatggtattaataattaaccttatttttatgttcggtataaaaaaattattgatgtctacacatccttttgtaattgacatctatatatccttttgtataatcaactctaatcactttaacttttacagttttccctaccagtttatccctatattcaacatatctatccatatgcatcttaacactctctgccaagatagcttcagagtgaggatagtcaaaaagataaatatatagagcataatcattctcgtatactctgccctttattacatcacccgcattgggcaacgaataacaaaatgcaagcatcttgttaacgggctcgtaaattgggataaaaattatgtttttattgtcttatatctattttattcaagagaatattcaggaatttctttttccggttgtatctcgtcgcagtatatatcatttgtacattgtttcatattttttaatagtttacaccttttagtaggactagtatcgtacaattcatagctgtattttgaattccaatcacgcataaaaatatcttccaattgttgacgaagacctaatccatcatccggtgtaatattaatagatgctccacatgtatccgtaaagtaatttcctgtccaatttgaggtacctatataggccgttttatcggttaccatatatttggcatggtttaccctagaatacggaatgggaggatcagcatctggtacaataaatagctttacttctatatttatgtttttagattttagcatagcgatagatcttaaaaagtttctcatgataaacgaagatcgttgccagcaactaatcaatagcttaacggatacttgtctgtctatagcggatcttcttaattcatcttctatataaggccaaaacaaaattttacccgccttcgaataaataatagggataaagttcataacagatacataaacgaatttactcgcatttctaatacatgacaataaagcggttaaatcattggttctttccatagtacatagttgttgcggtgcagaagcaataaatacagagtgtggaacgccgcttacgttaatactaagaggatgatctgtattataatacgacggataaaagtttttccaattatatggtagattgttaactccaagataccagtatacctcaaaaatttgagtgagatccgctgccaagttcctattattgaagatcgcaatacccaattccttgacctgagttagtgatctccaatccatgttagcgcttcctaaataaatatgtgtattatcagatatccaaaattttgtatgaagaactcctcctaggatatttgtaatatctatgtatcgtacttcaactccggccatttgtagtctttcaacatcctttaatggtttgttagatttattaacggctactctaactcgtactcctcttttgggtaattgtacaatctcgtttaatattatcgtgccgaaattcgtacccacttcatccgataaactccaataaaaagatgatatatctagtgtttttgtggtattggatagaatttccctccacatgttaaatgtagacaaatatactttatcaaattgcatacctataggaatagtttctgtaatcactgcgattgtattatccggattcattttatttgttaaaagaataatcctatatcacttcactctattaaaaatccaagtttctatttctttcatgactgattttttaacttcatccgtttccttatgaagatgatgtttggcaccttcataaatttttatttctctattacaatttgcatgttgcatgaaataatatgcacctaaaacatcgctaatcttattgtttgttccctggagtatgagagtcggggggtgttaatcttggaaattatttttctaaccttgttggtagccttcaagacctgactagcaaatccagccttaattttttcatgattgactaatgggtcgtattggtatttataaactttatccatatctctagatactgattctggacatagctttccgactggcgcatttggtgtgatggttcccataagtttggcagctagcagattcagtcttgaaacagcatctgcattaactagaggagacattagaatcattgctgtaaacaagtttggattatcgtaagaggctagctcccatggaatgacccaataagtagatttaatagttaccacgtgctgtaccaaagtcatcaatcatcattttttcaccattacttcttccatgtccaatatgatcatgtgagaatactaaaattcctaacgatgatatgttttcagctagttcgtcataacgtccagaatgtttaccagctccatgacttatgaatactaatgccttaggatatgtaataggtttccaatatttacaatatatgtaatcattgtccagattgaacatacagtttgcactcatgattcacgttatataactatcaatattaacagttcgtttgatgatcatattatttttatgttttattgataattgtaaaaacatacaattaaatcaatatagaggaaggagacggctactgtcttttgtaagatagtcatggcgactaaattagattatgaggatgctgttttttactttgtggatgatgataaaatatgtagtcgcgactccatcatcgatctaatagatgaatatattacgtggagaaatcatgttatagtgtttaacaaagatattaccagttgtggaagactgtacaaggaattgatgaagttcgatgatgtcgctatacggtactatggtattgataaaattaatgagattgtcgaagctatgagcgaaggagaccactacatcaattttacaaaagtccatgatcaggaaagtttattcgctaccataggaatatgtgctaaaatcactgaacattggggatacaaaaagatttcagaatctagattccaatcattgggaaacattacagatttgatgaccgacgataatataaacatcttgatactttttctagaaaaaaaattgaattgatgatataggggtcttcataacgcataattattacgttagcattctatatccgtgttaaaaaaaattatcctatcatgtatttgagagttttatatgtagcaaacatgatagctgtgatgccaataagctttagatattcacgcgtgctagtgttagggatggtattatctggtggtgaaatgtccgttatataatctacaaaacaatcatcgcatatagtatgcgatagtagagtaaacatttttatagtttttactggattcatacatcgtctacccaattcggttataaatgaaattgtcgccaatcttacacccaaccccttgttatccattagcatagtattaacttcgttatttatgtcataaactgtaaatgattttgtagatgccatatcatacatgatattcatgtccctattataatcattactaactttatcacaatatatgttgataatatctatatatgatctagtctttgtgggcaactgtctatacaagtcgtctaaacgttgtttactcatatagtatcgaacagccatcattacatggtcccgttccgttgatagataatcgagtatgttagtggacttgtcaaatctatataccatattttctggaagtggatatacatagtcgtgatcaacattattgctagcctcatcttctatatcctgtactataccattatctatatcatctacataatctatgatattattacacataaacatcgacaacatactattgtttattatctaagtcctgttgatccaaacccttgatctcctctatttgtactatctagagattgtacttcttccagttctggataatatatacgttgatagattagctgagctattctatctccagtatttacattaaacgtacattttccattattaataagaatgactcctatgtttcccctataatcttcgtctattacaccacctcctatatcaatgccttttagtgacagaccagacctaggagctattctaccatagcagaacttaggcatggacatactaatatctgtcttaattaactgtctttctcctggagggatagtataatcgtaagcgctatacaaatcatatccggcagcacccggcgattgcctagtaggagatttagctctgttagtttccttaacaaatctaactggtgagttaatattcatgttgaacataaaactaatattttatttcaaaattatttaccatcccatatattccatgaataagtgtgatgattgtacacttctatagtatctatatacgatccacgataaaatcctcctatcaatagcagtttattatccactatgatcaattctggattatccctcggataaataggatcatctatcagagtccatgtattgctggattcacaataaaattccgcatttctaccaaccaagaataaccttctaccgaacactaacgcgcatgatttataatgaggataataagtggatggtccaaactgccactgatcatgattgggtagcaaatattctgtagttgtatcagtttcagaatgtcctcccattacgtatataacattgtttatggatgccactgctggattacatctaggtttcagaagactcggcatattaacccaagcagcatccccgtggaaccaacgctcaacagatgtgggatttggtagacctcctactacgtataatttattgttagcgggtatcccgctagcatacagtctggggctattcatcggaggaattggaatccaattgtttgatatataatttacagctatagcattgttatgtatttcattgttcatccatccaccgatgagatatactacttctccaacatgagtacttgtacacatatggaatatatctataatttgatccatgttcataggatactctatgaatggatacttgtatgatttgcgtggttgtttatcacaatgaaatattttggtacagtctagtatccattttacattatttatacctctgggagaaagataatttgacctgattacatttttgataaggagtagcagatttcctaatttatttcttcgcctcatataccacttaatgacaaaatcaactacataatcctcatctggaacatttagttcatcgctttctagaataagtttcatagatagataatcaaaattgtctatgatgtcatcttccagttccaaaaagtgtttggcaataaagtttttagtatgacataagagattggatagtccgtattctatacccatcatgtaacactcgacacaatattcctttctaaaatctcgtaagataaagtttatacaagtgtagatgataaattctacagaggttaatatagaagcacgtaataaattgacgacgttatgactatctatatatacctttccagtatatgagtaaataactatagaagttaaactgtgaatgtcaaggtctagacaaacccttgtaactggatctttatttttcgtgtatttttgacgtaaatgtgtgcgaaagtaaggagataactttttcaatatcgtagaattgactattatattgcctcctatggcatcaataattgttttgaatttcttagtcatagacaatgctaatatattcttacagtacacagtattgacaaatatcggcatttatgtttctttaaaagtcaacatctagagaaaaatgattatctttttgagacataactcccattttttggtattcacccacacgtttttcgaaaaaattagtttttccttccaatgatatattttccatgaaatcaaacggattggtaacattataaatttttttaaatcccaattcagaaatcaatctatccgcgacgaattctatatatgttttcatcatttcacaattcattcctataagtttaactggaagagccgcagtaagaaattcttgttcaatggatactgcatctgttataatagatctaacggtttcttcactcggtggatgcaataaatgtttaaacatcaaacatgcgaaatcgcagtgcagaccctcgtctctactaattagttcgttggaaaacgtgagtccgggcattaggccacgctttttaagccaaaatatggaagcgaatgatccagaaaagaaaattccttctactgcagcaaaggcaataagtctctctccataaccggcgctgtcatgtatccacttttgagcccaatcggccttcttttttacacaaggcatcgtttctatggcattaaagagatagtttttttcattactatctttaacataagtatcgatcaaaagactatacatttccgaatgaatgttttcaatggccatctgaaatccgtagaaacatctagcctcggtaatctgtacttctgtacaaaatcgttccgccaaattttcattcactattccgtcactggctgcaaaaaacgccaatacatgttttataaaatatttttcgtctggtgttagtttattccaatcattgatatctttagatatatctacttcttccactgtccaaaatgatgcctctgcctttttatacatgttccagatgtcatgatattggattgggaaaataacaaatctatttggatttggtgcaaggatgggttccataactaaattaacaataacaataaattttttttcagttatctatatgcctgtacttggattttttgtacatcgatatcgccgcaatcactacaataattacaagtattattgatagcattgttattagtactatcataattaaattatctacattcatgggtgctgaataatcgttattatcatcattatcattttgtaattgtgacatcatactagataaatcgtttgcgagattgttgtgggaagcgggcatggaggatgcattatcattattatttaacgccttccatttggattcacaaatgttacgcacattcaacattttatggaaactataattttgtgaaaacaaataacaagaaaactcgtcatcgttcaaatttttaacgatagtaaaccgattaaacgtcgagctaatttctaacgctagcgactctgttggatatgggtttccagatatatatcttttcagttcccctacgtatctataatcatctgtaggaaatggaagatatttccatttatctactgttcctaatatcatatgtggtggtgtagtagaaccattaagcgcgaaagatgttatttcgcatcgtattttaacttcgcaataatttctggttagataacgcactctaccagtcaagtcaatgatattagcctttacagatatattcatagtagtcgtaacgatgactccatcttttagatgcgatactcctttgtatgtaccagaatcttcgtacctcaaactcgatatatttaaacaagttaatgagatattaacgcgttttatgaatgatgatatataaccagaagttttatcctcggtggctagcgctataaccttatcattataataccaactagtgtgattaatatgtgacacgtcagtgtgggtacaaatatgtacattatcgtctacgtcgtattcgatacatccgcatacagccaacaaatataaaatgacaaatactctaacgccgttcgtacccatcttgatgcggtttaataaatgttttgatttcaatttattgtaaaaaaagattcggttttatactgttcgatattctcattgcttatattttcatctatcatctccacacagtcaaatccgtggttagcatgcacctcatcaaccggtaaaagactatcggactcttctatcattataactctagaatatttaatttggtcattattaatcaagtcaattatcttatttttaacaaacgtgagtattttactcattttttataaaaacttttagaaatatacagactctatcgtgtgtctatatcttctttttatatccaatgtatttatgtctgatttttcttcatttatcatatataatggtccaaattctacacgtgcttcggattcatccagatcattaaggttcttataattgtaacatccttctcttccctcttctacatcttccttcttattcttattcttagcgtcacagaatctaccacagcaggatcccatgacgagcgtcatattaaactaatccattttcaattataatatatgattagtaatgaccattaaaataaaaaatattcttcataaccggcaagaaagtgaaaagttcacattgaaactatgtcagtagtatacatcatgaaatgatgatatatatatactctattttggtggaggattatatgatataattcgtggataatcatttttaagacacatttctttattcgtaaatcttttcacgttaaatgagtgtccatattttgcaatttcttcatatgatggcggtgtacgtggacgaggctgctcctgttcttgttgtggtcgccgactgtcgtgtctgcgtttagatccctccattatcgcgattgcgtagatggagtactattttataccttgtaattaaatttttttattaattaaacgtataaaaacgttccgtatctgtatttaagagccagatttcgtctaatagaacaaatagctacagtaaaaataactagaataattgctacacccactagaaaccacggatcgtaatacggcaatcggttttcgataataggtggaacgtatattttatttaaggacttaacaattgtctgtaaaccacaatttgcttccgcggatcctgtattaactatctgtaaaagcatatgttgaccgggcggagccgaacattctccgatatctaatttctgtatatctataatattattaacctccgcatacgcattacagttcttttctagcttggataccgcactaggtacatcgtctagatctattcctatttcctcagcgatagctcttctatccttttccggaagcaatgaaatcacttcaataaatgattcaaccatgagtgtgaaactaagtcgagaattactcatgcatttgttagttattcggagcgcgcaatttttaaactgtcctataacctctcctatatgaatagcacaagtgacattagtagggatagaatgttgagctaatttttgtaaataactatctataaaaagattatacaaagttttaaactctttagtttccgccatttatccagtctgagaaaatgtctctcataataaatttttccaagaaactaattgggtgaagaatggaaacctttaatctatatttatcacagtctgttttggtacacatgatgaattcttccaatgccgtactaaattcgatatctttttcgatttctggatatgtttttaataaagtatgaacaaagaaatggaaatcgtaataccagttatgtttaactttgaaattgttttttattttcttgttaatgattccagccacttgggaaaagtcaaagtcgtttaatgccgatttaatacgttcattaaaaacaaactttttatcctttagatgaattattattggttcattggaatcaaaaagtaagatattatcgggtttaagatctgcgtgtaaaaagttgtcgcaacagggtagttcgtagattttaatgtataacagagccatctgtaaaaagataaactttatgtattgtaccaaagatttaaatcctaatttgatagctaactcggtatctactttatctgccgaatacagtgctaggggaaaaattataatgtttcctctttcatattcgtagttagttctcttttcatgttcgaaaaagtgaaacatgcggttaaaatagtttataacattaatattactgttaataactgccggataaaagtgggatagtaatttcacgaatttgatactgtcctttctctcgttaaacgcctttaaaaaaactttagaagaatatctcaatgagagttcctgaccatccatagtttgtatcaataatagcaacatatgaagaacacgtttatacagagtatgtaaaaatgttaatttatagtttaatcccatggcccacgcacacacgattaattttttttcatctccctttagattgttgtatagaaatttgggtactgtgaactccgccgtagtttccatgggactatataattttgtggcctcgaatacaaattttactacatagttatctatcttaaagactataccatatcctcctgtagatatgtgataaaaatcgtcgtttataggataaaatcgtttatccttttgttggaaaaaggatgaattaatgtaatcattctcttctatctttagtagtgtttccttattaaaattcttaaaataatttaacaatctaactgacggagcccaattttggtgtaaatctaattgggacattatattgttaaaatacaaacagtctcctaatataacagtatctgataatctatggggagacatccattgatattcaggggatgaatcattggcaacacccatttattgtacaaaaagccccaatttacaaacgaaagtccaggtttgatagagacaaacaattaactattttgtctctgtttttaacacctccacagtttttaatttctttagtaatgaaattattcacaatatcagtatcttctttatctaccagagattttactaacttgataaccttggctgtctcattcaatagggtagtaatatttgtatgtgtgatattgatatctttttgaattgtttcttttagaagtgattctttgatggtgccagcatacgaattacaataatgcagaaactcggttaacatgcaggaattatagtaagccaattccaattgttgcctgtgttgtattagagtgtcaatatgagcaatggtgtccttgcgtttctctgatagaatgcgagcagcgattttggcgttatcatttgacgatatttctggaatgacgaatcctgtttctactaactttttggtaggacaaagtgaaacaatcaagaagatagcttctcctcctatttgtggaagaaattgaactcctctagatgatctactgacgatagtatctccttgacagatattggaccgaattacagaagtacctggaatgtaaagccctgaaaccccctcattttttaagcagattgttgccgtaaatcctgcactatgcccaagatagagagctcctttggtgaatccatctctatgtttcagtttaaccaagaaacagtcagctggtctaaaatttccatctctatctaatacagcatctaacttgatgtcaggaactatgaccggtttaatgttatatgtaacattgagtaaatccttaagttcataatcatcactgtcatcagttatgtacgatccaaacaatgtttctaccggcatagtggatacgaagatgctatccatcagaatgtttccctgattagtattttctatatagctattcttctttaaacgattttccaaatcagtaactatgttcatttttttaggagtaggacgcctagccagtatggaagaggattttctagatcctctcttcaacatctttgatctcgatggaatgcaaaaccccatagtgaaacaaccaacgataaaaataatattgtttttcactttttataattttaccatctgactcatggattcattaatatctttataagagctactaacgtataattctttataactgaactgagatatatacaccggatctatggtttccataattgagtaaatgaatgctcggcaataactaatggcaaatgtatagaacaacgaaattatactagagttgttaaagttaatattttctatgagctgttccaataaattatttgttgtgactgcgttcaagtcataaatcatcttgatactatccagtaaaccgtttttaagttctggaatattatcatcccattgtaaagcccctaattcgactatcgaatatcctgctctgatagcagtttcaatatcgacggacgtcaatactgtaataaaggtggtagtattgtcatcatcgtgataaactacgggaatatggtcgttagtaggtacggtaactttacacaacgcgatatataactttccttttgtaccatttttaacgtagttgggacgtcctgcagggtattgttttgaagaaatgatatcgagaacagatttgatacgatatttgttggattcctgattattcactataatataatctagacagatagatgattcgataaatagagaaggtatatcgttggtaggataatacatccccattccagtattctcggatactctattgatgacactagttaagaacatgtcttctattctagaaaacgaaaacatcctacatggactcattaaaacttctaacgctcctgattgtgtctcgaatgcctcgtacaaggatttcaaggatgccatagattctttgaccaacgatttagaattgcgtttagcatctgatttttttattaaatcgaatggtcggctctctggtttgctaccccaatgataacaatagtcttgtaaagataaaccgcaagaaaatttatacgcatccatccaaataaccctagcaccatcggatgatattaatgtattattatagattttccatccacaattattgggccagtatactgttagcaacggtatatcgaatagattactcatgtaacctactagaatgatagttcgtgtactagtcataatatctttaatccaatctaaaaaatttaaaattagattttttacactgttaaagttaacaaaagtattacccgggtacgtggatatcatatatggcattggtccattatcagtaatagctccataaactgatacggcgatggtttttatatgtgtttgatctaacgaggaagaaattcgcgcccacaattcatctctagatatgtatttaatatcaaacggtaacacatcaatttcgggacgcgtatatgtttctaaatttttaatccaaatataatgatgacctatatgccctattatcatactgtcaactatagtacacctagggaacttacgatacatctgtttcctataatcgttaaattttacaaatctataacatgctaaaccttttgacgacagccattcattaatttctgatatggaatctgtattctcgataccgtatcgttctaaagccagtgctatatctccctgttcgtgggaacgctttcgtataatatcgatcaacggataatctgaagtttttggagaataatatgactcatgatctatttcgtccataaacaatctagacataggaattggaggcgatgatcttaattttgtgcaatgagtcgtcaatcctataacttctaatcttgtaatattcatcatcgacataatactatctatgttatcatcgtatattagtataccatgaccttcttcatttcgtgccaaaatgatatacagtcttaaatagttacgcaatatctcaatagtttcataattgttagctgttttcatcaaggtttgtatcctgtttaacatgatggcgttctataacgtctctattttctatttttaattttttaaatttttaacgatttactgtggctagatacccaatctctctcaaatatttttttagcctcgcttacaagctgtttatctatactattaaaactgacgaatccgtgattttggtaatgggttccgtcgaaatttgccgaagtgatatgaacatattcgtcgtcgactatcaacaattttgtattattctgaatagtgaaaaccttcacagatagatcattttgaacacacaacgcatctagacttttggcggttgccatagaatatacgtcgttcttatcccaattaccaactagaagtctgatcttaactcctctattaatggctgcttctataatggagttgtaaatgtcgggccaatagtagctattaccgtcgacacgtgtagtgggaactatggccaaatgttcaatatctatactagtcttagctgacctgagtttatcaataactacatcggtatctagatctctagaatatcccaataggtgttccggagaatcagtaaagaacactccacctataggattcttaatatgatacgcagtgctaactggcaaacaacaagccgcagagcataaattcaaccatgaattttttgcgctattaaaggctttaaaagtatcaaatcttctacgaagatctgtggccagcgggggataatcagaatatacacctaacgttttaatcgtatgtatagatcctccagtaaatgacgcgtttcctacataacatctttcatcatctgacacccaaaaacaaccgagtagtagtcccacattattttttttatctatattaacggttataaaatttatatccgggcagtgactttgtagctctcccagatttcttttccctcgttcatctagcaaaactattattttaatccctttttcagatgcctcttttagtttatcaaaaataagcgctcccctagtcgtactcagaggattacaacaaaaagatgctatgtatatatatttcttagctagagtgataatttcgttaaaacattcaaatgttgttaaatgatcggatctaaaatccatattttctggtagtgtttctaccagcctacattttgctcccgcaggtaccgatgcaaatggccacatttagttaacataaaaacttatacatcctgttctatcaacgattctagaatatcatcggctatatcgctaaaattttcatcaaagtcgacatcacaacctaactcagtcaatatattaagaagttccatgatgtcatcttcgtctatttctatatccgtatccattgtagattgttgaccgattatcgagtttaaatcattactaatactcaatccttcagaatacaatctgtgtttcattgtaaatttataggcggtgtatttaagttggtagattttcaattatgtattaatatagcaacagtagttcttgctcctccttgattctagcatcctcttcattattttcttctacgtacataaacatgtccaatacgttagacaacacaccgacgatggcggccgcaggatcctgcgaagcttacagacacgaatatgactaaaccgatgaccatttaaaaacccctttaaaaacccctctctagctttcacttaaactgtatcgatcattcttttagcacatgtataatataaaaacattattctatttcgaatttaggcttccaaaaatttttcatccgtaaaccgataataatatatatagacttgttaatagtcggaataaatagattaatgcttaaactatcatcatctccacgattagagatacaatatttacattctttttgctgtttcgaaactttatcaatacacgttaatacaaacccaggaaggagatattgaaactgaggctgttgaaaatgaaacggtgaatacaataattcagataatgtaaaatcatgattccgtattctgatgatattagaactgctaatggatgtcgatggtatgtatctaggagtatctattttaacaaagcatcgatttgctaatatacaattatccttttgattaattgttattttattcatattcttaaaaggtttcatatttatcaattcttctacattaaaaatttccatttttaatttatgtagccccgcaatactcctcattacgtttcattttttgtctataatatccattttgttcatctcggtacatagattatccaattgagaagcgcatttagtagttttgtacattttaagtttattgacgaatcgtcgaaaactagttatagttaacattttattatttgataccctgatattaatacccctgccgttactattatttataactgatgtaatccacgtaacattggaattaactatcgatagtaatgcatcgacgcttccaaaattgtctattataaactcaccgataatttttttattgcatgttttcatattcattaggattatcaaatctttaatcttattacgattgtatgcgttgatattacaagacgtcattctaaaagacggaggatctccatcaaatgccagacaatcacgtacaaagtacatggaaataggttttgttctattgcgcatcatagatttatatagaacacccgtagaaatactaatttgttttactctataaaatactaatgcatctatttcatcgttttgtataacgtctttccaagtgtcaaattccaaatttttttcattgatagtaccaaattcttctatctctttaactacttgcatagataggtaattacagtgatgcctacatgccgttttttgaaactgaatagatgcgtctagaagcgatgctacgctagtcacaatcaccactttcatatttagaatatatatatgtaaaaatatagtagaatttcattttgtttttttctatgctataaatgaattctcattttgcatctgctcatactccgttttatattaataccaaagaaggaagatatctggttctaaaagccgttaaagtatgcgatgttagaactgtagaatgcgaaggaagtaaagcttcctgcgtactcaaagtagataaaccctcatcgcccgcgtgtgagagaagaccttcgtccccgtccagatgcgagagaatgaataaccctggaaaacaagttccgtttatgaggacggacatgctacaaaatatgttcgcggctaatcgcgataatgtagcttctagacttttgtcctaaaatactattatatccttttcgatattaataaatccgtgtcgtccaggttttttatctctttcagtatgtgaatagataggtattttatctctattcatcatcgaatttaagagatccgataaacattgtttgtattctccagatgtcagcatctgatacaacaatatatgtgcacataaacctctggcacttatttcatgtaccttccccttatcactaaggagaatagtatttgagaaatatgtatacatgatattatcatgaattagatatacagaatttgtaacactctcgaaatcacacgatgtgtcggcgttaagatctaatatatcactcgataacacattttcatctagatacactagacattttttaaagctaaaatagtctttagtagtaacagtaactatgcgattattttcatcgatgatacatttcatcggcatattattacgcttaccatcaaagactataccatgtgtatatctaacgtattctagcatggttgccatacgcgcattaaacttttcaggatctttggatagatcttccaatctatctatttgagaaaacatttttatcatgttcaatagttgaaacgtcggatccactatatagatattatctataaagattttaggaactacgttcatggtatcctggcgaatattaaaactatcaatgatatgattatcgttttcatcttttatcaccatatagtttctaagatatgggattttacttaatataatattatttcccgtgataaattttattagaaaggccaaatctataagaaaagtcctagaattagtctgaagaatatctatatcgccgtatagtatatttggattaattagatatagagaatatgatccgtaacatatacaacttttattatggcgtctaagatattcttccatcaacttattaacatttttgactagggaagatacattatgacgtcccattacttttgccttgtctattactgcgacgttcatagaatttagcatatctcttgccaattcttccattgatgttacattataagaaattttagatgaaattacatttggagctttaatagtaagaactcctaatatgtccgtgtatgtggtcactaatacagattgtagttctataatcgtaaataatttacctatattatatgtttgagtctgtttagaaaagtagctaagtatacgatcttttatttctgatgcagatgtattaacatcggaaaaaaatctttttttattcttttttactaaagatacaaatatgtctttgttaaaaacagttattttctgaatatttctagcttgtaattttaacatatgatattcgttcacactaggtactctgcctaaataggtttctataatctttaatgtaatattaggaaaagtattctgatcaggattcctattcattttgaggatttaaaactctgattattgtctaatatggtctctacgcaaactttttcacagagcgatagagtttttgataactcgtttttcttaagaaatataaaactactgtctccagagctcgctctatcttttattttatctaattcgatacaaactcctgatactggttcagaaagtaattcattaattttcagtcctttatagaagatatttaatatagataatacaaaatcttcagtttttgatatcgatctgattgatcctagaactagatatattaataacgtgctcattaggcagtttatggcagcttgataattagatatagtatattccagttcatatttattagataccgcattgcccagattttgatattctatgaattcctctgaaaataaatccaaaataactagacattctattttttgtggattagtgtactctcttccctctatcatgttcactactggtgtccacgatgataaatatctagagggaatataatatagtccataggatgccaatctagcaatgtcgaataactgtaattttattcttcgctcttcattatgaattgattcttgaggtataaacctaacacaaattatattattagacttttcgtatgtaatgtctttcatgttataagtttttaatcctggaatagaatctattttaatgaggcttttaaacgcagagttctccaacgagtcaaagcataatactctgttgtttttcttatatacgatgttacgattttcttctttgaatggaataggtttttgaattagtttataattacaacataatagataaggaagtgtgcaaatagtacgcggaaaaaacataatagctcccctgttttcatccatggttttaagtaaatgatcactggcttctttagtcaatggatattcgaacattaaccgtttcatcatcattggacagaatccatatttcttaatgtaaagagtgatcaaatcattgtgtttattgtaccatcttgttgtaaatgtgtattcggttatcggatctgctcctttttctattaaagtatcgatgtcaatctcgtctaagaattcaactatatcgacatatttcatttgtatacacataaccattactaacgtagaatgtataggaagagatgtaacgggaacagggtttgttgattcgcaaactattctaatacataattcttctgttaatacgtcttgcacgtaatctattatagatgccaagatatctatataattattttgtaagatgatgttaactatgtgatctatataagtagtgtaataattcatgtattttgatatatgttccaactctgtctttgtgatgtctagtttcgtaatatctatagcatcctcaaaaaatatattcgcatatattcccaagtcttcagttctatcttctaaaaaatcttcaacgtatggaatataataatctattttacctcttctgatatcattaatgatatagtttttgacactatcttctgtcaattgattcttattcactatatctaagaaacggatagcgtccctaggacgaactactgccattaatatctctattatagcttctggacataattcatctattataccagaattaatgggaactattccgtatctatctaacatagttttaagaaagtcagaatctaagacttgatgttcatatattggttcatacatgaaatgatctctattgatgatagtgactatttcattctctgaaaattggtaactcattctatatatgctttccttgttgatgaaggatagaatatactcaatagaatttgtaccaacaaactgttctcttatgaatcgtatatcatcatctgaaataatcatgtaaggcatacatttaacaattagagacttgtctcctgttatcaatatactattcttgtgataatttatgtgtgaggcaaatttgtccacgttctttaattttgttatagtagatatcaaatccaatggagctacagttcttggcttaaacagatatagtttttctggaacaaattctacaacattattataaaggactttgggtagataagtgggatgaaatcctattttaattaatgcgatagccttgtcctcgtgcagatatccaaacgcttttgtgatagtatggcattcattgtctagaaacgctctacgaatatctgtgacagatatcatctttagagaatatactagtcgcgttaatagtactacaatttgtattttttaatctatctcaataaaaaaattaatatgtatgattcaatgtataactaaactactaactgttattgataactagaatcagaatctaatgatgacgtaaccaagaagtttatctactgccaatttagctgcattatttttagcatctcgtttagattttccatcggccttatcgaatactcttccgtcgatgtctacacaggcataaaatgtaggagagttactaggcccaactgattcaatacgaaaagaccaatctctcctagtaatttggcagtactcattaataacggtgacagggttagcatctttccaatcaataatttttttagccggaataacatcatcaaaagacttatgatcctctctcattgatttttcgcgggatacatcatctattatgacgtcagccatagcatcagcatccggcttatccgcctccgttgtcataaaccaacgaggaggaatatcgtcggagctgtacaccatagcactacgttgaagatcgtacagagctttattaacttctcgcttctccatattaagttgtctagttagttgtgcagcagtagctccttcgattccaatgtttttaatagccgcacacacaatctctgcgtcagaacgctcgtcaatatagatcttagacatttttagagagaactaacgcaaccagcaataaaactgaacctactttatcatttttttattcatcatcctctggtggttcgtcgttcctatcaaatgtagctctgattaacccgtcatctataggtgatgctggttctggagattctggaggagatggattattatctggaagaatctctgttatttccttgttttcatgtatcgattgcgttgtaacattaagattgcgaaatgctctaaatttgggaggcttaaagtgttgtttgcaatctctacacgcgtgtctaactagtggaggttcgtcagctgctctagtttgaatcatcatcggcgtagtattcctacttttacagttaggacacggtgtattgtatttctcgtcgagaacgttaaaataatcgttgtaactcacatcctttattttatctatattgtattctactcctttcttaatgcattttataccgaataagagatagcgaaggaattctttttcggtgccgctagtacccttaatcatatcacatagtgttttatattccaaatttgtggcaatagacggtttatttctatacgatagtttgtttctggaatcctttgagtattctataccaatattattctttgattcgaatttagtttcttcgatattagattttgtattacctatattcttgatgtagtactttgatgatttttccatggcccattctattaagtcttccaagttggcatcatccacatattgtgatagtaattctcggatatcagtagcggctaccgccattgatgtttgttcattggatgagtaactactaatgtatacattttccatttataacacttatgtattaactttgttcatttatattttttcattattatgttgatattaacaaaagtgaatatatatatgttaataattgtattgtggttatacggctacaattttataatgagtgaaagtcagtgtccgatgatcaatgacgatagctttactctgaaaagaaagtatcaaatcgatagtgcggagtcaacaataaaaatggataagaagaggataaagtttcagaatagagccaaaatggtaaaagaaataaatcagacaataagagcagcacaaactcattacgagacattgaaactaggatacataaaatttaagagaatgattatgactactactctagaagatatagcaccatctattccaaataatcagaaaacttataaactattctcggacatttcagccatcggcaaagcatcacagaatccgagtaagatggtatatgctctgctgctttacatgtttcccaatttgtttggagatgatcatagattcattcgttatagaatgcatccaatgagtaaaatcaaacacaagatcttctctcctttcaaacttaatcttattagaatattagtggaagaaagattctataataatgaatgcagatctaataaatggagaataattggaacacaagttgataaaatgttgatagctgaatctgataaatatacaatagatgcaaggtataacctaaaacccatgtatagaatcaagggagaatctgaagaagataccctctttatcaaacagatggtagaacaatgtgtgacatcccaggaattggtggaaaaagtgttgaagatactgtttagagatttgttcaagagtggagaatacaaagcgtacagatacgatgatgatgtagaaaatggatttattggattggatacactaaaattaaacattgttcatgatatagttgaaccatgtatgcctgttcgtaggccagtggctaagatactgtgtaaagaaatggtaaataaatactttgagaatccgctacatattattggtaaaaatcttcaagagtgcattgactttgttagtgaataggcatttcatctttctccaatactaattcaaattgttaaattaataatggatagtataaatagttattagttataagatagtaaaaataattattagaataagagtgtagtatcatagataactctcttctataaaaatggattttattcgtagaaagtatcttatatacacagtagaaaataatatagattttttaaaggatgatacattaagtaaagtaaacaattttaccctcaatcatgtactagctctcaagtatctagttagcaattttcctcaacacgttattactaaggatgtattagctaataccaatttttttgttttcatacatatggtacgatgttgtaaagtgtacgaagcggttttacgacacgcatttgatgcacccacgttgtacgttaaagcattgactaagaattatttatcgtttagtaacgcaatacaatcgtacaaggaaaccgtgcataaactaacacaagatgaaaaatttttagaggttgccgaatacatggacgaattaggagaacttataggcgtaaattatgacttagttcttaatccattatttcacggaggggaacccatcaaagatatggaaatcatttttttaaaactgtttaagaaaacagacttcaaagttgttaaaaaattaagtgttataagattacttatttgggcatacctaagcaagaaagatacaggcatagagtttgcggataatgatagacaaaatatatacactctatttcaacaaactggtagaatcgtccatagcaatctaacagaaacgtttagagattatatctttcccggagataagactagctattgggtgtggttaaacgaaagtatagctaatgatgcggatatcgttcttaatagacacgccattaccatgtatgataaaattcttagttatatatactctgagataaaacaaggacgcgttaataaaaacatgcttaagttagtttatatctttgagcctgaaaaagatatcagagaacttctgctagaaatcatatatgatattcctggagatatcctatctattattgatgcaaaaaacgacgattggaaaaaatattttattagtttttataaagctaattttattaacggtaatacatttattagtgatagaacgtttaacgaggacttattcagagttgttgttcaaatagatcccgaatatttcgataatgaacgaattatgtctttattctctacgagtgctgcggacattaaacgatttgatgagttagatattaataacagttatatatctaatataatttatgaggtgaacgatatcacattagatacaatggatgatatgaagaagtgtcaaatctttaacgaggatacgtcgtattatgttaaggaatacaatacatacctgtttttgcacgagtcggatcccatggtcatagagaacggaatactaaagaaactgtcatctataaaatccaagagtagacggctgaacttgtttagcaaaaacattttaaaatattatttagacggacaattggctcgtctaggtcttgtgttagatgattataaaggagacttgttagttaaaatgataaaccatcttaagtctgtggaggatgtatccgcattcgttcgattttctacagataaaaaccctagtattcttccatcgctaatcaaaactattttagctagttataatatttccatcatcgtcttatttcaaaggtttttgagagataatctatatcatgtagaagaattcttggataaaagcatccatctaaccaagacggataagaaatatatacttcaattgataagacacggtagatcatagaacagaccaaatatattattaataatttgtatatacatagatataattatcacacatttttgataaatgggaactgctgcaacaattcagactcccaccaaattaatgaataaagaaaatgcagaaatgattttggaaaaaattgttgatcatatagttatgtatattagtgacgaatcaagtgattcagaaaataatcctgaatatattgattttcgtaacagatacgaagactatagatctctcattataaaaagtgatcacgagtttgtaaagctatgtaaaaatcatgcggagaaaagttctccagaaacgcaacaaatgattatcaaacacatatacgaacaatatcttattccagtatctgaagtactattaaaacctataatgtccatgggtgacataattacatataacggatgtaaagacaatgaatggatgctagaacaactctctaccctaaactttaacaatctccgcacatggaactcatgtagcataggcaatgtaacgcgtctgttttatacattttttagttatctgatgaaagataaactaaatatataagtataatcccattctaatactttaacctgatgtattagcatcttattagaatattaacctaactaaaagacataacataaaaactcattacatagttgataaaaagcggtaggatataaatattatggctgccaccgttccgcgttttgacgacgtgtacaaaaatgcacaaagaagaattctagatcaagaaacattttttagtagaggtctaagtagaccgttaatgaaaaacacatatctatttgataattacgcgtatggatggataccagaaactgcaatttggagtagtagatacgcaaacctagatgctagtgactattatcccatttcgttgggattacttaaaaagttcgagtttctcatgtctctatataaaggtcctattcccgtatatgaagaaaaagtaaatactgaattcatagccaatggatcgttctctggtagatacgtatcatatcttcgaaagttttctgcccttccaacaaacgagtttattagttttttgttactgacttccattccaatctataatatcttgttctggtttaaaaacacacagtttgatattactaaacacacattattcagatacgtctatacagataatgccaaacacctggcgttggctaggtatatgcatcaaacaggagactataagcctttgtttagtcgtctcaaagagaattatatatttaccggtcccgttccaataagtatcaaagatatagatcaccctaatcttagtagagcaagaagtccatccgattatgagacattagctaatattagtactatattgtactttaccaagtatgatccggtattaatgtttttattgttttacgtacctgggtattcaattactacaaaaattactccagccgtagaatatctaatggataaactgaatctaacaaagagcgacgtacaactgttgtaaattattttatgcttcgtaaaatgtaggttttgaaccaaacattctttcaaagaatgagatgcataaaactttattatccaatagattgactatttcggacgtcaatcgtttaaagtaaacttcgtaaaatattctttgatcactgccgagtttaaaacttctatcgataattgtctcatatgttttaatatttacaagttttttggtccatggtacattagccggacaaatatatgcaaaataatatcgttctccaagttctatagtttctggattatttttattatattcagtaactaaatacatattagggttatctgcggatttataatttgagtgatgcattctactcaacataaataattctagaggagacgatctactatcaaattcggatcgtaaatctgtttctaaagaacggagaatatctatacatacctgattagaattcatccgtccttcagacaacatctcagacagtctggttttgtacatcttaatcatattcttatgaaacttggaaacatctcttctagtttcactagtacctttattaattctctcaggtacagattttgaattcgacgatgctgagtatttcatcgttgtatatttcttcttcgattgcataatcagattcttatataccgcctcaaactctattttaaaattattaaacaatactctattattaatcagtcgttctaactctttcgctatttctatagacttatctacatcttgactgtctatctctgtaaacacggagtcggtatctccatacacgctacgaaaacgaaatctgtaatctataggcaacgatgttttcacaatcggattaatatctctatcgtccatataaaatggattacttaatggattggcaaaccgtaacataccgttagataactctgctccatttagtaccgattctagatacaagatcattctacgtcctatggatgtgcaactcttagccgaagcgtatgagtatagagcactatttctaaatcccatcagaccatatactgagttggctactatcttgtacgtatattgcatggaatcatagatggccttttcagttgaactggtagcctgttttagcatctttttatatctggctctctctgccaaaaatgttcttaatagtctaggaatggttccttctatcgatctatcgaaaattgctatttcagagatgaggttcggtagtctaggttcacaatgaaccgtaatatatctaggaggtggatatttctgaagcaatagctgattatttatttcttcttccaatctattggtactaacaacgacaccgactaatgtttccggagatagatttccaaagatacacacattaggatacagactgttataatcaaagattaatacattattactaaacattttttgttttggagcaaataccttaccgccttcataaggaaacttttgttttgtttctgatctaactaagatagttttagtttccaacaatagctttaacagtggacccttgatgactgtactcgctctatattcgaataccatggattgaggaagcacatatgttgacgcacccgcgtctgtttttgtttctactccataatactcccacaaatactgacacaaacaagcatcatgaatacagtatctagccatatctaaagctatgtttagattataatccttatacatctgagctaaatcaacgtcatcctttccgaaagataatttatatgtatcattaggtaaagtaggacataatagtacgactttaaatccattttcccaaatatctttacgaattactttacatataatatcctcatcaacagtcacataattacctgtggttaaaacctttgcaaatgcagcggctttgcctttcgcgtctgtagtatcgtcaccgatgaacgtcatttctctaactcctctatttaatactttacccatgcaactgaacgcgttcttggatatagaatccaatttgtacgaatccaatttttcaaatttttgaatgaatgaatatagatcgaaaaatatagttccattattgttattaacgtgaaacgtagtattggccatgccgcctactcccttatgactagactgatttctctcataaatacagagatgtacagcttcctttttgtccggagatctaaagataattttctctcctgttaataactctagacgattagtaatatatctcagatcaaagttatgtccgttaaaggtaacgacgtagtcgaacgttagttccaacaattgtttagctattcgtaacaaaactatttcagaacatagaactagttctcgttcgtaatccatttccattagtgactgtatcctcaaacatcctctatcgacggcttcttgtatttcctgttccgttaacatctcttcattaatgagcgtaaacaataatcgtttaccacttaaatcgatataacagtaacttgtatgcgagattgggttaataaatacagaaggaaacttcttatcgaagtgacactctatatctagaaataagtacgatcttgggatatcgaatctaggtatttttttagcgaaacagttacgtggatcgtcacaatgataacatccattgttaatctttgtcaaatattgctcgtccaacgagtaacatccgtctggagatatcccgttagaaatataaaaccaactaatattgagaaattcatccatggtggcattttgtatgctgcgtttctttggctcttctatcaaccacatatctgcgacggagcattttctatctttaatatctagattataacttattgtctcgtcaatgtctatagttctcatctttcccaacggcctcgcattaaatggaggaggagacaatgactgatatatttcgtccgtcactacgtaataaaagtaatgaggaaatcgtataaatacggtctcgccatttcgacatctggatttcagatataaaaatctgttttcaccgtgactttcaaaccaattaatgcaccgaacatccatttatagaatttagaaatatattttcatttaaatgaatcccaaacattggggaagagccgtatggaccattatttttatagtactttcgcaagcgggtttagacggcaacatagaagcgtgtaaacgaaaactatatactatagttagcactcttccatgtcctgcatgtagacggcacgcgactatcgctatagaggacaataatgtcatgtctagcgatgatctgaattatatttattattttttcatcagattatttaacaatttggcatctgatcccaaatacgcgatcgatgtgacaaaggttaaccctttataaacttaacccattataaaacttatgattagtcacaactgaaataaccgcgtgattattttttggtataattctacacggcatggtttctgtgactatgaattcaacccccgttacattagtgaaatctttaacaaacagcaagggttcgtcaaagacataaaactcattgtttacaatcgaaatagaccccctatcacacttaaaataaaaaatatccttatcctttaccaccaaataaaattctgattggtcaatgtgaatgtattcacttaacagttccacaaatttatttattaactccgaggcacatacatcgtcggtattttttatggcaaactttactcttccagcatccgtttctaaaaaaatattaacgagttccatttatatcatccaatattattgaaatgacgttgatggacagatgatacaaataagaaggtacggtacctttgtccaccatctcctccaattcatgctctattttgtcattaactttaatgtatgaaaacagtacgccacatgcttccatgacagtgtgtaacactttggatacaaaatgtttgacattagtataattgtccaagactgtcaatctataatagatagtagctataatatattctatgatggtattgaagaagatgacaaccttggcatattgatcatttaacacagacatggtatcaacagatagcttgaatgaaagagaatcagtaattggaataagcgtcttctcgatagagtgtccgtataccaacatgtctgatattttgatgtattccattaaattatttagttttttctttttattctcgttaaacagcatttctgtcaacggaccccaacatcgttgaccgattaagttttgattgatttttccgtgtaaggcgtatctagtcagatcgtatagcctatccaataatccatcgtctgtgtgtagatcacatcgtacactttttaattctctatagaagagcgacagacatctggagcaattacagacagcaatttctttattctctacagatgtaagatacttgaagacattcctatgatgatgcagaattttggataacacggtattgatggtatctgttaccataattcctttgatggctgatagtgtcagagcacaagatttccaatctttgacaatttttagcaccattatctttgttttgatatctatatcagacagcatggtgcgtctgacaacacagggattaagacggaaagatgaaatgattctctcaacatcttcaatagataccttgctattttttctggcattatctatatgtgcgagaatatcctctagagaatcagtatcctttttgatgatagtggatctcaatgacatgggacgtttaaaccttcttattctatcaccagattgcatggtgatttgtcttctttcttttatcataatgtaatctctaaattcatcggcaaattgtctatatctaaaatcataatatgagatgtttacctctacaaatatctgttcgtccaatgttagagtatttacatcagttttgtattccaaattaaacatggcaacggatttaattttatattcctctattaagtcctcgtcgataataacagaatgtagataatcatttaatccgtcgtacatggttggaagatgcttgttgacaaaatctttaattgtcttgatgaaggtgggactatatctaacatcttgattaataaaatttataacattgtccataggatactttgtaactagttttatacacatctcttcatcggtaagtttagacagaatatcgtgaacaggtggtatattatattcatcagatatacgaagaacaatgtccaaatctatattgtttaatatattatatagatgtagcgtagctcctacaggaatatctttaactaagtcaatgatttcatcaaccgttagatctattttaaagttaatcatataggcattgatttttaaaaggtatgtagccttgactacattctcattaattaaccattccaagtcattgtgtgtaagaagattatattctatcataagcttgactacatttggtcccgataccattaaagaattcttatgatataaggaaacagattttaggtactcatctactctacaagaattttggagagccttaacgatatcagtgacgtttattatttcaggaggaaagaatctaacattgagaatatcggaattaatagcttccagatacagtgattttggcaatagtccgtgtaatccataatccagtaacacgagctggtgcttgctagacaccttttcaatgtttaatttttttgaaataagctttgataaagccttcctcgcaaattccggatacatgaacatgtcggcgacatgattaagtattgttttttcattatttttatattttctcaacaagttctcaataccccaatagatgatagaatatcacccaatgcgtccatgttgtctatttccaacaggtcgctatatccaccaatagaagtttttccaaaaaagattctaggaacagttctaccaccagtaatttgttcaaaataatcccgcaattcattttcgggtttaaattctttaatatcgacaatttcatacgctcctcttttgaaactaaacttatttagaatatccagtgcatttctacaaaaaggacatgtatacttgacaaaaattgtcactttgttattggccaacctttgttgtacaaattcctcggccattttaatatttaagtgatataaaactatctcgacttatttaactctttagtcgagatatatggacgcagatagctatatgatagccaactacagaaggcaaacgctataaaaaacataattacgacgagcatatttataaatatttttattcagcattacttgatatagtaatattaggcacagtcaaacattcaaccactctcgatacattaactctctcattttctttaacaaattctgcaatatcttcgtaaaaagattcttgaaactttttagaatatctatcgactctagatgaaatagcgttcgtcaacatactatgttttgtatacataaaggcgcccattttaacagtttctagtgacaaaatgctagcgatcctaggatcctttagaatcacatagattgacgattcgtctctcttagtaactctagtaaaataatcatacaatctagtacgcgaaataatattatccttgacttgaggagatctaaacaatctagttttgagaacatcgataagttcatcgggaatgacatacatactatctttaatagaactcttttcatccagttgaatggattcgtccttaaccaactgattaatgagatcttctattttatcattttccagatgatatgtatgtccattaaagttaaattgtgtagcgcttctttttagtctagcagccaatactttaacatcactaatatcgatatacaaaggagatgatttatctatggcattaagaattcgtttttcgacatccgtcaaaaccaattcctttttgcctgtatcatccagttttccatcctttgtaaagaaattattttctactagactattaataagactgataaggattcctccataattgcacaatccaaactttttaacaaaactagactttacgagatctacaggaatgcgtacttcaggttttttagcttgtgattttttcttttgcggacattttctagtaaccaactcatctaccatttcattgattttagcagtgaaataagctttcaatgcacgggcactgatactattgaaaacgagttgatcttcaaattccgccatttaagttcaccaaacaacttttaaatacaaatatatcaatagtagtagaataagaactataaaaaaaataataattaaccaaccccaacaaccggtattattagttgatgtggtagttttctcatcacttagaacagatttaacaatttctataaagtctgtcaaatcatcttccggagaccccataaatacaccaaatatagcggcgtacaacttatccatttatacattgaatattggcttttctttatcgctatcttcatcatattcatcatcaatatcaacaagtcccagattacgagccagatcttcttctacattttcagtcattgatacacgttcactatctccagagagtccgataacgttagccaccacttctctatcaatgattagtttcttgagcgcgaaagtaatttttgtttccgttccggatctatagaagacgataggtgtgataattgccttggccaattgtctttctcttttactgagtgattctagttcaccttctatagatctgagaatggatgattctccagtcgaaacatattctaccatggatccgtttaatttgttgatgaagatggattcatccttaaatgttttctctgtaatagtttccaccgaaagactatgcaaagaatttggaatgcgttccttgtgcttaatgtttccatagacggcttctagaagttgatacaacataggactagccgcggtaacttttatttttagaaagtatccatcgcttctatcttgtttagatttatttttataaagtttagtctctccttccaacataataaaagtggaagtcatttgactagataaactatcagtaagttttatagagatagacgaacaattagcgtattgagaagcatttagtgtaacgtattcgatacattttgcattagatttactaatcgattttgcatactctataacacccgcacaagtctgtagagaatcgctagatgcagtaggtcttggtgaagtttcaactctcttcttgattaccttactcatgattaaacctaaataattgtactttgtaatataatgatatatattttcactttatctcatttgagaataaaaatgtttttgtttaaccactgcatgatgtacagatttcggaatcgcaaaccaccagtggttttattttatccttgtccaatgtgaattgaatgggagcggatgcgggtttcgtacgtagatagtacattcccgtttttagaccgagactccatccgtaaaaatgcatactcgttagtttggaataactcggatctgctatatggatattcatagattgactttgatcgatgaaggctcccctgtctgcagccatttttatgatcgtcttttgtggaatttcccaaatagttttataaactcgcttaatatcttctggaaggtttgtattctgaatggatccaccatctgccataatcctattcttgatctcatcattccataattttctctcggttaaaactctaaggagatgcggattaactacttgaaattctccagacaatactctccgagtgtaaatattactggtatacggttccaccgactcattatttcccaaaatttgagcagttgatgcagtcggcataggtgccaccaataaactatttctaagaccgtatgttctgattttatcttttagaggttcccaattccaaagatccgacggtacaacattccaaagatcatattgtagaataccgttactggcgtacgatcctacatatgtatcgtatggtccttccttctcagctagttcacaactcgcctctaatgcaccgtaataaatggtttcgaagatcttcttatttagatcttgtgcttccaggctatcaaatggataatttaagagaataaacgcgtccgctaatccttgaacaccaataccgataggtctatgtctcttattagagatttcagcttctggaataggataataattaatatctataattttattgagatttctgacaattactttgaccacatccttcagtttgagaaaatcaaatcgcccatctattacaaacatgttcaaggcaacagatgccagattacaaacggctacctcattagcatccgcatattgtattatctcagtgcaaagattactacacttgatagttcctaaattttgttgattactctttttgttacacgcatccttataaagaatgaatggagtaccagtttcaatctgagattctataatcgctttccagacgactcgagcctttattatagatttgtatctcctttctctttcgtatagtgtatacaatcgttcgaactcgtctccccaaacattgtccaatccaggacattcatccggacacatcaacgaccactctccgtcatccttcactcgtttcataaagagatcaggaatccaaagagctataaatagatctctggttctatgttcctcgtttcctgtattctttttaagatcgaggaacgccataatatcagaatgccacggttccaagtatatggccataactccaggccgtttgtttcctccctgatctatgtatctagcggtgttattataaactctcaacattggaataataccgtttgatataccattggtaccggagatatagcttccactggcacgaatattactaattgatagacctattccccctgccattttagagattaatgcgcatcgttttaacgtgtcatagataccctctatgctatcatcgatcatgttaagtagaaaacagctagacatttggtgacgactagttcccgcattaaataaggtaggagaagcgtgcgtaaaccatttttcagaaagtagattgtacgtctcaatagctgagtctatatcccattgatgaattcctactgcgacacgcattaacatgtgctgaggtctttcaacgatcttgttgtttattttcaacaagtaggatttttccaaagttttaaaaccaaaatagttgtatgaaaagtctcgttcgtaaataataaccgagttgagtttatccttatatttgttaactatatccatggtgatacttgaaataatcggagaatgtttcccatttttaggattaacatagttgaataaatcctccatcacttcactaaatagtttttttgtttccttgtgtagatttgatacggctattctggcggctagaatggcataatccggatgttgtgtagtacaagtggctgctatttcggctgccagagtgtccaattctaccgttgttactccattatatattccttgaataaccttcatagctattttaataggatctatatgatccgtgtttaagccataacataattttctaatacgagacgtgattttatcaaacatgacattttccttgtatccatttcgtttaatgacaaacatttttgttggtgtaataaaaaaattatttaacttttcattaatagggatttgacgtatgtagcgtacaaaatgattgttcctggtatatagataaagagtcctatatatttgaaaatcgttacggctcgattaaactttaatgattgcatagtgaatatatcattaggatttaactccttgactatcatggcggcgccagaaattaccatcaaaagcattaatacagttataccgatcgcagttagaacggttatagcatccaccatttatatctaaaaattagatcaaagaatatgtgacaaagtcctagttgtatactgagaattgacgaaacaatgtttcttacatatttttttcttattagtaaccgacttaatagtaggaactggaaaactagacttgattattctataagtatagatacccttccaaataatattctctttgataaaagttccagaaaatgtagaattttttaaaaagttatcttttgctattaccaagattgtgtttagacgcttattattaatatgagtgatgaaatccacaccgcctctagatatcgcctttatttccacattagatggtaaatccaatagtgaaactatctttttaggaatgtatggactcgcgtttagaggagtaaacgtcttaggcgtcggaaaggatgattcatcaaacgaataaacaatttcacaaatggatgttaatgtattagtaggaaattttttgacgctattggaattgaagattctaatggatgatgttctacctatttcatccgataacatgttaatttccgacaccaacggttttaatatttcgatgatatacggtagtctctctttcggacttatatagcttattccacaatacgagtcattatatactccaaaaaacaaaataactagtataaaatctgtatcgaatgggaaaaacgaaattatcgacataggtatagaatccggaacattgaacgtattaatacttaattctttttctgtggtaagtaccgataggttattgacattgtatggttttaaatattctataacttgagacttgatagatattagtgatgaattgaaaattatttttatcaccacgtgtgtttcaggatcatcgtcgacgcccgtcaaccaaccgaacggagtaaaataaatatcattaatatatgctctagatattagtatttttatcaatcctttgattatcatcttctcgtaggcgaatgattccatgatcaagagtgatttaagaacatcctccggagtattaatgggcttagtaaacagtccatcgttgcaataataaaagttatccaagttaaaggatattatgcattcgtttaaagatatcacctcatctgacggagacaattttttggtaggttttagagactttgaagctacttgtttaacaaagttattcatcgtcgtctactattctatttaattttgtagttaatttatcacatatcacattaattgactttttggtccacttttccatacgtttatattcttttaatcctgcgttatccgtttccgttatatccagggatagatcttgcaagttaaatagaatgctcttaaataatgtcattttcttatccgctaaaaatttaaagaatgtataaacctttttcagagatttgaaactcttaggtggtgtcctagtacacaatatcataaacaaactaataaacattccacattcagattccaacagctgattaacttccacattaatacagcctattttcgctccaaatgtacattcgaaaaatctgaataaaacatcgatgtcacaatttgtattatccaatacagaatgtttgtgattcgtgttaaaaccatcggagaaggaatagaaataaaaattattatagtggtggaattcagttggaatattgcctccggagtcataaaaggatactaaacattgttttttatcataaattacacatttccaatgagacaaataacaaaatccaaacattacaaatctagaggtagaacttttaattttgtctttaagtatatacgataagatatgtttattcataaacgcgtcaaatttttcatgaatcgctaaggagtttaagaatctcatgtcaaattgtcctatataatccacttcggatccataagcaaactgagagactaagttcttaatacttcgattgctcatccaggctcctctctcaggctctattttcatcttgacgacctttggattttcaccagtatgtattcctttacgtgataaatcatcgattttcaaatccatttgtgagaagtctatcgccttagatactttttcccgtagtcgaggtttaaaaaaatacgctaacggtatactagtaggtaactcaaagacatcatatatagaatggtaacgcgtctttaactcgtcggttaactctttcttttgatcgagttcgtcgctactattgggtctgctcaggtgccccgactctactagttccaacatcataccgataggaatacaagacactttgccggcggttgtagatttatcatatttttccactacatatccgttacaatttgttaaaaatttagatacatctatattgctacataatccagctagtgaatatatatgacataataaattggtaaatcctagttctggtattttactaattactaaatctgtatatctttccatttatcatggaaaagaatttaccagatatcttcttttttccaaactgcgttaatgtattctcttacaaatattcacaagatgaattcagtaatatgagtaaaacggaacgtgatagtttctcattggccgtgtttccagttataaaacatagatggcataacgcacacgttgtaaaacataaaggaatatacaaagttagtacagaagcacgtggaaaaaaagtatctcctccatcactaggaaaacccgcacacataaacctaaccgcgaagcaatatatatacagtgaacacacaataagctttgaatgttatagttttctaaaatgtataacaaatacagaaatcaattcgttcgatgagtatatattaagaggactattagaagctggtaatagtttacagatattttccaattccgtaggtaaacgaacagatactataggtgtactagggaataagtatccatttagcaaaattccattggcctcattaactcctaaagcacaacgagagatattttcagcgtggatttctcatagacctgtagttttaactggaggaactggagtgggtaagacgtcacaggtacccaagttattgctttggtttaattatttatttggtggattctctactctagataaaatcactgactttcacgaaagaccagtcattctatctcttcctaggatagctttagttagattgcatagcaataccattttaaaatcattgggatttaaggtactagatggatctcctatttctttacggtacggatctataccggaagaattaataaacaaacaaccaaaaaaatatggaattgtattttctacccataagttatctctaacaaaactatttagttatggcactcttattatagacgaagttcatgagcatgatcaaataggagatattattatagcagtagcgagaaagcatcatacgaaaatagattctatgtttttaatgactgccacgttagaggatgacagggaacggctaaaagtatttttacctaatcccgcatttatacatattcctggagatacactgtttaaaattagcgaggtatttattcataataagataaatccatcttccagaatggcatacatagaagaagaaaagagaaatttagttactgctatacagatgtatactcctcctgatggatcatccggtatagtctttgtggcatccgttgcacagtgtcacgaatataaatcatatttagaaaaaagattaccgtatgatatgtatattattcatggtaaggtcttagatatagacgaaatattagaaaaagtgtattcatcacctaatgtatcgataattatttctactccttatttggaatccagcgttactatacgcaatgttacacacatttatgatatgggtagagtttttgtccccgctccttttggaggatcgcaacaatttatttctaaatctatgagagatcaacgaaaaggaagagtaggaagagttaatcctggtacatacgtctatttctatgatctgtcttatatgaagtctatacagcgaatagattcagaatttctacataattatatattgtacgctaataagtttaatctaacactccccgaagatttgtttataatccctacaaatttggatattctatggcgtacaaaggaatatatagactcgttcgatattagtacagaaacatggaataaattattatccaattattatatgaagatgatagagtatgctaaactttatgtactaagtcctattctcgctgaggagttggataactttgagaggacgggagaattaactagtattgtacgagaagccattttatctctaaatttacaaattaagattttaaattttaaacataaagatgatgatacgtatatacacttttgtaaaatattattcggtgtctataacggaacaaacgctactatatattatcatagacctctaacgggatatatgaatatgatttcagatactatatttgttcctgtagataataactaaaaatcaaactctaatgaccacatctttttttagagatgaaaaattttccacatctccttttgtagacacgactaaacattttgcagaaaaaagtttattagtgtttagataatcgtatacttcatcagtgtagatagtaaatgtgaacagataaaaggtattcttgctcaatagattggtaaattccatagaatatattaatcctttcttcttgagatcccacatcatttcaaccagagacgttttatccaatgatttacctcgtactataccacatacaaaactagattttgcagtgacgtcgtacctggtattcctaccaaacaaaattttacttttagttcttttagaaaattctaaggtagaatctctatttgccaatatgtcatctatggaattaccactagcaaaaaatgatagaaatatatattgatacatcgcagctggttttgatctactatactttaaaaacgaatcagattccataattgcctgtatatcatcagctgaaaaactatgttttacacgtattccttcggcatttctttttaatgatatatcttgtttagacaatgataaagttatcatgtccatgagagacgcgtctccgtatcgtataaatatttcattagatgttagacgcttcattaggggtatacttctataaggtttcttaatcagtccatcattggttgcgtcaagaactactatcggatgttgttgggtatctctagtgttacacatggccttactaaagtttgggtaaataactatgatatctctattaattatagatgcatatatttcattcgtcaaggatattagtatcgacttgctatcgtcattaatacgtgtaatgtaatcatataaatcatgcgatagccaaggaaaatttaaatagatgttcatcatataatcgtcgctataattcatattaatacgttgacattgactaatttgtaatatagcctcgccacgaagaaagctctcgtattcagtttcatcgataaaggataccgttaaatataactggttgccgatagtctcatagtctattaagtggtaagtttcgtacaaatacagaatccctaaaatattatctaatgttggattaatctttaccataactgtataaaatggagacggagtcataactattttaccgtttgtacttactggaatagatgaaggaataatctccggacatgctggtaaagacccaaatgtctgtttgaagaaatccaatgttccaggtcctaatctcttaacaaaaattacgatattcgatcccgatatcctttgcattctatttaccagcatatcacgaactatattaagattatctatcatgtctattctcccaccgttatataaatcgcctccgctaagaaacgttagtatatccatacaatggaatacttcatttctaaaatagtattcgttttctaattctttaatgtgaaatcgtatactagaaagggaaaaattatctttgagttttccgttagaaaagaaccacgaaactaatgttctgattgcgtccgattccgttgctgaattaatggatttacaccaaaaactcatataacttctagatgtagaagcattcgctaaaaaattagtagaatcaaaggatataagtagatgttccaacaagtgagcaattcccaagatttcatctatatcattctcgaatccgaaattagaaattcccaagtagatatcctttttcatccgatcgttgatgaaaatacgaactttattcggtaagacaatcatttactaaggagtaaaataggaagtaatgttcgtatgtcgttatcatcgtataaattaaaggtgtgttttttaccattaagtgacattataattttaccaatattggaattataatataggtgtatttgcgcactcgcgacggttgatgcatcggtaaatatagctgtatctaatgttctagtcggtatttcatcatttcgctgtctaataatagcgttttctctatctgtttccattacagctgcctgaagtttattggtcggataatatgtaaaataataagaaatacatacgaataacaaaaataaaataagatataataaagatgccatttagagatctaattttgtttaacttgtccaaattcctacttacagaagatgaggaatcgttggagatagtgtcttccttatgtagaggatttgaaatatcttataatgacttgataacttactttccagataggaaataccataaatatatttataaagtatttgaacatgtagatttatcggaggaattaagtatggaattccatgatacaactctgagagatttagtctatcttagattgtacaagtattccaagtgtatacggccgtgttataaattaggagataatctaaaaggcatagttgttataaaggacaggaatatttatattagggaagcaaatgatgacttgatagaatatctcctcaaggaatacactcctcagatttatacatattctaatgagcgcgtccccataactggttcaaaattaattctttgtggattttctcaagttacatttatggcgtatacaacgtcgcatataacaacaaataaaaaggtagatgttctcgtttccaaaaaatgtatagatgaactagtcgatccaataaattatcaaatacttcaaaatttatttgataaaggaagcggaacaataaacaaaatactcaggaagatattttattcggtaacaggtggccaaactccataggtagctttttctatttcggattttagaatttccaaattcaccagcgatttatcggttttggtgaaatccaaggatttattaatgtccacaaatgccatttgttttgtctgtggattgtatttgaaaatggaaacgatgtagttagatagatgcgctgcgaagtttcctattagggttccgcgcttcacgtcacccagcatacttgaatcaccatcctttaaaaaaaatgataagatatcaacatggagtatatcatactcgaattttaattcttctactgactcactgacattttcacaaatactacaatacggtttaccgaaaataatcagtacgttcttcatttatgggtatcaaaaacttaaaatcgttactgctggaaaataaatcactgacgatattagatgataatttatacaaagtatacaatggaatatttgtggatacaatgagtatttatatagccgtcgccaattgtgtcagaaacttagaagagttaactacggtattcataaaatacgtaaacggatgggtaaaaaagggagggcatgtaaccctttttatcgatagaggaagtataaaaattaaacaagacgttagagacaagagacgtaaatattctaaattaaccaaggacagaaaaatgttagaattagaaaagtgtacatccgaaatacaaaatgttaccggatttatggaagaagaaataaaggcagaaatgcaattaaaaatcgataaactcacatttcaaatatatttatctgattctgataacataaaaatatcattgaatgagatactaacacatttcaacaataatgagaatgttacattattttattgtgatgaacgagacgcagaattcgttatgtgtctcgaggctaaaacacatttctctaccacaggagaatggccgttgataataagtaccgatcaggatactatgctatttgcatctgctgataatcatcctaagatgataaaaaacttaactcaactgtttaaatttgttccctcggcagaggataactatttagcaaaattaacggcgttagtgaatggatgtgatttctttcctggactctatggggcatctataacacccaccaacttaaacaaaatacaattgtttagtgattttacaatcgataatatagtcactagtttggcaattaaaaattattatagaaagactaactctaccgtagacgtgcgtaatattgttacgtttataaacgattacgctaatttagacgatgtctactcgtatattcctccttgtcaatgcactgttcaagaatttatattttccgcattagatgaaaaatggaatgaatttaaatcatcttatttagaaagcgtgccgttaccctgccaattaatgtacgcgttagaaccacgcaaggagattgatgtttcagaagttaaaactttatcatcttatatagatttcgaaaatactaaatcagatatcgatgttataaaatctatatcctcgatcttcggatattctaacgaaaactgtaacacgatagtattcggcatctataaggataatttactactgagtataaataattcattttactttaacgatagtctgttaataaccaatactaaaagtgataatataataaatataggttactagattaaaaatggtgttccaactcgtgtgctctacatgcggtaaagatatttctcacgaacgatataaattgattatacgaaaaaaatcattaaaggatgtactcgtcagtgtaaagaacgaatgttgtaggttaaaattatctacacaaatagaacctcaacgtaacttaacagtgcaacctctattggatataaactaatatggatccggttaattttatcaagacatatgcgcctagaggttctattatttttattaattataccatgtcattaacaagtcatttgaatccatcgatagaaaaacatgtgggtatttattatggtacgttattatcggaacacttggtagttgaatctacctatagaaaaggagttcgaatagtcccattggatagtttttttgaaggatatcttagtgcaaaagtatacatgttagagaatattcaagttatgaaaatagcagctgatacgtcattaactttattgggtattccgtatggatttggtcatgatagaatgtattgttttaaattggtagctgactgttataaaaatgccggtattgatacatcgtctaaacgaatattgggcaaagatatttttctgagccaaaacttcacagacgataatagatggataaagatatatgattctaataatttaacattttggcaaattgattaccttaaagggtgagttaatatgcataactactcctccgttgttttttccctcgttctttttcttaacgttgtttgccatcactctcataatgtaaagatattctaaaatggtaaacttttgcatatcggacgcagaaattggtataaatgttgtaattgtattatttcccgtcaatggactagtcacagctccatcagttttatatcctttagagtatttctcactcgtgtctaacattctagagcattccatgatctgtttatcgttgatattggccggaaagatagattttttattttttattatattactattggcaattgtagatataacttctggtaaatatttttctaccttttcaatctcttctattttcaagccggctatatattctgctatattgttgctagtatcaataccttttctggctaagaagtcatatgtggtattcactatatcagttttaactggtagttccattagcctttccacttctgcagaataatcagaaattggttctttaccagaaaatccagctactataataggctcaccgatgatcattggcaaaatcctatattgtaccagattaatgagagcatatttcatttccaataattctgctagttcttgagacattgatttatttgatgaatctagttggttctctagatactctaccatttctgccgcatacaataacttgttagataaaatcagggttatcaaagtgtttagcgtggctagaatagtgggcttgcatgtattaaagaatgcggtagtatgagtaaaccgttttaacgaattatatagtctccagaaatctgtggcgttacatacatgagccgaatgacatcgaagattgtccaatatttttaatagctgctctttgtccattatttctatatttgactcgcaacaattgtagataccattaatcaccgattcctttttcgatgccggacaatagcacaattgtttagctttggactctatgtattcagaattaatagatatatctctcaatacagattgcactatacattttgaaactatgtcaaaaattgtagaacgacgctgttctgcagccatttaactttaaataatttacaaaaatttaaaatgagcatccgtataaaaatcgataaactgcgccaaattgtggcatatttttcagagttcagtgaagaagtgtctataaatgtagactcgacggatgagttaatgtatatttttgccgccttgggcggatctgtaaacatttgggcaattatacctctaagtgcatcagtgttttaccgaggagccgaaaatattgtgtttaatcttcctgtgtccaaggtaaaatcgtgtttgtgtagttttcacaatgatgccatcatagatatagaacctgatctggaaaataatctagtaaaactttctagttatcatgtagtaagtgtcgattgtaacaaggaactgatgcctattaggacagatactactatttgtctaagtatagatcaaaagaaatcttacgtgtttaattttcacaagtatgaagaaaaatgttgtggtagaaccgtcattcatctagaatggttgttgggctttatcaagtgtattagtcagcatcagcatctggctattatgtttaaagatgacaatattattatgaagactcctggtaatactgatgcgttttccagggaatattctatgactgaatgttctcaagaactacaaaagttttctttcaaaatagctatctcgtctctcaacaaactacgaggattcaaaaagagagtcaatgtttttgaaactagaatcgtaatggataatgacgataacattttaggaatgttgttttcggatagagttcaatcctttaagatcaacatctttatggcgtttttagattaatactttcaatgagataaatatgggtggcggagtaagtgttgagctccctaaacgggatccgcctccgggagtacccactgatgagatgttattaaacgtggataaaatgcatgacgtgatagctcccgctaagcttttagaatatgtgcatataggaccactagcaaaagataaagaggataaagtaaagaaaagatatccagagtttagattagtcaacacaggacccggtggtctttcggcattgttaagacaatcgtataatggaaccgcacccaattgctgtcgcacttttaatcgtactcattattggaagaaggatggaaagatatcagataagtatgaagagggtgcagtattagaatcgtgttggccagacgttcacgacactggaaaatgcgatgttgatttattcgactggtgtcagggggatacgttcgatagaaacatatgccatcagtggatcggttcagcctttaataggagtaatagaactgtagagggtcaacaatcgttaataaatctgtataataagatgcaaacattatgtagtaaagatgctagtgtaccaatatgcgaatcatttttgcattatttacgcgcacacaatacagaagatagcaaagagatgatcgattatattctaagacaacagtctgcggactttaaacagaaatatatgagatgtagttatcccactagagataagttagaagagtcattaaaatatgcggaacctcgagaatgttgggatccagagtgttcgaatgccaatgttaatttcttactaacacgtaattataataatttaggactttgcaatattgtacgatgtaataccagcgtgaacaacttacagatggataaaacttcctcattaagattgtcatgtggattaagcaatagtgatagattttctactgttcccgtcaatagagcaaaagtagttcaacataatattaaacactcgttcgacctaaaattgcatttgatcagtttattatctctcttggtaatatggatactaattgtagctatttaaatgggtgccgcggcaagcatacagacgacggtgaatacactcagcgaacgtatctcgtctaaattagaacaagaagcgaacgctagtgctcaaacaaaatgtgatatagaaatcggaaatttttatatccgacaaaaccatggatgtaacctcactgttaaaaatatgtgctctgcggacgcggatgctcagttggatgctgtgttatcagccgctacagaaacatatagtggattaacaccggaacaaaaagcatacgtgccagctatgtttactgctgcgttaaacattcagacgagtgtaaacactgttgttagagattttgaaaattatgtgaaacagacttgtaattctagcgcggtcgtcgataacaaattaaagatacaaaacgtaatcatagatgaatgttacggagccccaggatctccaacaaatttggaatttattaatacaggatctagcaaaggaaattgtgccattaaagcgttgatgcaattgacgactaaggccactactcaaatagcacctagacaagttgctggtacaggagttcagttttatatgattgttatcggtgttataatattggcagcgttgtttatgtactatgccaagcgtatgttgttcacatccaccaatgataaaatcaaacttattttagccaataaggaaaacgtccattggactacttacatggacacattctttagaacttctccgatggttattgctaccacggatatgcaaaactgaaaatatattgataatattttaatagattaacatggaagttatcgctgatcgtctagacgatatagtgaaacaaaatatagcggatgaaaaatttgtagattttgttatacacggtctagagcatcaatgtcctgctatacttcgaccattaattaggttgtttattgatatactattatttgttatagtaatttatatttttacggtacgtctagtaagtagaaattatcaaatgttgttggtggtgctagtcatcacattaactattttttattactttatactataatagtactagactgacttctaacaaacatctcacctgccataaataaatgcttgatattaaagtcttctatttctaacactattccatctgtggaaaataatactctgacattatcgctaattgacacatcggtgagtgatatgcctataaagtaataatcttctttgggcacatataccagtgtaccaggttctaacaacctatttactggtgctcctgtagcatactttttctttaccttgagaatatccatcgtttgcttggtcaatagcgatatgtgattttttatcaaccactcaaaaaagtaattggagtgttcatatcctctacgggctattgtctcatggccgtgtatgaaatttaagtaacacgactgtggtagatttgttctatagagccgattgccgcaaatagatagaactaccaatatgtctgtacaaatgttaaacattaattgattaacagaaaaaacaatgttcgttctgggaatagaaaccagatcaaaacaaaattcgttagaatatatgccacgtttatacatggaatataaaataactacagtttgaaaaataacagtatcatttaaacatttaacttgcggggttaatctcacaactttactgtttttgaactgttcaaaatatagcatcgatccgtgagaaatacgtttagccgcctttaatagaggaaatcccaccgcctttctggatctcaccaacgacgatagttctgaccagcaactcatttcttcatcatccacctgttttaacatataataggcaggagatagatatccgtcattgcaatattccttctcgtaggcacacaatctaatattgataaaatctccattctcttctctgcatttattatcttgtctcggtggctgattaggctgtggtcttggtttaggccttggtctatcgttgttgaatctattttggtcattaaatctttcatttcttcctggtatatttctatcacctcgtttggttggatttttgtctatattatcgtttgtaacatcggtacgggtattcatttatcacaaaaaaaacttctctaaatgagtctactgctagaaaacctcatcgaagaagataccatattttttgcaggaagtatatctgagtatgatgatttacaaatggttattgccggcgcaaaatccaaatttccaagatctatgctttctatttttaatatagtacctagaacgatgtcaaaatatgagttggagttgattcataacgaaaatatcacaggagcaatgtttaccacaatgtataatataagaaacaatttgggtctaggagatgataaactaactattgaagccattgaaaactatttcttggatcctaacaatgaagttatgcctcttattattaataatacggatatgactgccgtcattcctaaaaaaagtggtaggagaaagaataagaacatggttatcttccgtcaaggatcatcacctatcttgtgcattttcgaaactcgtaaaaagattaatatttataaagaaaatatggaatccgcgtcgactgagtatacacctatcggagacaacaaggctttgatatctaaatatgcgggaattaatgtcctgaatgtgtattctccttccacatccataagattgaatgccatttacggattcaccaataaaaataaactagagaaacttagtactaataaggaactagaatcgtatagttctagccctcttcaagaacccattaggttaaatgattttctgggactattggaatgtgttaaaaagaatattcctctaacagatattccgacaaaggattgattactataaatggagaatgttcctaatgtatactttaatcctgtgtttatagagcccacgtttaaacattctttattaagtgtttataaacacagattaatagttttatttgaagtattcgttgtattcattctaatatatgtattttttagatctgaattaaatatgttcttcatgcctaaacgaaaaatacccgatcctattgatagattacgacgtgctaatctagcgtgtgaagacgataaattaatgatctatggattaccatggatgacaactcaaacatctgcgttatcaataaatagtaaaccgatagtgtataaagattgtgcaaagcttttgcgatcaataaatggatcacaaccagtatctcttaacgatgttcttcgcagatgatgattcattttttaagtatttggctagtcaagatgatgaatcttcattatctgatatattgcaaatcactcaatatctagactttctgttattattattgatccaatcaaaaaataaattagaagctgtgggtcattgttatgaatctctttcagaggaatacagacaattgacaaaattcacagactttcaagattttaaaaaactgtttaacaaggtccctattgttacagatggaagggtcaaacttaataaaggatatttgttcgactttgtgattagtttgatgcgattcaaaaaagaatcctctctagctaccaccgcaatagatcctgttagatacatagatcctcgtcgcaatatcgcattttctaacgtgatggatatattaaagtcgaataaagtgaacaataattaattctttattgtcatcatgaacggcggacatattcagttgataatcggccccatgttttcaggtaaaagtacagaattaattagacgagttagacgttatcaaatagctcaatataaatgcgtgactataaaatattctaacgataatagatacggaacgggactatggacgcatgataagaataattttgaagcattggaagcaactaaactatgtgatgtcttggaatcaattacagatttctccgtgataggtatcgatgaaggacagttctttccagacattgtttaattctgtgagcgtatggcaaacggtaccgagctcggtttggaattagtgaaagcttaaaaattgaaattttattttttttttttggaatataaataagctcgaagtcgaccaccatgagtgctcctaaactcctctctctgggctgtatcttcttccccttgctactttttcagcaggcccgggctcaattcccaagacagtgtgccactgttgaggctttgagaagtggtatgtgttgcccagacctgtcccctgtgtctgggcctgggacagaccgctgtggctcatcatcagggaggggcagatgtgaggcagtgactgcagactcccggccccacagccctcagtatccccatgatggcagagatgatcgggaggtctggcccttgcgcttcttcaataggacatgtcactgcaacggcaatttctcaggacacaactgtgggacgtgccgtcctggctggagaggagctgcctgtgaccagagggttctcatagtcaggagaaatcttctggacttaagtaaagaagaaaagaaccactttgtccgggccctggatatggcaaagcgcacaactcaccctttatttgtcattgccaccaggagatcagaagaaatactggggccagatggcaacacgccacaatttgagaacatttccatttataactactttgtttggacacactattactcagtcaaaaagactttccttggggtaggacaggaaagctttggtgaagtggatttctctcatgagggaccagcttttctcacatggcacaggtaccacctcctgcgtctggagaaagacatgcaggaaatgttgcaagagccttctttctcccttccttactggaattttgcaacggggaaaaatgtctgtgatatctgcacggatgacttgatgggatccagaagcaactttgattccactctaataagcccaaactctgtcttttctcaatggcgagtggtctgtgactccttggaagattatgataccctgggaacactttgtaacagcaccgaggatgggccaattaggagaaatccagctggaaatgtggccagaccaatggtgcaacgtcttcctgaaccacaggatgtcgctcagtgcttggaagttggtttatttgacacgcctcctttttattccaactctacaaacagtttccgaaacacagtggaaggttacagtgaccccacgggaaagtatgaccctgctgttcgaagtcttcacaatttggctcatctattcctgaatggaacagggggacaaacccatttgtctccaaatgatcctatttttgtcctcctgcacaccttcacagatgcagtctttgatgaatggctgaggagatacaatgctgatatatccacatttccattggaaaatgcccctattggacataatagacaatacaacatggtgccattctggcccccagtcaccaacacagaaatgtttgttactgctccagacaacctgggatacacttatgaaattcaatggccaagtcgggagtttagtgtacctgagataattgccatagcagtagttggcgctttgttactggttgcactcatttttgggactgcttcttatctgattcgtgccagacgcagtatggatgaagctaaccagcctctcctcactgatcagtatcaatgctatgctgaagaatatgaaaaactccagaatcctaatcagtctgtggtctaattaattaatttttatcgatctaattcaacaatgtctggagagctcggtttggaattagtgaaagcttaaaaattgaaattttattttttttttttggaatataaataagctcgaagtcgaccaccatgttcttggctgttttgtattgccttctgtggagtttccagatctctgatggccattttcctcgagcctgtgcctcctctaagaacttgttggcaaaagaatgctgcccaccatggatgggtgatgggagtccctgcggccagctttcaggcagaggttcctgccaggatatccttctgtccagtgcaccatctggacctcagttccccttcaaaggggtggatgaccgtgagtcctggccctctgtgttttataataggacctgccagtgctcaggcaacttcatgggtttcaactgcggaaactgtaagtttggatttgggggcccaaattgtacagagaagcgagtcttgattagaagaaacatttttgatttgagtgtctccgaaaagaataagttcttttcttacctcactttagcaaaacatactatcagctcagtctatgtcatccccacaggcacctatggccaaatgaacaatgggtcaacacccatgtttaatgatatcaacatctacgacctctttgtatggatgcattactatgtgtcaagggacacactgcttgggggctctgaaatatggagggacattgattttgcccatgaagcaccagggtttctgccttggcacagacttttcttgttattgtgggaacaagaaattcgagaactaactggggatgagaacttcactgttccatactgggattggagagatgcagaaaactgtgacatttgcacagatgagtacttgggaggtcgtcaccctgaaaatcctaacttactcagcccagcatccttcttctcctcctggcagatcatttgtagcagatcagaagagtataatagccatcaggttttatgcgatggaacacctgagggaccactattacgtaatcctggaaaccatgacaaagccaaaacccccaggctcccatcttcagcagatgtggaattttgtctgagtttgacccagtatgaatctggatcaatggatagaactgccaatttcagctttagaaacacactggaaggatttgccagtccactcacagggatagcagatccttctcaaagtagcatgcacaatgccttacatatctttatgaatggaacaatgtcccaagtacagggatcggccaacgatcccatttttcttcttcaccatgcttttgtggacagtatttttgaacaatggctgcgaaggcaccgccctcttttggaagtttacccagaagccaatgcacctatcggccataacagagactcttacatggttcctttcataccgctctatagaaatggtgatttcttcataacatccaaggatctgggatatgactacagctacctccaagagtcagatccaggcttttacagaaattatattgagccttacttggaacaagccagtcgtatctggccatggcttcttggggcagcactggtgggagctgttattgctgcagctctctctgggcttagcagtaggctatgccttcagaagaagaagaagaagaagcaaccccaggaggaaaggcagccactcctcatggacaaagacgactaccacagcttgctgtatcagagccatctgtgattaattaatttttatcgatctaattcaacaatgtctggagagctcggatccttctgtgagcgtatggcaaacgaaggaaaaatagttatagtagccgcactcgatgggacatttcaacgtaaaccgtttaataatattttgaatcttattccattatctgaaatggtggtaaaactaactgctgtgtgtatgaaatgctttaaggaggcttccttttctaaacgattgggtgaggaaaccgagataaaccgagatagaaataataggaggtaatgatatgtatcaatcggtgtgtagaaagtgttacatcgactcataatattatattttttatctaaaaaactaaaaataaacattgattaaattttaatataatacttaaaaatggatgttgtgtcgttagataaaccgtttatgtattttgaggaaattgataatgagttagattacgaaccagaaagtgcaaatgaggtcgcaaaaaaactgccgtatcaaggacagttaaaactattactaggagaattattttttcttagtaagttacagcgacacggtatattagatggtgccaccgtagtgtatataggatctgctcccggtacacatatacgttatttgagagatcatttctataatttaggagtgatcatcaaatggatgctaattgacggccgccatcatgatcctattttaaatggattgcgtgatgtgactctagtgactcggttcgttgatgaggaatatctacgatccatcaaaaaacaactgcatccttctaagattattttaatttctgatgtgagatccaaacgaggaggaaatgaacctagtacggcggatttactaagtaattacgctctacaaaatgtcatgattagtattttaaaccccgtggcgtctagtcttaaatggagatgcccgtttccagatcaatggatcaaggacttttatatcccacacggtaataaaatgttacaaccttttgctccttcatattcagctgaaatgagattattaagtatttataccggtgagaacatgagactgactcgagttaccaaattagacgctgtaaattatgaaaaaaagatgtactaccttaataagatcgtccgtaacaaagtagttgttaactttgattatcctaatcaggaatatgactattttcacatgtactttatgctgaggaccgtgtactgcaataaaacatttcctactactaaagcaaaggtactatttctacaacaatctatatttcgtttcttaaatattccaacaacatcaactgaaaaagttagtcatgaaccaatacaacgtaaaatatctagcaaaaattctatgtctaaaaacagaaatagcaagagatccgtacgcggtaataaatagaaacgtactactgagatatactaccgatatagagtataatgatttagttactttaataaccgttagacataaaattgattctatgaaaactgtgtttcaggtatttaacgaatcatccataaattatactccggttgatgatgattatggagaaccaatcattataacatcgtatcttcaaaaaggtcataacaagtttcctgtaaattttctatacatagatgtggtaatatctgacttatttcctagctttgttagactagatactacagaaactaatatagttaatagtgtactacaaacaggcgatggtaaaaagactcttcgtcttcccaaaatgttagagacggaaatagttgtcaagattctctatcgccctaatataccattaaaaattgttagatttttccgcaataacatggtaactggagtagagatagccgatagatctgttatttcagtcgctgattaatcaattagtagagatgagataagaacattataataatcaataatatatcttatatcttatatcttatatcttatatcttgtttagaaaaatgctaatattaaaatagctaacgctagtaatccaatcggaagccatttgatatctataatagggtatctaatttcctgatttaaatagcggacagctatattctcggtagctactcgtttggaatcacaaacattatttacatctaatttactatctgtaatggaaacgtttcccaatgaaatggtacaatccgatacattgcattttgttatatttttttttaaagaggctggtaacaacgcatcgcttcgtttacatggctcgtaccaacaataatagggtaatcttgtatctattcctatccgtactatgcttttatcaggataaatacatttacatcgtatatcgtctttgttagcatcacagaatgcataaatttgttcgtccgtcatgataaaaatttaaagtgtaaatataactattatttttatagttgtaataaaaagggaaatttgattgtatactttcggttctttaaaagaaactgacttgataaaaatggctgtaatctctaaggttacgtatagtctatatgatcaaaaagagattaatgctacagatattatcattagtcatgttaaaaatgacgacgatatcggtaccgttaaagatggtagactaggtgctatggatggggcattatgtaagacttgtgggaaaacggaattggaatgtttcggtcactggggtaaagtaagtatttataaaactcatatagttaagcctgaatttatttcagaaattattcgtttactgaatcatatatgtattcactgcggattattgcgttcacgagaaccgtattccgacgatattaacctaaaagagttatcgggacacgctcttaggagattaaaggataaaatattatccaagaaaaagtcatgttggaacagtgaatgtatgcaaccgtatcaaaaaattactttttcaaagaaaaaggtttgtttcgtcaacaagttggatgatattaacgttcctaattctctcatctatcaaaagttaatttctattcatgaaaagttttggccattattagaaattcatcaatatccagctaacttattttatacagactactttcccatccctccgttgattattagaccggctattagtttttggatagatagtatacccaaagagaccaatgaattaacttacttattaggtatgatcgttaagaattgtaacttgaatgctgatgaacaggttatccagaaggcggtaatagaatacgatgatattaaaattatttctaataacactaccagtatcaatttatcatatattacatccggcaaaaataatatgattagaagttatatcgtcgcccgacgaaaagatcagaccgctagatctgtaattggtcccagtacatctatcaccgttaatgaggtaggaatgcccgcatatattagaaatacacttacagaaaagatatttgttaatgcctttacagtggataaagttaaacaactattagcgtcaaaccaagttaaattttactttaataaacgattaaaccaattaacaagaatacgccaaggaaagtttattaaaaataaaatacatttattgcctggtgattgggtagaagtagctgttcaagaatatacaagtattatttttggaagacagccgtctctacatagatacaacgtcatcgcttcatctatcagagctaccgaaggagatactatcaaaatatctcccggaattgccaactctcaaaatgctgatttcgacggggatgaggaatggatgatattagaacaaaatcctaaagctgtaattgaacaaagtattcttatgtatccgacgacgttactcaaacacgatattcatggagcccccgtttatggatctattcaagatgaaatcgtagcagcgtattcattgtttaggatacaagatctttgtttagatgaagtattgaacatcttggggaaatatggaagagagttcgatcctaaaggtaaatgtaaattcagcggtaaagatatctatacttacttgataggtgaaaagattaattatccgggtctcttaaaggatggtgaaattattgcaaacgacgtagatagtaattttgttgtggctatgaggcatctgtcattggctggactcttatccgatcataagtcgaacgtggaaggtatcaactttattatcaagtcatcttatgtttttaagagatatctatctatttacggttttggggtgacattcaaagatctgagaccaaattcgacgttcactaataaattggaggccatcaacgtagaaaaaatagaacttatcaaagaagcatacgccaaatatctcaacgatgtaagagacgggaaaatagttccattatctaaagctttagaggcggactatgtggaatccatgttatccaacttgacaaatcttaatatccgagagatagaagaacatatgagacaaacgctgatagatgatccagataataacctcctgaaaatggccaaagcgggttataaagtaaatcccacagaactaatgtatattctaggtacgtatggacaacaaaggattgatggtgaaccagcagagactcgagtattgggtagagttttaccttactatcttccagactctaaggatccagaaggaagaggttacattcttaattctttaacaaaaggattaacgggttctcaatattacttttcgatgctggttgccagatctcaatctactgatatcgtctgtgaaacatcacgtaccggaacactggctagaaaaatcattaaaaagatggaggatatggtggtcgacggatacggacaagtagttataggtaatacgctcatcaagtacgccgccaattataccaaaattctaggctcagtatgtaaacctgtagatcttatctatccagatgagtccatgacttggtatttggaaattagtgctctgtggaataaaataaaacagggattcgtttactctcagaaacagaaacttgcaaagaagacattggcgccgtttaatttcctagtattcgtcaaacccaccactgaggataatgctattaaggttaaggatctgtacgatatgattcataacgtcattgatgatgtgagagagaaatacttctttacggtatctaatatagattttatggagtatatattcttgacgcatcttaatccttctagaattagaattacaaaagaaacggctatcactatctttgaaaagttctatgaaaaactcaattatactctaggtggtggaactcctattggaattatttctgcacaggtattgtctgagaagtttacacaacaagccctgtccagttttcacactactgaaaaaagtggtgccgtcaaacaaaaacttggtttcaacgagtttaataacttgactaatttgagtaagaataagaccgaaattatcactctggtatccgatgatatctctaaacttcaatctgttaagattaatttcgaatttgtatgtttgggagaattaaatccaaacatcactcttcgaaaagaaacagataaatatgtagtagatataatagtcaatagattatacatcaagagagcagaaataaccgaattagtcgtcgaatatatgattgaacgatttatctcctttagcgtcattgtaaaggaatggggtatggagacattcattgaggacgaggataatattagatttactgtctacctaaatttcgttgaaccggaagaattgaatcttagtaagtttatgatggttcttccgggggcagccaacaagggaaagattagtaaattcaagattcctatctctgattatacgggatatgacgacttcaatcaaacaaaaaagctcaataagatgactgtagaactcatgaatctaaaagaattgggttctttcgatttggaaaacgtcaacgtgtatcctggagtatggaatacatacgatatcttcggtatcgaggccgctcgtgaatacttgtgcgaagccatgttaaacacctatggagaagggttcgattatctgtatcagccttgtgatcttctcgctagtttactatgtgctagttacgaaccagaatcagtgaataaattcaagttcggcgcagctagtactcttaagagagctacgttcggagacaataaagcattgttaaacgcggctcttcataaaaagtcagaacctattaacgataatagtagctgccacttttttagcaaggtccctaatataggaactggatattacaaatactttatcgacttgggtcttctcatgagaatggaaaggaaactatctgataagatatcttctcaaaagatcaaggaaatggaagaaacagaagacttttaattcttatcaataacatatttttctatgatctgtcttttaaacgatggattttccacaaatgcgcctctcaagtccctcatagaatgatacacgtataaaaaatatagcataggcaatgactccttatttttagacattagatatgccaaaatcatagccccgcttctatttactcccgcagcacaatgaaccaacacgggctcgtttcgttgatcacatttagataaaaaggcggttacgtcgtcaaaatatttactaatatcggtagttgtatcatctaccaacggtatatgaataatattaatattagagttaggtaatgtatatttatccatcgtcaaatttaaaacatatttgaacttaacttcagatgatggtgcatccatagcatttttataatttcccaaatacacattattggttacccttgtcattatagtgggagatttggctttgtgcatatctccagttgaacgtagtagtaagtatttatacaaacttttcttatccatttataacgtacaaatggataaaactactttatcggtaaacgcgtgtaatttagaatacgttagagaaaaggctatagtaggcgtacaagcagccaaaacatcaacacttatattctttgttattatattggcaattagtgcgctattactctggtttcagacgtctgataatccagtctttaatgaattaacgagatatatgcgaattaaaaatacggttaacgattggaaatcattaacggatagcaaaacaaaattagaaagtgatagaggtagacttctagccgctggtaaggatgatatatttgaattcaaatgtgtggatttcggcgcctattttatagctatgcgattggataagaaaacatatctgccgcaagctattaggcgaggtactggagacgcgtggatggttaaaaaggcggcaaaggtcgatccatctgctcaacaattttgtcagtatttgataaaacacaagtctaataatgttattacttgtggtaatgagatgttaaatgaattaggttatagcggttattttatgtcaccgcattggtgttccgattttagtaatatggaatagtgttagataaatgcggtaacgaatgttcctgtaaggaaccataacagcttagatttaacgttaaagatgagcataaacataataaacaaaattacaatcaaacttataacattaatatcaaacaatccaaaaaatgaaatcagtggagtagtaaacgcgtacataactcctggataacgtttagcagctgccgttcctattctagaccaaaaattcggtttcatgttttcgaaacggtattctgcaacaagtcgaggatcgtgttctacatatttggcggcattatccagtatctgcctattgatcttcatttcgttttcgattctggctatttcaaaataaaatcccgatgatagacctccagactttataatttcatctacgatgttcagcgccgtagtaactctaataatataggctgataagctaacatcataccctcctgtatatgtgaatatggcatgatttttgtccattacaagctcggttttaactttattgcctgtaataatttctctcatctgtaggatatctatttttttgtcatgcattgccttcaagacgggacgaagaaacgtaatatcctcaataacgttatcgttttctacaataactacatattctacctttttattttctaactcggtaaaaaaattagaatcccatagggctaaatgtctagcgatatttcttttcgtttcctctgtacacatagtgttacaaaaccctgaaaagaagtgagtatacttgtcatcatttctaatgtttcctccagtccactgtataaacgcataatccttgtaatgatctggatcatccttgactaccacaacatttcttttttctggcataacttcgttgtcctttacatcatcgaacttctgatcattaatatgctcatgaacattaggaaatgtttctgatggaggtctatcaataactggcacaacaataacaggagttttcaccgccgccatttagttattgaaattaatcatatacaactctttaatacgagttatattttcgtctatccattgtttcacattgacatatttcgacaaaaagatataaaatgcgtattccaatgcttctctgtttaatgaattactaaaatatacaaacacgtcactgtctggcaataaatgatatcttagaatattgtaacaatttattttgtattgcacatgttcgtgatctatgagttcttcttcgaatggcataggatctccgaatctgaaaacgtataaataggagttagaataataatatttgagagtattggtaatatataaactctttagcggtataattagtttttttctctcaatttctatttttagatgtgatggaaaaatgactaattttgtagcattagtatcatgaactctaatcaaaatcttaatatcttcgtcacacgttagctctttgaagtttttaagagatgcatcagttggttctacagatggagtaggtgcaacaattttttgttctacacatgtatgtactggagccattgttttaactataatggtgcttgtatcgaaaaactttaatgcagatagcggaagctcttcgccgcgactttctacgtcgtaattgggttctaacgccgatctctgaatggatactagttttctaagttctaatgtgattctctgaaaatgtaaatccaattcctccggcattatagatgtgtatacatcggtaaataaaactatagtatccaacgatcccttctcgcaaattctagtcttaaccaaaaaatcgtatataaccacggagatggcgtatttaagagtggattcttctaccgttttgttcttggatgtcatataggaaactataaagtccgcactactgttaagaatgattactaacgcaactatatagtttaaattaagcattttggaaacataaaataactctgtagacgatacttgactttcgaataagtttgcagacaaacgaagaaagaacagacctctcttaatttcagaagaaaactttttttcgtattcctgacgtctagagtttatatcaataagaaagttaagaattagtcggttaatgttgtatttcattacccaagtttgagatttcataatattatcaaaagacatgataatattaaagataaagcgctgactatgaacgaaatagctatatggttcgctcaagaatatagtcttgttaaacgtggaaacgataactgtatttttaatcacgtcagcggcatctaaattaaatataggtatatttattccacacactctacaatatgccacaccatcttcataataaataaattcgttagcaaaattattaattttagtgaaatagttagcgtcaactttcatagcttccttcaatctaatttgatgctcacacggtgcgaattccactctaacatcccttttccatgcctcaggttcatcgatctctataatatctagttttttgcgtttcacaaacacaggctcgtctctcgcgatgagatctgtatagtaactatgtaaatgataactagatagaaagatgtagctatatagatgacgatcctttaagagaggtataataactttaccccaatcagatagactgttgttatggtcttcggaaaaagaatttttataaatttttccagtattttccaaatatacgtacttaacatctaaaaaatccttaatgataataggaatggataatccgtctattttataaagaaatacatatcgcacattatacttttttttggaaatgggaataccgatgtgtctacataaatatgcaaagtctaaatattttttagagaatcttagttggtccaaattcttttccaagtacggtaatagatttttcatattgaacggtatcttcttaatctctggttctagttccgcattaaatgatgaaactaagtcactatttttataactaacgattacatcacctctaacatcatcatttaccagaatactgatcttcttttgtcgtaaatacatgtctaatgtgttaaaaaaaagatcatacaagttatacgtcatttcatctgtggtattcttgtcattgaaggataaactcgtactaatctcttctttaacagcctgttcaaatttatatcctatatacgaaaaaatagcaaccagtgtttgatcatccgcgtcaatattctgttctatcgtagtgtataacaatcgtatatcttcttctgtgatagtcgatacgttataaaggttgataacgaaaatatttttatttcgtgaaataaagtcatcgtaggattttggacttatattcgcgtctagtagatatgcttttatttttggaatgatctcaattagaatagtctctttagagtccatttaaagttacaaacaactaggaaattggtttatgatgtataatttttttagtttttatagattctttattctatacttaaaaaatgaaaataaatacaaaggttcttgagggttgtgttaaattgaaagcgagaaataatcataaattatttcattatcgcgatatccgttaagtttgtatcgtaatggcgtggtcaattacgaataaagcggatactagtagcttcacaaagatggctgaaatcagagctcatctaaaaaatagcgctgaaaataaagataaaaacgaggatattttcccggaagatgtaataattccatctactaagcccaaaaccaaacgagccactactcctcgtaaaccagcggctactaaaagatcaaccaaaaaggaggaagtggaagaagaagtagttatagaggaatatcatcaaacaactgaaaaaaattctccatctcctggagtcagcgacattgtagaaagcgtggccgctgtagagctcgatgatagcgacggggatgatgaacctatggtacaagttgaagctggtaaagtaaatcatagtgctagaagcgatctctctgacctaaaggtggctaccgacaatatcgttaaagatcttaagaaaattattactagaatctctgcagtatcgacggttctagaggatgttcaagcagctggtatctctagacaatttacttctatgactaaagctattacaacactatctgatctagtcaccgagggaaaatctaaagttgttcgtaaaaaagttaaaacttgtaagaagtaaatgcgtgcacttttttataaagatggtaaactctttaccgataataattttttaaatcctgtatcagacgataatccagcgtatgaggttttgcaacatgttaaaattcctactcatttaacagatgtagtagtatatgaacaaacgtgggaggaggcgttaactagattaatttttgtgggaagtgattcaaaaggacgtagacaatacttttacggaaaaatgcatgtacagaatcgcaacgctaaaagagatcgtatttttgttagagtatataacgttatgaaacgaattaattgttttataaacaaaaatataaagaaatcgtccacagattccaattatcagttggcggtttttatgttaatggaaactatgttttttattagatttggtaaaatgaaatatcttaaggagaatgaaacagtagggttattaacactaaaaaataaacacatagaaataagtcccgatgaaatagttatcaagtttgtaggaaaggacaaagtttcacatgaatttgttgttcataagtctaatagactatataaaccgctattgaaactgacggatgattctagtcccgaagaatttctgttcaacaaactaagtgaacgaaaggtatacgaatgtatcaaacagtttggtattagaatcaaggatctccgaacgtatggagtcaattatacgtttttatataatttttggacaaatgtaaagtccatatctcctcttccgtcaccaaaaaagttaatagcattaactatcaaacaaactgctgaagtggtaggtcatactccatcaatttcaaaaagagcttatatggcaacgactattttagaaatggtaaaggataaaaattttttagatgtagtatctaaaactacgttcgatgaattcctatctatagtcgtagatcacgttaaatcatctacggatggatgatatagatctttacacaaataattacaagaccgataaatggaaatggataagcgtatgaaatctctcgcaatgacagctttcttcggagagctaagcacattagatattatggcattgataatgtctatatttaaacgccatccaaacaataccattttttcagtggataaggatggtcagtttatgattgatttcgaatacgataattataaggcttctcaatatttggatctgaccctcactccgatatctggagatgaatgcaagactcacgcatcgagtatagccgaacaattggcgtgtgcggatattattaaagaggatattagcgaatatatcaaaactactccccgtcttaaacgatttataaaaaaataccgcaatagatcagatactcgtatcagtcgagatacagaaaagcttaaaatagctctagctaaaggcatagattacgaatatataaaagacgcttgttaataagtaaatgaaaaaaaactagtcgtttataataaaacacgatatggatgccaacgtagtatcattttctactattgcgacgtatatagacgctttagcgaagaatgcttcggaattagaacagaggtctaccgcatacgaaataaataatgaattggaactagtatttattaagccgccattgattactttgacaaatgtagtgaatatctctacgattcaggaatcgtttattcgatttaccgttactaataaggaaggtgttaaaattagaactaagattccattatctaaggtacatggtctagatgtaaaaaatgtacagttagtagatgctatagataacatagtttgggaaaagaaatcattagtgacggaaaatcgtcttcacaaagaatgcttgttgagactatcgacagaggaacgtcatatatttttggattacaagaaatatggatcctctatccgactagaattagtcaatcttattcaagcaaaaacaaaaaactttacgatagactttaagctaaaatattttctaggatccggtgcccagtctaaaagttctttgttgcacgctattaatcatccaaagtcaaggcctaatacatctctggaaatagaattcacacctagagacaatgaaacagttccatatgatgaactaataaaggaattgacgactctctcgcgtcatatatttatggcttctccagagaatgtaattctttctccgcctattaacgcgcctataaaaacctttatgttgcctaaacaagatatagtaggtttggatctggaaaatctatatgccgtaactaagactgacggcattcctataactatcagagttacatcaaacgggttgtattgttattttacacatcttggttatattattagatatcctgttaagagaataatagattccgaagtagtagtctttggtgaggcagttaaggataagaactggaccgtatatctcattaagctaatagagcctgtgaatgcaatcaatgatagactagaagaaagtaagtatgttgaatctaaactagtggatatttgtgatcggatagtattcaagtcaaagaaatacgaaggtccgtttactacaactagtgaagtcgtcgatatgttatctacatatttaccaaagcaaccagaaggtgttattctgttctattcaaagggacctaaatctaacattgattttaaaattaaaaaggaaaatactatagaccaaactgcaaatgtagtatttaggtacatgtccagtgaaccaattatctttggagaatcgtctatctttgtagagtataagaaatttagcaacgataaaggctttcctaaagaatatggttctggtaagattgtgttatataacggcgttaattatctaaataatatctattgtttggaatatattaatacacataatgaagtgggtattaagtccgtggttgtacctattaagtttatagcagaattcttagttaatggagaaatacttaaacctagaattgataaaaccatgaaatatattaactcagaagattattatggaaatcaacataatatcatagtcgaacatttaagagatcaaagcatcaaaataggagatatctttaacgaggataaactatcggatgtgggacatcaatacgccaataatgataaatttagattaaatccagaagttagttattttacgaataaacgaactagaggaccgttgggaattttatcaaactacgtcaagactcttcttatttctatgtattgttccaaaacatttttagacgattccaacaaacgaaaggtattggcgattgattttggaaacggtgctgacctggaaaaatacttttatggagagattgcgttattggtagcgacggatccggatgctgatgctatagctagaggaaatgaaagatacaacaaattaaactctggaattaaaaccaagtactacaaatttgactacattcaggaaactattcgatccgatacatttgtctctagtgtcagagaagtattctattttggaaagtttaatatcatcgactggcagtttgctatccattattcttttcatccgagacattatgctaccgtcatgaataacttatccgaactaactgcttctggaggcaaggtattaatcactaccatggacggagacaaattatcaaaattaacagataaaaagacttttataattcataagaatttacctagtagcgaaaactatatgtctgtagaaaaaatagctgatgatagaatagtggtatataatccatcaacaatgtctactccaatgactgaatacattatcaaaaagaacgatatagtcagagtgtttaacgaatacggatttgttcttgtagataacgttgatttcgctacaattatagaacgaagtaaaaagtttattaatggcgcatctacaatggaagatagaccgtctacaaaaaactttttcgaactaaatagaggagccattaaatgtgaaggtttagatgtcgaagacttacttagttactatgttgtttatgtcttttctaagcggtaaataataatatggtatgggttctgatctcccagttctaaatgcattaaataattccaatagagcgatttttgttcctataggaccttccaactgtggatactctgtattgttaatagatatattaatacttttgtcgggtaacagaggttctacgtcttctaaaaataaaagttttataacatctggcctgttcataaataaaaacttggcgattctatatatactcttattatcaaatctagccattgtcttatagatgtgagctactgtaggtgtaccatttgattttctttctaatactatatatttctctcgaagaagttcttgcacatcatctgggaataaaatactactgttgagtaaatcagttattttttttatatcgatattgatggacatttttatagttaaggataataagtatcccaaagtcgataacgacgataacgaagtatttatacttttaggaaatcacaatgactttatcagattaaaattaacaaaattaaaggagcatgtatttttttctgaatatattgtgactccagatacatatggatctttatgcgtcgaattaaatgggtctagttttcagcacggcggtagatatatagaggtggaggaatttatagatgctggaagacaagttagatggtgttctacatccaatcatatatctaaagatatacccgaagatatgcacactgataaatttgtcatttatgatatttatacgtttgattcgttcaagaataaacgattggtattcgtacaggtacctccgtcgttaggagatgatagtcatttgactaatccgttattgtcaccgtattatcgtaattcagtagccagacaaatggtcaatgatatgatttttaatcaagattcatttttaaaatatttattagaacatctgattagaagccactatagagtttctaaacatataacaatagttagatacaaggataccgaagaattaaatctaacgagaatatgttataatagagataagtttaaggcgtttgtattcgcttggtttaacggcgtttcggaaaatgaaaaggtactagatacgtataaaaaggtatctaatttgatataatgaattcagtgactgtatcacacgcgccatatactattacttatcacgatgattgggaaccagtaatgagtcaattggtagagttttataacgaagtagccagttggctgctacgagacgagacgtcgcctattcctgataagttctttatacagttgaaacaaccgcttagaaataaacgagtatgtgtgtgtggtatagatccgtatccgaaagatggaactggtgtaccgttcgaatcaccaaattttacaaaaaaatcaattaaggagatagcttcatctatatctagattaaccggagtaattgattataaaggttataaccttaatataatagacggggttataccctggaattattacttaagttgtaaattaggagaaacaaaaagtcacgcgatttactgggataagatttccaagttactgctgcagcatataactaaacacgttagtgttctttattgtttgggtaaaacagatttctcgaatatacgggccaagttagaatccccggtaactaccatagtcggatatcatccagcggctagagaccgccaattcgagaaagatagatcatttgaaattatcaacgttttactggaattagacaacaaggcacctataaattgggctcaagggtttatttattaatgctttagtgaaattttaacttgtgttctaaatggatgcggctattagaggtaatgatgttatctttgttcttaagactataggtgtcccgtcagcgtgcagacaaaatgaagatccaagatttgtagaagcatttaaatgcgacgagttagaaagatatattgagaataatccagaatgtacactattcgaaagtcttagggatgaggaagcatactctatagtcagaattttcatggatgtagatttagacgcgtgtctagacgaaatagattatttaacggccattcaagattttattatcgaggtgtcaaactgtgtagctagattcgcgtttacagaatgcggcgccattcatgaaaatgtaataaaatccatgagatctaatttttcattgactaagtctacaaatagagataaaacaagttttcatattatctttttagatacgtataccactatggatacattgatagctatgaaacgaacactattagaattaagtagatcatctgaaaatccactaaccagatcgatagacactgccgtatataggagaaaaacaactcttcgggttgtaggtactaggaaaaatccaaattgcgacactattcatgtaatgcaaccaccgcatgataatatagaagattacctattcacttacgtggatatgaacaacaatagttattacttttctctacaacaacgattggaggatttagttcctgataagttatgggaaccagggtttatttcattcgaagacgctataaaaagagtttcaaaaatattcattaattctataataaactttaatgatctcgatgaaaataattttacaacggtaccactggtcatagattacgtaacaccttgtgcattatgtaaaaaacgatcgcataaacatccgcatcaactatcgttggaaaatggtgctattagaatttacaaaactggtaatccacatagttgtaaagttaaaattgttccgttggatggtaataaactgtttaatattgcacaaagaattttagacactaactctgttttattaaccgaacgaggagaccatatagtttggattaataattcatggaaatttaacagcgaagaacccttgataacaaaactaattttgtcaataagacatcaactacctaaggaatattcaagcgaattactctgtccaagaaaacgaaagactgtagaagctaacatacgagacatgttagtagattcagtggagaccgatacctatccggataaacttccgtttaaaaatggtgtattggacctggtagacggaatgttttactctggagatgatgctaaaaaatatacgtgtactgtatcaaccggatttaaatttgacgatacaaagttcgtcgaagacagtccagaaatggaagagttaatgaatatcattaacgatatccaaccattaacggatgaaaataagaaaaatagagagctatatgaaaaaacattatctagttgtttatgcggtgctaccaaaggatgtttaacattcttttttggagaaactgcaactggaaagtcgacaaccaaacgtttgttaaagtctgctatcggtgacctgtttgttgagacgggtcaaacaattttaacagatgtattggataaaggacctaatccatttatcgctaacatgcatttgaaaagatctgtattctgtagcgaactacctgattttgcctgtagtggatcaaagaaaattagatctgacaatattaaaaagttgacagaaccttgtgtcattggaagaccgtgtttctccaataaaattaataatagaaaccatgcgacaatcattatcgatactaattacaaacctgtttttgataggatagataacgcattaatgagaagaattgccgtcgtgcgattcagaacacacttttctcaaccttctggtagagaggctgctgaaaataatgacgcgtacgataaagtcaaactattagacgaggggttagatggtaaaatacaaaataatatatatagatttgcatttctatacttgttggtgaaatggtacaaaaaatatcatgttcctattatgaaactatatcctacacccgaagagattcctgactttgcattctatctcaaaataggtactctgttggtatctagctctgtaaagcatattccattaatgacggacctctccaaaaagggatatatattgtacgataatgtggtcactcttccgttgactactttccaacagaaaatatccaagtattttaattctagactatttggacacgatatagagagcttcatcaatagacataagaaatttgccaatgttagtgatgaatatctgcaatatatattcatagaggatatttcatctccgtaaatatatgctcatatatttatagaagatatcacatatctaaatgaataccggaatcatagatttatttgataatcatgttgatagtataccaactatattacctcatcagttagctactctagattatctagttagaactatcatagatgagaacagaagcgtgttattgttccatattatgggatcaggtaaaacaataatcgctttgttgttcgccttggtagcttccagatttaaaaaggtttacattctagtgccgaacatcaacatcttaaaaattttcaattataatatgggtgtagctatgaacttgtttaatgacgaattcatagctgagaatatctttattcattccacaacaagtttttattctcttaattataacgataacgtcattaattataacggattatctcgctacaataactctatttttatcgttgatgaggcacataatatctttgggaataatactggagaacttatgaccgtgataaaaaataaaaacaagattccttttttactattgtctggatctcccattactaacacacctaatactctgggtcatattatagatttaatgtccgaagagacgatagattttggtgaaattattagtcgtggtaagaaagtaattcagacacttcttaacgaacgcggtgtgaatgtacttaaggatttgcttaaaggaagaatatcatattacgaaatgcctgataaagatctaccaacgataagatatcacggacgtaagtttctagatactagagtagtatattgtcacatgtctaaacttcaagagagagattatatgattactagacgacagctatgttatcatgaaatgtttgataaaaatatgtataacgtgtcaatggcagtattgggacaacttaatctgatgaataatttagatactttatttcaggaacaggataaggaattgtacccaaatctgaaaataaataatggcgtgttatacggagaagaattggtaacgttaaacattagttccaaatttaaatactttattaatcggatacagacactcaacggaaaacattttatatacttttctaattctacatatggcggattggtaattaaatatatcatgctcagtaatggatattctgaatataatggttctcagggaactaatccacatatgataaacggcaaaccaaaaacatttgctatcgttactagtaaaatgaaatcgtctttagaggatctattagatgtgtataattctcctgaaaacgatgatggtagtcaattgatgtttttgttttcatcaaacattatgtccgaatcctatactctaaaagaggtaaggcatatttggtttatgactatcccagatactttttctcaatacaaccaaattcttggacgatctattagaaaattctcttacgccgatatttctgaaccagttaatgtatatcttttagccgccgtatattccgatttcaatgacgaagtgacgtcattaaacgattacacacaggatgaattaattaatgttttaccatttgacatcaaaaagctgttgtatctaaaatttaagacgaaagaaacgaatagaatatactctattcttcaagagatgtctgaaacgtattctcttccaccacatccatcaattgtaaaagttttattgggagaattggtcagacaatttttttataataattctcgtattaagtataacgataccaagttacttaaaatggttacatcagttataaaaaataaagaagacgctaggaattacatagatgatattgtaaacggtcacttctttgtatcgaataaagtatttgataaatctcttttatacaaatacgaaaacgatattattacagtaccgtttagactttcctacgaaccatttgtttggggagttaactttcgtaaagaatataacgtggtatcttctccataaaactgatgagatatataaagaaataaatgtcgagctttgttaccaatggatacctttccgttacattggaaccacacgagctgacgttagacataaaaactaatattaggaatgccgtatataagacgtatctccatagagaaattagtggtaaaatggccaagaaaatagaaattcgtgaagacgtggaattacctctcggcgaaatagttaataattctgtagttataaacgttccgtgtgtaataacctacgcgtattatcacgttggggatatagtcagaggaacattaaacatcgaagatgaatcaaatgtaactattcaatgtggagatttaatctgtaaactaagtagagattcgggtactgtatcatttagcgattcaaagtactgcttttttcgaaatggtaatgcgtatgacaatggcagcgaagtcactgccgttctaatggaggctcaacaaggtatcgaatctagttttgtttttctcgcgaatatcgtcgactcataaaaaagagaatagcggtaagtataaacacgaatactatggcaataattgcgaatgttttattctcttcgatatatttttgataatatgaaaaacatgtctctctcaaatcggacaaccatctcataaaatagttctcgcgcgctggagaggtagttgccgctcgtataatctctccagaataatatacttgcgtgtcgtcgttcaatttatacggatttctatagttctctgttatataatgcggtttgccctcatgattagacgacgacaatagtgttctaaatttagatagttgatcagaatgaatgtttattggcgttggaaaaattatccatacagcgtctgcagagtggttgatagttgttcctagatatgtaaaataatccaacttactaggcagcaaattgtctagataaaatactgaatcaaacggtgcagacgtattggcggatctaatggaatccaattgattaactatcttttgaaaatatacatttttatgatccaatacttgtaagaatatagaaataatgataagtccatcatcgtgtttttttgcctcttcataagaactatattttttcttattccaatgaacaagattaatctctccagagtatttgtacacatctatcaagtgattggatccataatcgtcttcctttccccaatatatatgtagtgatgataacacatattcattggggagaaaccctccacttatatatcctcctttaaaattaatccttactagttttccagtgttctggatagtggttggtttcgactcattataatgtatgtctaacggcttcaatcgcgcgttagaaattgcttttttagtttctatattaataggagatagttgttgcggcatagtaaaaatgaaatgataactgtttaaaaatagctcttagtatgggaattacaatggatgaggaagtgatatttgaaactcctagagaattaatatctattaaacgaataaaagatattccaagatcaaaagacacgcatgtgtttgctgcgtgtataacaagtgacggatatccgttaataggagctagaagaacttcattcgcgttccaggcgatattatctcaacaaaattcagattctatctttagagtatccactaaactattacggtttatgtactacaatgaactaagagaaatctttagacggttgagaaaaggttctatcaacaatatcgatcctcactttgaagagttaatattattgggtggtaaactagataaaaaggaatctattaaagattgtttaagaagagaattaaaagaggaaagtgatgaacgtataacagtaaaagaatttggaaatgtaattctaaaacttacaacacgggataaattatttaataaagtatatataagttattgcatggcgtgttttattaatcaatcgttggaggatttatcgcatactagtatttacaatgtagaaattagaaagattaaatcattaaatgattgtattaacgacgataaatacgaatatctgtcttatatttataatatgctagttaatagtaaatgaacttttacagatctagtataattagtcagattattaagtataatagacgactagctaagtctattatttgcgaggatgactctcaaattattacactcacggcattcgttaaccaatgcctatggtgtcataaacgagtatccgtgtccgctattttattaactactgataacaaaatattagtatgtaacagacgagatagttttctctattctgaaataattagaactagaaacatgtttagaaagaaacgattatttctgaattattccaattatttgaacaaacaggaaagaagtatactatcgtcatttttttctctagatccagctactactgataatgatagaatagacgctatttatccgggtggcatacccaaaaggggtgagaatgttccagagtgtttatccagggaaattaaagaagaagttaatatagacaattcttttgtattcatagacactcggttttttattcatggcatcatagaagataccattattaataaattttttgaggtaatcttctttgtcggaagaatatctctaacgagtgatcaaatcattgatacatttaaaagtaatcatgaaatcaaggatctaatatttttagatccgaattcaggtaatggactccaatacgaaattgcaaaatatgctctagatactgcaaaacttaaatgttacggccatagaggatgttattatgaatcattaaaaaaattaactgaggatgattgattaaaaaatataaattaatttaccatcgtgtatttttataacgggattgtccggcatatcatgtagatagttaccgtctacatcgtatactcgaccatctacgcctttaaatcctctatttattgacattaatctattagaattggaataccaaatattagtaccctcaattagtttattggtaatattttttttagacgatagatcgatggctcttgaaaccaaggttttccaaccggactcattgtcgatcggtgagaagtctttttcattagcatgaatccattctaatgatgtatgtttaaacactctaaacaattggacaaattcttttgatttgctttgaatgatttcaaataggtcttcgtctacagtaggcataccattagataatctagccattataaagtgcacgtttacatatctacgttctggaggagtaagaacgtgactattgagacgaatggctcttcctactatctgacgaagagacgcctcgttccatgtcatatctaaaatgaagatatcattaattgagaaaaaactaataccctcgcctccactagaagagaatacgcatgttttaatgcattctccgttagtgtttgattcttggttaaactcagccaccgccttgattctagtatcttttgttctagatgagaactctatattagagataccaaagactttgaaatatagtaataagatttctattcctgactgattaacaaatggttcaaagactagacatttaccatgggatgctaatattcccaaacatacatctataaatttgacgcttttctcttttaattcagtaaatagagagatatcagccgcactagcatcccctttcaatagttctccctttttaaaggtatctaatgcggatttagaaaactctctatctcttaatgaatttttaaaatcattatatagtgttgctatctcttgcgcgtattcgcccggatcacgattttgtctttcaggaaagctatcgaacgtaaacgtagtagccatacgtctcagaattctaaatgatgatatacctgtttttatttcagcgagtttagccttttgataaatttcttcttgctttttcgacatattaacgtatcgcattaatactgttttcttagcgaatgatgcagacccttctacgtcatcaaaaatagaaaactcgttattaactatatacgaacatagtcctcctagtttggagactaattctttttcatcgactagacgtttattctcaaatagcgattggtgttgtaaggatcctggtcgtagtaagttaaccaacatggtgaattcttgcacactattgacgataggtgtagccgataaacaaatcatcttatggttttttaacgcaatggtcttagataaaaaattatatactgaacgagtaggacggatcttaccatcttctttgattaatgatttagaaatgaagttatgacattcatcaataatgacgcatattctactcttggaattaatagttttgatattagtaaaaaatttatttctaaaattttgatcatcgtaattaataaaaatacaatccttcgttatctctggagcgtatctgagtatagtgttcatccaaggatcttctatcaaagcctttttcaccaataagataatagcccaattcgtataaatatccttaagatgtttgagaatatatacagtagtcattgttttaccgacacccgtttcatggaacaataaaagagaatgcatactgtctaatcctaagaaaactcttgctacaaaatgttgataatccttgaggcgtactacgtccgaccccatcatttcaacgggcatattagtagttctgcgtaaggcataatcgatataggccgcgtgtgatttactcatttatgagtgataagtaataactatgttttaaaaatcacagcagtagtttaactagtcttctctgatgtttgttttcgatactttttgaatcagaagtcatactagaataaagcaacgagtgaacgtaatagagagcttcgtatactctattcgaaaactctaagaacttattaatgaattccgtatccactggattgtttaaaatactaaattgaacactgttcacatccttccaagaagaagacttagtgacggacttaacatgagacataaataaatccaaattttttttacaaacatcactagccaccataatggcgctatctttcaaccagctatcgcttacgcattttagcagtctaacatttttaaagagactacaatatattctcatagtatcgattacacctctaccgaataaagttggaagtttaataatacaatatttttcgtttacaaaatcaaataatggtcgaaacacgtcgaaggttaacatcttataatcgctaatgtatagattgttttcagtgagatgattattagatttaatagcatctcgttcacgtttgaacagtttattgcgtgcgctgaggtcggcaactacggcgtccgctttagtactcctcccataatactttacgctattaatctttaaaatttcatagactttatctagatcgctttctggtaacatgatatcatgtgtaaaaagttttaacatgtcggtcggcattctatttagatcattaactctagaaatctgaagaaagtaattagctccgtattccagactaggtaatgggcttttacctagagacagattaagttctggcaatgtttcataaaatggaagaaggacatgcgttccctcccggatattttttacaatttcatccatttacaactctatagtttgttttcattattattagttattatctcccataatcttggtaatacttaccccttgatcgtaagataccttatacaggtcattacatacaactaccaattgtttttgtacataatagattggatggttgacatccatggtggaataaactactcgaacagatagtttatctttccccctagatacattagccgtaatagttgtcggcctaaagaatatctttggtgtaaagttaaaagttagggttcttgttccattattgctttttgtcagtagttcattataaattctcgagatgggtccgttctctgaatatagaacatcatttccaaatctaacttctagtctagaaataatatcggtcttattcttaaaatctattcccttgatgaagggatcgttaatgaacaaatccttggcctttgattcggctgatctattatctccgttatagacgttacgttgactagtccaaagacttacaggaatagatgtatcgatgatgttgatactatgtgatatgtgagcaaagattgttctcttagtggcatcactatatgttccagtaatggcggaaaactttttagaaatgttatatataaaagaattttttcgtgttccaaacattagcagattagtatgaagataaacactcatattatcaggaacattatcaatttttacatacacatcagcatcttgaatagaaacgataccatcttctggaacctctacgatctcggcagactccggataaccagtcggtgggccatcgctaacaataactagatcatccaacaatctactcacatatgcatctatataatctttttcatcttgtgagtaccctggatacgaaataaatttattatccgtatttccataataaggtttagtataaacagagagagatgttgccgcatgaacttcagttacagtcgccgttggttggtttatttgacctattactctcctaggtttctctataaacgatggtttaatttgtacattcttaaccatatatccaataaagctcaattcaggaacataaacaaattctttgttgaacgtttcaaagtcgaacgaagagtcacgaataacgatatcggatactggattgaaggttaccgttacggtaatttttgaatcggatagtttaagactgctgaatgtatcttccacatcaaacggagttttaatataaacgtatactgtagatggttctttaatagtgtcattaggagttaggccaatagaaatatcattaagttcactagaatatccagagtgtttcaaagcaattgtattattgatacaattattatataattcttcgccctcaatttcccaaataacaccgttacacgaagagatagatacgtgattaatacatttatatccaacatatggtacgtaactgaatcttcccatacctttaacttctggaagttccaaactcagaaccaaatgattaagcgcagtaatatactgatccctaatttcgaagctagcgatagcctgattgtctggaccatcgtttgtcataactccggatagagaaatatattgcggcatatacaaagttggaatttgactatcgactgcgaagacattagaccgtttaatagagtcatccccaccgatcaaagaattaatgatagtattattcattttctatttaaaatggaaaaagcttacaataaactccgtagagaaatatctataatttgtgagttttccttaaagtaacagcttccgtaaacgccgtctttatctcttagtaggtttattgtatttatgaccttttccttatcttcatagaatactaaaggcaacaaagaaatttttggttcttctctaagagctacgtgagacttaaccatagaagccaacgaatccctacatattttagaacagaaataccctacttcaccacccttgtatgtctcaatactaataggtctaaaaaccaaatcttgattacaaaaccaacacttatcaattacactatttgtcttaatagacacatctgccatagatttataatactttggtagtatacaagcgagtgcttcttctttagcgggcttaaagactgctttaggtgctgaaataaccacatctggaaggcttactcgcttagccatttaattacggaactatttttttatacttctaatgagcaagtagaaaacctctcatctacaaaaacgtactcgtgtccataatcctctaccatagttacacgttttttagatctcatatgtgctaaaaagttttcccatactaattggttactattatttttcgtataatttttaacagtttgaggttttagatttttagttacagaagtgatatcgaatattttatccaaaaagaatgaataattaattgtcttagaaggagtgttttcttggcaaaagaataccaagtgcttaaatatttctactacttcattaatcttttctgtactcagattcagtttctcatcttttacttgattgattatttcaaagactaacttataatcctttttatttattctctcgttagccttaagaaaactagatacaaaatttgcatctacatcatccgtggatatttgatttttttccatgatatccaagagttccgagataatttctccagaacattgatgagacaataatctccgcaatacatttctcaaatgaataagtttattagacacgtggaagtttgactttttttgtacctttgtacatttttgaaataccgactcgcaaaaaatacaatattcatatccttgttcagatactataccgttatgtctacaaccgctacataatcgtagattcatgttaacactctacgtatctcgtcgtccaatattttatataaaaacattttatttctagacgttgccagaaaatcctgtaatatttttagttttttgggctgtgaataaagtatcgccctaatattgttaccgtcttccgccaatatagtagttaaattatccgcacatgcagaagaacaccgcttaggcggattcagtacaatgttatatttttcgtaccaactcatttaaatatcataatctaaaatagttctgtaatatgtctagcgctaatatattgatcataatcctgtgcataaattaagatacaacaatgtctcgaaatcatcgacatggcttcttccatagttagaagatcgtcgtcaaagttagcaacgtgattcatcaacatttgctgttttgaggcagcaaatactgaaccgtcgccattcaaccattcataaaaaccatcgtctgaatccattgataatttcttgtactggtttttgagagctcgcatcaatctagcatttctagctcccggattgaaaacagaaagaggatcgtacatccagggtccattttctgtaaatagaatcgtataatgtcccttcaagaagatatcagacgatccacaatcaaagaattggtctccgagtttgtaacaaactgcggactttaacctatacatgataccgtttagcataatttctggtgatacgtcaatcggagtatcatctattagagatctaaagccggtgtaacattctccaccaaacatattcttattctgacgtcgttctacataaaacatcattgctccattaacgataacaggggaatgaacagcactacccatcacattagttcccaatggatcaatgtgtgtaactccagaacatcttccatagcctatgttaggaggagcgaacaccactcttccactattgccatcgaatgccatagaataaatatccttggaattgatagaaatcggactgtcggatgttgtgatcatcttcataggattaacaactatgtatggtgccgcctgaagtttcatatcgtaactgatgccgtttataggtctagccacagaaaccaacgtaggtctaaatccaactatagacaaaatagaagccaatatctgttcctcatctgtcataacttgagagcatccagtatgaataatcttcattagatggggatctaccgcatcatcatcgttacaataaaaaattcccattctaatgttcataattgcttttctaatcatggtatgcatgtttgctctctgaatctctgtggaaattagatctgatacacctgtaatcactatcggattatcctccgtaagacgattaaccaacaacatataattataagactttacttttctaaattcataaagttgctggattaggctataggtgtctccatgtacatacgcgttctcgagcgcaggaagtttaataccgaatagtgccatcagaataggatgaatatagtaattagtttctggttttctataaataaaagacaaatcttgtgaactagacatatcggtaaaatgcatggattggaatcgtgtagtcgacagaagaatatgatgattagatggagagtatattttatctaactctttgagttggtcaccgattctaggactagctcgagaatgaataagtactaaaggatgagtacatttcacagaaacactagcattgttcaatgtgctctttacatgggtaaggagttgaaatagctcgtttctatttgttctgacaatatttagtttattcataatgttaagcatatcctgaatagtaaagttagatgtgtcatacttgttagtagttagatatttagcaattgcattcccatcatttctcaatctcgtactccaatcatgcgtggatgctacttcgtcgatggaaaccatacaatcctttttgataggctgttgagattgatcatttcctgcacgtttaggtttggtacgttgatttctagcccctgcggatataaagtcatcgtctacaatttgggacaatgaattgcatacactacaagacaaagatttatcagaagtgtgaatatgatcttcatctaccaaagaaagagtttgattagtataactagattttagtcctgcgttagatgttaaaaaaacatcgctattgaccacggcttccattatttatattcgtagtttttactcgaaagcgtgattttaatatccaatcttattacttttggaatcgttcaaaacctttgactagttgtagaatttgatctattgccctacgcgtatactcccttgcatcatatacgttcgtcaccagatcgtttgtttcggcctgaagttggtgcatatctctttcaacattcgacatgagatccttaagggccatatcgtctagattttgttgagatgctgctcctggatttggattttgttgtgctgttgtacatactgtaccaccagtaggtgtaggagtacatacagtggccacaataggaggttgagaaagtgtaaccgttggagtagtacaagaaatacttccatccgattgttgtgtacatgtagttgttggtaacgtctgagaaggttgggtagatggcggcgtcgtcgttttttgatctttattaaatttagagataatatcctgaacagcattgctcggcgtcaacgctggaaggagtgaactcgccggcgcatcagtatcttcagacagccaatcaaaaagattagacatatcagatgatgtattagtttgttgtcgtggttttggtgtaggagcagtactactaggtagaagaataggagccgatgtagctgttggaaccggctgtggagttatatgaatagttggttgtagcggttggataggctgtctgctggcggccatcatattatctctagctagttgttctcgcaactgtctttgataatacgactcttgagactttagtcctatttcaatcgcttcatcctttttcgtatccggatccttttcttcagaataatagattgacgactttggtgtagaggattctgccagcctctgtgagaacttgttaaagaagtccatttaaggctttaaaattgaattgcgattataagattaaatggcagacacagacgatattatcgactatgaatccgatgatctcaccgaatacgaggatgatgaagaagaggaagaagatggagagtcactagaaactagtgatatagatcccaaatcttcttataagattgtagaatcagcatccactcatatagaagatgcgcattccaatcttaaacatatagggaatcatatatctgctcttaaacgacgctatactagacgtataagtctatttgaaatagcgggtataatagcagaaagctataacttgcttcaacgaggaagattacctctagtttcagaattttctgacgaaacgatgaagcaaaatatgctacatgtaattatacaagagatagaggagggttcttgtcctatagtcatcgaaaagaacggagaattgttgtcggtaaacgattttgacaaagatggtctaaaattccatctagactatattatcaaaatttggaaacttcaaaaacgatattagaatttatacgaatatcgttctctaaatgtcacaatcaagtctcgcatgttcagcaatttattgtcgtactttatatcgtgttcattaacgatatcttgcaaaatagtaatgattctatcttccttcgatagatattcttcagagattattgtcttatattctttcttgttatcagatatgaatttgataagactttgaacattattgatacccgtctgtttaattttttctacagatattttagttttggcagattctatcgtatctgtcaatagacatccaacatcgacattcgacgtcaattgtctataaatcaacgtataaattttagaaataacattagcgaattgttgtgcgttgatgtcgttattctgaaacagtatgattttaggtagcattttcttaacaaagagaacgtatttattgttactcagttgaacagatgatatatccagattactaacgcatctgattccgtataccaaactttcagaagaaatggtatacaattgtttgtattcattcaatgtctctttttcagaaattagtttagagtcgaatactgcaataattttcaagagatagttttcatcagataagattttatttagtgtagatatgataaaactattgttttgttggagaacttgatacgccgcgttctctgtagtcgacgctctcaaatgggaaacaatctccattatttttttggaatcggatactatatcttcggtatcttgacgcagtctagtatacatagagttaagagagattagagtttgtacattaagcaacatgtctctaaatgtggctacaaacttttcctttttcacatcatctagtttattatataccgatttcacaacggcaccagatttaaggaaccagaatgaaaaactctgataactacaatatttcatcatagttacgattttatcatcttctatagttggtgtaatagcgcatacctttttctccaagactggaaccaacgtcataaaaatgtttaaatcaaaatccatatcaacatctgatgcgctaagaccagtctcgcgttcaagattatctttactaatggtgacgaactcatcgtataaaactctaagtttgtccattatttatttacagatttagttgtttaatttatttgtgctcttccagagttgggatagtatttttctaacgtcggtattatattattaggatctacgttcatatgtatcataatattaatcatccacgttttgataaatctatctttagcttctgaaataacgtatttaaacaaaggagaaaaatatttagctacggcatcagacgcaataacattttttgtaaatgtaacgtatttagacgacagatcttcgttaaaaagttttccatctatgtagaatccatcggttgttaacaccattcccgcgtcagattgaataggagtttgaatagtttgttttggaaatagatccttcaataacttatagttgggtgggaaaaaatcgattttatcactagactctttcttttttactatcattacctcatgaactatttcttgaatgagtatatgtattttctttcctatatcggacgcgttcattggaaaatataccatgtcgttaactataagaatatttttatcctcgtttacaaactgaataatatcagatgtagttcgtaaacgaactatatcatcaccagcacaacatctaactatatgatatccactagtttcctttagccgtttattatcttgttccatattagcagtcattccatcatttaagaaggcgtcaaaaataatagggagaaatgacattttggattctgttacaactttaccaaaattaaggatatacggacttactatctttttctcaacgtcaatttgatgaacacacgatgaaaatgtgcttctatgagattgatcatgtagaaaacaacaagggatacaatatttccgcatatcatgaaatatattaagaaatcccaccttattatatttccccaaaggatccatgcacgtaaacattatgccgttatcattaataaagacttctttctcatcggatctgtaaaagttgttactgatttttttcattccaggatctagataattaataatgatgggttttctattcttattctttgtattttggcatatcctagaccagtaaacagtttccactttggtaaaatcagcagacttttgaacgctattaaacatggcattaatggcaataactaaaaatgtaaaatatttttctatgttaggaatatggtttttcactttaatagatatatggtttttggccaaaatgatagatatttttttatccgaggatagtaaaatattattagtcgccgtctctataaaaatgaagctagtctcgatatccaattttattctagaattgataggagtcgccaaatgtaccttatacgttatatctcccttgatgcgttccatttgtgtatctatatcggacacaagatctgtaaatagttttacgttattaatcatcacggtatcgccgtcgctagataacgctaatgtaccatccaagtcccaaatggagagatttaactgttcatcgtttagaataaaatgattaccggtcatattaataaagtgttcatcgtatctagataacaacgacttataattaatgtccaagtcttgaactcgctgaatgatcttttttaacccagttagttttagattggtacgaaatatattgttaaactttgattctacagtaatgtccaaatctagttgtggaaatacttccatcaacattgtttcaaacttgataatattattatctacatcttcgtacgatccaaattccggaatagatgtatcgcacgctctggccacccagataaccaaaaagtcacacgctccaggatatacattgtataaaaagctatcgttttttagtagggtttttttctgcgtgtatacgaagggattaaaaatagtattatcaacgtaactatattccaaattattcttatgagaatagataataatatcgtccttaatatctaacaaatttcctaaatatccctttaattgagtcattcgaagcgtcaatagaatatgtctcttaactatttccggctgttgtatatttaaatgacttcgtaaaaaataatatatgggcgacttctcatctatgtaatcatatggagtgagatatagggctcgttctacctcctgccccttacccacctgtaataccaattgcggacttactatatatcgcatatttatatcgtggggtaaagtgaaaatctactaccgatgatgtaagtcttacaatgttcgaaccagtaccagatcttaatttggaggcctccgtagaactaggggaggtaaatatagatcaaacaacacctatgataaaggagaatagcggttttatatcccgcagtagacgtctattcgcccatagatctaaggatgatgagagaaaactagcactacgattctttttacaaagactttattttttagatcatagagagattcattatttgttcagatgcgttgacgctgtaaaagacgtcactattaccaaaaaaaataacattatcgtggcgccttatatagcacttttaactatcgcatcaaaaggatgcaaacttacagaaacaatgattgaagcattctttccagaactatataatgaacatagtaagaaatttaaattcaactctcaagtatccatcatccaagaaaaactcggataccagtttggaaactatcacgtttatgattttgaaccgtattactctacagtagctctggctattcgagatgaacattcatctggcatttttaatatccgtcaagagagttatctggtaagttcattatctgaaataacatatagattttatctaattaatctaaaatctgatcttgttcaatggagtgctagtacgggcgctgtaattaatcaaatggtaaatactgtattgattacagtgtatgaaaagttacaactggtcatagaaaatgattcacaatttacatgttcattggctgtggaatcaaaacttccaataaaattacttaaagatagaaatgaattatttacaaaattcattaacgagttaaaaaagaccagttcattcaagataagcaaacgcgataaggatacgctactaaaatattttacttaggactggagttagaatttatagacgactcatttcgtttatcattgttactattattactattactatcattattagtgttggcattattagtattcttcttgtcatcttgttcagaaatatacagcaatgctatacctaatactaaatacattatcatgctcgcaatggctctaacaacaacgaaccaaaatgaatttggtcgtagcttttgttcacaaaaatacataaagaaatgtctacataaatctatggcgccattggctacttgaaatagcgccagtcctcctacagattttaatatagctgtataacatgacatttattcatcatcaaaagagacagagtcaccatctgtcatatttagattttttttcatgtgttcaaagtatcctctactcatttcattataatagtttatcatacttagaattttaggacggatcaatgagtaagacttgactagatcgtcagtagtaatttgtgcatcgtctattctgcatccgcttcgtcgaataatgtatagcatcgctttgagattctccatagctatcaagtctttatacaatgacatggaaatatctgtgaatactttatacttctccaacatcgatgccttaacatcatcgcctactttagcattgaaaatacgttctattgtgtagatggatgtagcaagatttttaaacaacaatgccatcttacacgatgattgcctcaagtctccaatcgtttgtttagaacgattagctacagagtccaatgcttggctgactagcatattattatctttagaaattgtattcttcaatgaggcgtttatcatatctgtgatttcgttagtcatattacagtctgactgggttgtaatgttatccaacatatcacctatggatacggtacacgtaccagcatttgtaataatcctatctaagatgttgtatggcattgcgcagaaaatatcttctcctgtaatatctccactctcgataaatctactcagattattcttaaatgccttattctctggagaaaagatatcagtgtccatcatttcattaatagtatacgcagaaaagataccacgagtatcaattctatccaagatacttatcggttccgagtcacagataatggtttcctctccttcgggagatcctgcatagaaatatctaggacaatagtttctatactgtctgtaactctgataatctctaaagtcactaactgataccatgaaattgagaagatcaaacgctgaagtaattaatttttctgcctcgtttttactacaactagttttcatcaatgtagtgacgatgtattgtttagttacttttggtctaatactgatgatagagatattattgcttcccataatggatcttctagtagtcaccttaaagcccattgatgcgaatagcagatagataaagtcttggtatgactcctttctaatatagtacggactacctttgtcacccaactttatacccacataagccataacaacctctttaatagccgtttcatgaggtttatcagccatgagcctgagtagttggaagaatctcatgaatcccgtctcagaaagtcctatatgcatgatagatttatctttcctgggaaactctcgtatagtcatagatgaaatactctttaaagtttctgaaataagattagtaacagtcttacctccgactactctaggtaacaaacaaactctaataggtgttttctctgcggagataatatcagaaaggatagagcaataagtagtattattgtgattataaagaccgaatacataacaggtagaatttataaacatcatgtcctgaaggtttttagacttgtattcctcgtaatccataccgtcccaaaacatggatttggtaactttgatagccgtagatctttgttccttcgccaacaggttaaagaaattaataaagaatttgttgtttctatttatgtccacaaattgcacgtttggaagcgccacggttacattcactgcagcattttgaggatcgcgagtatgaagtacgatgttattgtttactggtatatctggaaagaaatctaccagtctaggaataagagattgatatcgcatagaaatagtaaagtttataatctcatcatcgaagagcattttgttaccattgtaataaatatccactctgtcatatgtataaatgaagtactgttcaaacatgatgagatgtttatatgttggcatagtagtgagatcgacgtttggtaatggcaatgtattaagattaactccataatgtctagcagcatctgcgatgttataagcgtcgtcaaagcggggtcgatcttgtattgttatatattgtctaacacctataagattatcaaaatcttgtctgcttaatacaccgttaacaatttttgccttgaattcttttattggtgcattaataacatccttatagaggatgttaaacaaataagtgttatcaaagttaagatctggatatttcttttctgctagaacatccattgagtcggagccatctggtttaatataaccaccgataaatctagctctgtattctgtatccgtcaatctaatattaagaaggtgttgagtgaaaggtggaagatcgtaaaagctgtgagtattaatgataggattagtttccgaactaatgttaattggggtattaataatatctatatttccagcgttaagtgtaacattaaacagttttaattcacgtgacgtggtatcaattaaataattaatgcccaatttggatatagcagcctgaagctcatcttgtttagttacggatcctaatgagttattaagcaatatatcgaacggatgaacgaaggttgttttaagttggtcacatactttgtaatctagacatagatgcggaagaacggtagaaactatacgaaataaatattcagagtcctctaattgatcaagagtaactattgacttaataggcatcatttatttagtattaaatgacgaccgtaccagtgacggatatacaaaacgatttaattacagagttttcagaagataattatccatctaacaaaaattatgaaataactcttcgtcaaatgtctattctaactcacgttaacaacgtggtagatagagaacataatgccgccgtagtgtcatctccagaggaaatatcctcacaacttaatgaagatctatttccagatgatgattcaccggccactattatcgaacgagtacaacctcatactactattattgacgatactccacctcctacgtttcgtagagagttattaatatcggaacaacgtcaacaacgagaaaaaagatttaatattacagtatcgaaaaatgctgaagcaataatggaatctagatctatgataacttctatgccaacacaaacaccatccttgggagtagtttatgataaagataaaagaattcagatgttagaggatgaagtggttaatcttagaaatcaacgatctaatacaaaatcatctgataatttagataattttaccaaaatactatttggtaagactccgtacaaatcaacagaagttaataagcgtatagccatcgttaattatgcaaatttgaacgggtcccccttatcagtcgaggacttggatgtttgttcggaggatgaaatagatagaatctataaaacgattaaacaatatcacgaaagtagaaaacgaaaaattatcgtcactaacgtgattattattgtcataaacattatcgagcaggcattgctaaaactcggatttgaagaaatcaaaggactgagtaccgatatcacttcagaaattatcgatgtggagatcggagatgactgcgatgctgtagcatctaaactaggaatcggtaacagtccggttcttaatattgtattgtttatactcaagatattcgttaaacgaattaaaattatttaatttaatacattcccatatccagacaacaatcgtctggattaatctgttcctgtcgtctcataccggacgacatattaatctttttattagtgggcatctttttagatggtttctttttcccagcattaactgagtcgatacctagaagatcgtgattgatctctccgaccattccacgaacttctaattggccgtctctgacggtaccataaactattttaccagcattagtaacagcttggacaatctgaccatccatcgcattgtacgatgtagtagtaactgttgttctacgtctaggagcaccagaagtatttttggagcccttggatgttgatgtagaagaagacgaggattttgattttggtttacatgtaatacattttgaactctttgattttgtatcacatgcgccggcagtcacatctgtttgagaattaagattattgttgcctcctttgacggctgcatctccaccgatttgcgctagtagatttttaagctgtggtgtaatcttattaactgtttcgatataatcatcgtaactgcttctaacggctaaattttttttatccgccatttagaagctaaaaatatttttatttatgcagaagatttaactagattatacaatgaactaatatgatccttttccagattatttacaaacttggtattttttggttctggaggaggcgaatttaaattcggacttggattcggattttgtaagttcttgatcttattatacatcgagtataggatggcgacagtaactgctacacaaataccgatcaaaagaagaataccaatcatttattgacaataacttcactattgatcaagtatgcaatatatcatcttttcactaaataagtagtaataatgattcaacaatgtcgagatatatggacgataataatttagttcatggaaatatcgctatgattggtgtgaatgactccgctaactctgtggggtgcgcagtgctttccccacatagaataaattagcattccgactgtgataataataccaagtataaacgccataatactcaatactttccatgtacgagtgggactggtagacttactaaagtcaataaaggcgaagatacacgaaagaatcaaaagaatgattccagcgattagcacgccggaaaaataatttccaatcataagcatcatgtccatttaactaataaaaattttaaatcgccgaatgaacaaagtggaatataaaccatataaaaacaatagtttgtactgcaaaaataatatctatttttgttttcgaagatatggtaaaattaaatagtagtacacagcatgttataactaacagcagcaacggctcgtaattacttatcatttactagacgaaaaggtggtgggatattttcttgctcaaataatacgaatatatcacccatccattttatgcgatgtttatatactctaatctttaatagatctatagacgacgggtttaccaacaatatagattttatcgattcatctaatttaaacccttccttaaacgtgaatgatctattatctggcataacgatgaccctacctgatgaatcggacaatgtactgggccatgtagaataaattatcaacgaattatcgtctacgaacatttatatcatttgttttaattttaggacgcgaataaatggatataaaatagaaaataacagatattacaaccagtgttatggccgcgcccaaccaggtaggcagttttattttatcttttactacaggttctcctggatgtacgtcaccaacggcggacgtagttctagtacaattagacgtaagttccgcttgggaattttttaacgctaaagagttaacgttaatcgtgcacccaacgtatttacatctagttcgttgaacatcttgattataatataaccattttctatctctagattcgtcagtgcactcatgtaaccaacataccctaggtcctaaatatttatctccggaattagattttggataattcgcgcaccaacaatttctatttcctttatgatcgttacaaaagacgtataatgccgtatccccaaaagtaaaataatcaggacgaataattctaataaactcagaacaatatctcgcatccatatgtttggagcaaatatcggaataagtagacatagccggtttccgttttgcacgtaaccattctaaacaattggggtttccaggatcgtttctacaaaatccagtcatgaaatcgtcacaatgttctgtcttgtaattattattaaatatttttggacagtgtttggtatttgtcttagaacaacattttgccacgctatcactatcgcccaggagataatccttttttataaaatgacatcgttgcccggatgctatataatcagtagcgtgttttaaatccttaatatattcaggagttacctcgttctgataatagattaatgatccaggacgaaatttgaaagaactacatggttctccatgaattaatacatattgtttagcaaattcaggaactataaaactactacaatgatctatcgacataccatctatcaaacaaaacttgggtttaatttctcccggagatgtttcataatagtacgtataactttcttctgcaaacttaacagctctattatattcaggataattaaaacctaattccatatatttgtctcgtatatctgctattcctggtgctattttgattctattaagagtaacagctgcccccattcttaataatcgtcagtatttaaactgttaaatgttggtatatcaacatctaccttatttcccgcagtataaggtttgttgcaggtatactgttcaggaatggttacatttatacttcttctatagtcctgtctttcgatgttcatcacatatgcaaagaacagaataaacaaaataatgtaagaaataatattaaatatctgtgaattcgtaaatacattgattgccataataattacagcagctacaatacacacaatagacattcccacagtgttgccattacctccacgatacatttgagttactaagcaataggtaataactaagctagtaagaggcaatagaaaagatgagataaatatcatcaatatagagattagaggagggctatatagagccaagacgaacaaaatcaaaccgagtaacgttctaacatcattatttttgaagattcccaaataatcattcattcctccataatcgttttgcatcatacctccatctttaggcataaacgattgctgctgttcctctgtaaataaatctttatcaagcactccagcacccgcagagaagtcgtcaagcatattgtaatatcttaaataactcatttatatattaaaaaatgtcactattaaagatggagtataatctttatgccgaactaaaaaaaatgacttgtggtcaacccctaagtctttttaacgaagacggggatttcgtagaagttgaaccgggatcatcctttaagtttctgatacctaagggattttacgcctctccttccgtaaagacgagtctagtattcgagacattaacaacgaccgataataaaatcactagtatcaatccaacaaatgcgccaaagttatatcctcttcaacgcaaagtcgtatctgaagtagtttctaatatgaggaaaatgatcgaatcaaaacgtcctctatacatcactcttcacttggcgtgtggatttggtaagactattaccacgtgttatcttatggctacacacggtagaaaaaccgtcatttgcgtacccaataaaatgttaatacatcaatggaagacacaggtagaggcagtcggattggaacataagatatccatagatggagtaagtagtctattaaaggaactaaagactcaaagtccggatgtattaatagtagtcagtagacatctgacaaacgatgccttttgtaaatatatcaataagcattatgatttgttcatcttggatgaatcacatacgtataatctgatgaacaatacagcagttacaagatttttagcgtattatcctccgatgatgtgttattttttaactgctacacctagaccatctaaccgaatttattgtaacagtattattaatattgccaagttatccaatctaaaaaaaactatctatgcagtagatagtttttttgagccatattccacagataatattagacatatggtaaaacgactagatggaccatctaataaatatcatatatataccgagaagttattatctgtagacgagcctagaaatcaacttattcttgataccctggtagaagaattcaagtcaggaactattaatcgcattttagttattactaaactacgtgaacatatggtattattctacaaacgattattagattttttcggaccagaggttgtatttataggagacgcccaaaatagacgtactccagatatggtcaaatcaatcaaggaactaaatagatttatattcgtatccaccttattttattccggtactggtttagatattcctagtttggattcgttgttcatttgctcggcagtaatcaacaatatgcaaatagagcaattactagggagggtatgtcgagaaacagaactattagataggacggtatatgtatttcctaacacatccatcaaagaaataaagtacatgataggaaatttcatgcaacgaattattagtctgtctgtagataaactaggatttaaacaaaaaagttatcggaaacatcaagaatccgatcccacttctgcatgtacaacatcatccagagaagaacgtgtattaaatagaatatttaactcgcaaaatcgttaagaagtttaagcgacgatccgcatgctgcgcaggccagtgtattacccctcatagtattaatataatccaatgatacttttgtgatgtcggaaatcttaaccaatttagactgacaggcagaacacgtcatgcaatcatcatcgtcatcgataactgtagtcttgggcttctttttgcgactcttcattccggaacgcacattggtgctatccatttaggtagtaaaaaataagtcagaatatgccctataacacgatcgtgcaaaacctggtatatcgtctctatctttatcacaatatagtgtatcgacatttttattattattgacctcgtttatcttggaacatggaatgggaacatttttgttatcaacggccatctttgccttaattccagatgttgtaaaattataactaaacagtctatcatcgacacaaatgaaattcttgtttagacgtttgtagtttacgtatgcggctcgttcgcgtctcattttttcagatattgcaggtactataatattaaaaataagaatgaaataacataggattaaaaataaagttatcatgacttctagcgctgatttaactaacttaaaagaattacttagtctgtacaaaagtttgagattttcagattctgcggctatagaaaagtataattctttggtagaatggggaacatctacttactggaaaataggcgtgcaaaaggtagctaatgtcgagacgtcaatatctgattattatgatgaggtaaaaaataaaccgtttaatattgatccgggctattacattttcttaccggtatattttgggagcgtctttatttattcgaagggtaaaaatatggtagaacttggatctggaaactcttttcaaataccagatgatatgcgaagtgcgtgtaacaaagtattagacagcgataacggaatagactttctgagatttgttttgttaaacaatagatggataatggaagatgctatatcaaaatatcagtctccagttaatatatttaaactagctagtgagtacggattaaacatacccaaatatttagaaattgaaatagaggaagacacattatttgacgacgagttatactctattatagaacgctctttcgatgataaatttccaaaaatatccatatcgtatattaagttgggagaacttagacggcaagttgtagactttttcaaattctcattcatgtatattgagtccatcaaggtagatcgtataggagataatatttttattcctagcgttataacaaaatcaggaaaaaagatattagtaaaagatgtagaccatttaatacgatccaaggttagagaacatacatttgtaaaagtaaaaaagaaaaacacattttccattttatacgactatgatggaaacggaacagaaactagaggagaagtaataaaacgaattatagacactataggacgagactattatgttaacggaaagtatttctctaaggttggtagtgcaggcttaaagcaattgactaataaattagatattaatgagtgcgcaactgtcgatgagttagttgatgagattaataaatccggaactgtaaaacgaaaaataaaaaaccaatcagcatttgatttaagcagagaatgtttgggatatccagaagcggattttataacgttagttaataacatgcggttcaaaatagaaaattgtaaggttgtaaatttcaatattgaaaatactaattgtttaaataacccgagtattgaaactatatatggaaactttaaccagttcgtctcaatctttaatgtcgtcaccgatgtcaaaaaaagattattcgagtgaaataatatgcgcctttgatataggtgcaaaaaatcctgccagaactgttttagaagtcaaggataactccgttagggtattggatatatcaaaattagactggagttctgattgggaaaggcgcatagctaaagatttgtcacaatatgaatacactacagttcttctagaacgtcagcctagaaggtcgccgtatgttaaatttatctattttattaaaggctttttatatcatacatcggctgccaaagttatttgcgtctcgcctgtcatgtctggtaattcatatagagatcgaaaaaagagatcggtcgaagcatttcttgattggatggacacattcggattgcgagactccgttccggatagacgcaaattagacgatgtagcggatagtttcaatttggctatgagatacgtattagataaatggaatactaattatacaccttataataggtgtaaatctagaaattacataaaaaaaatgtaataacgttagtaacgccattatggataatctatttacctttctacatgaaatagaagatagatatgccagaactatttttaactttcatctaataagttgcgatgaaataggagatatatatggtcttatgaaagaacgcatttcctcagaggatatgtttgataatatagtgtataataaagatatacatcctgccattaagaaactagtgtattgcgacatccaacttactaaacacattattaatcagaatacgtatccggtatttaacgattcttcacaagtgaaatgttgtcattatttcgacataaactcagataatagcaatattagctctcgtacagtagagatatttgagagggaaaagtcatctcttgtatcatatattaaaactaccaataagaagagaaaggtcaattacggcgaaataaagaaaactgttcatggaggcactaatgcaaattacttttccggtaaaaagtctgacgagtatctgagtactacagttagatccaacattaatcaaccttggatcaaaaccatctctaagaggatgagagttgatatcattaatcactctatagtaacgcgtggaaaaagctctatattacaaactatagaaattatttttactaatagaacatgtgtgaaaatattcaaggattctactatgcacattattctatccaaggacaaggatgaaaaggggtgtatacacatgattgacaaattattctatgtctattataatttatttctgttgttcgaagatatcatccaaaacgagtactttaaagaagtagctaatgttgtaaaccacgtactcacggctacggcattagatgagaaattattcctaattaagaaaatggctgaacacgatgtttatggagttagcaatttcaaaatagggatgtttaacctgacatttattaagtcgttggatcataccgttttcccctctctgttagatgaggatagcaaaataaagttttttaaggggaaaaagctcaatattgtagcattacgatctctggaggattgtataaattacgtgactaaatccgagaatatgatagaaatgatgaaggaaagatcgactattttaaatagcatagatatagaaacggaatcggtagatcgtctaaaagaattgcttctaaaatgaaaaaaaacactaattcagaaatggatcaacgactagggtataagtttttggtgcctgatcctaaagccggagttttttatagaccgttacatttccaatatgtatcgtattctaattttatattgcatcgattgcatgaaatcttgaccgtcaagcggccactcttatcgtttaagaataatacagaacgaattatgatagaaattagcaatgttaaagtgactcctccagattactcacctataatcgcgagtattaaaggtaagagttatgacgcattagccacgttcactgtaaatatctttaaagaggtaatgaccaaagagggtatatccatcactaaaataagtagttatgagggaaaagattctcatttgataaaaattccgctactaataggatacgggaataaaaatccacttgatacagccaagtatcttgttcctaatgtcataggtggagtctttatcaataaacaatctgtcgaaaaagtaggaattaatctagtagaaaagattacaacatggccaaaatttagggttgttaagccaaactcattcactttctcgttttcctccgtatcccctcctaatgtattaccgacaagatatcgccattacaagatatctctggatatatcacaattggaagcgttgaatatatcatcgacaaagacatttataacggtcaatattgttttgctgtctcaatatttatctagagtgagtctagaattcattagacgtagtttatcatacgatatgcctccagaagttgtctatctagtaaacgcgataatagatagtgctaaacgaattactgaatctattactgactttaatattgatacatacattaatgacctggtggaagctgaacacattaaacaaaaatctcagttaacgatcaacgagttcaaatatgaaatgctgcataactttttacctcatatgaactatacacccgatcaactaaagggattttatatgatatctttactaagaaagtttctctactgtatcttccacacttctagatatccagatagagattcgatggtttgtcatcgcatcctaacgtacggcaaatattttgagacgttggcacatgatgaattagagaattacataggcaacatccgaaacgatatcatgaacaatcacaagaacagaggcacttacgcggtaaacattcatgtactaacaactcccggacttaatcacgcgttttctagcttattgagtggaaagttcaaaaagtcagacggtagttatcgaacacatcctcactattcatggatgcagaatatttctattcctaggagtgttggattttatccggatcaagtaaagatttcaaagatgttttctgtcagaaaataccatccaagtcaatatctttacttttgttcatcagacgttccggaaagaggtcctcaggtaggtttagtatctcaattgtctgtcttgagttccattacaaatatactaacgtctgagtatttggatttggaaaagaaaatttgtgagtatatcagatcatattataaagatgatataagttactttgaaacaggatttccaatcactatagaaaatgctctagtcgcatctcttaatccaaatatgatatgtgattttgtaactgactttagacgtagaaaacggatgggattcttcggtaacttggaggtaggtattactttagttagggatcacatgaatgaaattcgcattaatattggagcgggaagattagtcagaccattcttggttgtggataacggagagctcatgatggatgtgtgtccggagttagaaagcagattagacgacatgacattctctgacattcagaaagagtttccgcatgtcatcgaaatggtagatatagaacaatttacttttagtaacgtatgtgaatcggttcaaaaatttagaatgatgtcaaaggatgaaagaaagcaatacgatttatgtgactttcctgccgaatttagagatggatatgtagcatcttcattagtgggaatcaatcacaattctggacccagagctattcttggatgtgctcaagctaaacaagctatctcttgtctgagctcggatatacgaaataaaatagacaatggaattcatttgatgtatccagagaggccaatcgtgattagtaaggctttagaaacttcaaagattgcggctaattgcttcggccaacatgttactatagcattaatgtcgtacaaaggtatcaatcaagaggatggaattatcatcaaaaaacaatttattcagagaggcggtctcgatattgttacagccaagaaacatcaagtagaaattccattggaaaactttaataacaaagaaagagataggtctaacgcctattcaaaattagaaagtaatggattagttagactgaatgctttcttggaatccggagacgctatggcacgaaatatctcatcaagaactcttgaagatgattttgctagagataatcagattagcttcgatgtttccgagaaatataccgatatgtacaaatctcgcgttgaacgagtacaagtagaacttactgacaaagttaaggtacgagtattaaccatgaaagaaagaagacccattctaggagacaaatttaccactagaacgagtcaaaagggaacagtcgcgtatgtcgcggatgaaacggaacttccatacgacgaaaatggtatcacaccagatgtcattattaattctacatccatcttctctagaaaaactatatctatgttgatagaagttattttaacagccgcatattctgctaagccgtacaacaataagggagaaaaccgacctgtctgttttcctagtagtaacgaaacatccatcgatacatatatgcaattcgctaaacaatgttatgagcattcaaatccgaaattgtccgatgaagaattatcggataaaatcttttgtgaaaagattctctatgatcctgaaacggataagccttatgcatccaaagtattttttggaccaatttattacttgcgtctgaggcatttaactcaggacaaggcaaccgttagatgtagaggtaaaaagacgaagctcattagacaggcgaatgagggacgaaaacgtggaggaggtatcaagttcggagaaatggagagagactgtttaatagcgcatggtgcagccaatactattacagaagttttgaaagattcggaagaagattatcaagatgtgtatgtttgtgaaaattgtggagacatagcagcacaaatcaagggtattaatacatgtcttagatgttcaaaacttaatctctctcctctcttaacaaaaattgataccacgcacgtatctaaagtatttcttactcaaatgaacgccagaggcgtaaaagtcaaattagatttcgaacgaaggcctccttcgttttataaaccattagataaagttgatctcaagccgtcttttctggtgtaatattctagtttggtagtagatacatatcaatatcatcaaattcgagatccgaattataaaatgggcgtggattgttaactatagaatcggacgtctgatattcgaaaatctgtggagtttcaggttttggtggaggtgtaactgctacttgggatactgaagtctgatattcagaaagctgtggatgttctggttcggcatccaccgatggtgtcacatcactaatcggttcggtaacgtctgtggatggaggtgctacttctacagaacctgtagcctcagttgtcaacggagatacatttttaatgcgagaaaatgtataatttggtaatggtttcttatgtggatctgaagaagaggtaagatatctactagaaagataccgatcacgttctagttctcttttgtagaacttaactttttctttctccgcatctagttgatattccaacctcttcacgttactacgttcagattccaattcacgttcgcatgggttacctccgcagtttttacgagcgatttcacgttcagccttcatgcgtctctccctctctctatcgagtttatcagagcagtctttctgaaggcgatcgaactccataaatttctccaacgctttgattgtttccatagatttccgaagttcagcttttaggactgtgattctttttctttcgaattcacagctggatgtacaaccgtttccattaccgccatctctaagtttcttttctagatcggcaacatttcatccccatgccttttacattcctcgagtctactgtcgtcgaaatatcgttccagctccttttcgacatcaataactttagcacgttgtctctcaagctctcttttgtagttatctgattccctggcacgtttaagatcttcatgcaattgagtcagctcttaacttcctctcttgcttcttcgtcatagtacgcgcaatcactgtgagatccattgttaccacgtctacactcggcgagctcgcgtttaagagattcaatttcccgtttgtattggtccatgtttccattgctaccaccattagatttacaggctgctagttgtcgttcgagatcagaaatacgggttttcttggaattgatttcgtcgatgtacttggcatcgaaacacttattaagttctttttccaattctacgattttatttctttcgcgagtcaattccctcctgtagtaactatctgttttgtcagattcacgctctctacgtagactttcttgcaagttactaatttgttccctagcacgtccgagtttagttttatatgctgaatagagttctgattcatcctttgagcagatctctagcgatcgtttaagattcctaattctagtctttagcctatttacctcctcagaagatgttccgttaccgttgcgtttacactcgttaagctgtctatcaagatccatgattctatctctaagacgttgcatctctctttccatatcagcattgctttcattattacgtctgcagtcactcaactgtctttcaatatctgagattctatctctaagacgtcgcatctctctctgtttcggcattggtttcattattacgtttacagtcgttcaactgtctttcaagatctgatattctagattggagtctgctaatctctgtagcattttcacggcattcactcagttgtctttcaagatctgaaattttagattggagtctgctaatctctgtaagatttcctcctccgctctcgatgcagtcggtcaacttattctctagttctctaatacgcgaacgcagtgcatcaacttcttgcgtgtcttcctggttgcgtgtacattcatcgagatctctaacgcgtcgtcgttcttcctcaagttctctgcgtactacagaaagcgtgtccctatcttgttgatatttagcaatttctgattctagagtactgattttgcttacgtagttactaatagttgtcttggccttatcaagatcctccttgtatttgtcgcattccttgatatccctacgaagtctggacagttcccattcgacattacgacgtttatcgatttcagctcggagatcgtcatcgcgttgttttagccacatacgactgagttcaagttctcgttgacaagatccatctacttttccattcctaatagtatccagttccttttctagttctgaacgcatttctcgttccctatcaagcgattctctcaattctcggatagtcttcttatcaatttctaataaatctgaaccatcatctgtcccattttgaatatccctgtgttctttgatctcttttgtaagtcggtcgattctttcggttttataaacagaatccctttccaaagtcctaatcttactgagtttatcactaagttctgcattcaattcggtgagttttctcttggcttcttccaactctgttttaaactctccactatttccgcattcttcctcgcatttatctaaccattcaattagtttattaataactagttggtaatcagcgattcctatagccgttcttgtaattgtgggaacataattaggatcttctaatggattgtatggcttgatagcatcatctttatcattattagggggatggacaaccttaattggttggtcctcatctcctccagtagcgtgtggttcttcaataccagtgttagtaataggcttaggcaaatgcttgtcgtacgcgggcacttcctcatccatcaagtatttataatcgggttctacttcagaatattcttttctaagagacgcgacttcgggagttagtagaagaactctgtttctgtatctatcaacgctggaatcaatactcaagttaaggatagcgaatacctcatcgtcatcatccgtatcttctgaaacaccatcatatgacatttcatgaagtctaacgtattgataaatagaatcagatttagtattaaacagatccttaacctttttagtaaacgcatatgtatattttagatctccagatttcataatatgatcacatgccttaaatgtcagtgcttccatgatataatctggaacactaatgggtgacgaaaaagatacagcaccatatgctacgttgataaataaatctgaaccactaagtagataatgattaatgttaagaaagaggaaatattcagtgtataggtatgtcttggcgtcatatcttgtactaaacacgctaaacagtttgttaatgtgatcaatttccaatagattaattagagcagcgggaataccaacaaacatattaccacatccgtattttctatgaatatcacatatcatgttaaaaaatcttgatagaagagcgaatatctcgtctgacttaatgagtcgtagttcagcagcaacataagtcataactgtaaatagaacatactttcctgtagtgttgattctagactccacatcaacaccattattaaaaatagttttatatacatctttaatctgctctccgttaatcgtcgaacgttctagtatacggaaacactttgatttcttatctgtagttaatgacttagtgatatcacgaagaatattacgaattacatttcttgtttttcttgagagacctgattcagaactcaactcatcgttccatagtttttctacctcagtggcgaaatctttggagtgcttggtacatttttcaataaggttcgtgacctccatttattataaaaaatttattcaaaacttaactacaatcgggtaattataagatcgtagatctcccatgtggcggaatactaccatctatcgcatgtggatggacagtaggtaatggccatgggaacagtaatgtttgcatatttatctttcttgctagtattactgcatattgtcccaatgtttcgatgtgatgttctaacctatcaactgccgctgtatcacaacaatagtgtccgatgaaattaagattatgatccaatgtgtttaatatatgattatcaagtcttatacgatccgcgtcttttttgacaggatcaggttcttctacaggaagaagtttcggcctcttatgatattcatgtctgggaaacggtggtctagggtgaggctccggtatcggagtgggttttggattataatcatcatcgtctatgacatcatcttcgacttcgatatttattttgctatcttgatgatgtcctgtatcagttgcattttcagcactcgactgaatattagcgcattcattgtctattattaccatatttctaaacccaaaatgtatgtgttgaacatcagtactatcgttgatgagtcttatagcatgaattcgcttatcgttatcgggtttatcttctgtcaccttagcaattccttttttattaaactctacataatcatatccatttctattgtttgttctaatataaacgagtatagcatcattgctaaatttttcaatagtatcaaaaacagaatatcctaaaccatataatatatattcaggaacactcaaactaaatgtccaggattctcctaaatacgtaaactttaatagtgcgaaatcattcaaaaatctaccacttatagatagatagtacataaatgcgtatagtagtctacctatctctttattatgaaaaccggcattacgatcatatatgtcgtgatatacctgtgatccgtttacgttaaaccataaatacatgggtgatcctataaacatgaatttatttctaattctcagagctatagttaattgaccgtgtaatatttgcttacatgcatacttgatacgcttattaataagatttttatcattgctcgttatttcagaatcgtatatataaggagtaccatcgtgattcttaccagatattatacaaaatactatatataaaatatattgacccacgttagtaatcatataaatgtttaacgttttaaattttgtattcaatgatccattatcatacgctatcatggtcttgtaatattcattctttaaaatataatattgtgttagccattgcattggagctcctaatggagattttctattctcatccattttaggataggctttcataaagtccctaataacttcgtgaataatgtttctatgttttctactgatgcatgtatttgcttcgatttttttatcccatgtttcatctatcatagatttaaacgcagtaatgctcgcaacattaacatcttgaaccgttggtacaattccgttccataaatttataatgttcgccatttatataactcattttttgaatatacttttaattaacaaaagagttaagttactcatatggacgccgtccagtctgaacatcaatctttttagccagagatatcatagccgctcttagagtttcagcgtgattttccaacctaaatagaacttcatcgttgcgtttacaacacttttctatttgttcaaactttgttgttacattagtaatctttttttccaaattagttagccgttgtttgagagtttcctcattgtcgtcttcatcggctttaacaattgcttcgcgtttagcctctggctttttagcagcctttgtagaaaaaaattcagttgctggaattgcaagatcgtcatctccggggaaaagagttccgtccatttaaagtacagattttagaaactgacactctgcgttatttatatttggtacaacacatggattataaatattgatgttaataacatcagaaaatgtaaagtctatacattgttgcatcgtgttaaattttctaatggatctagtattattgggtccaacttctgcctgaaatccaaatatggaagcggatacaaaaccgtttcctggataaaccacacatctccacttttgctttacatcagaaattgtgtcgttgacatcttgaactctcctatctaatgccggtgttccacctatagattttgaatattcgaatgctgcatgagtagcattaaattccttaatattgccataattttcatatattgagtaaccctggataaaaagtaaacacaccgcagccgtcgctaccacaataaaaaaaattgatagagagttcatttataatctattagaagctgacaaaatttttttacacgcatcagacaatgctttaataaatagttcaacatctacttttgtcatatcgaaccgatggtatgattctaacctagaattacatccgaaaaagttgactatgttcatagtcattaagtcattaacaaacaacattccagactctggattataagacgatactgtttcgtcacaattacctaccttaatcatgtgattatgaatattggctattagagcaccttctaagaaatctataatatctttgaaacacgatttaaaatcaaaccacgaatatacttctacgaagaaagttagtttacccataggagaaataactataaatggagatctaaatacaaaatccggatctatgatagttttaacattattatattctctattaaatacctccacatctaaaaatgttaattttgaaactatgtcttcgtttattaccgtacctgaactaaacgctataagctctattgtttgagaactctttaaacgatattcttgaaatacatgtaacaaagtttcctttaactcggtcggtttatctaccatagttacagaatttgtatccttatctataatataataatcaaaatcgtataaagttatataattatcgcgttcagattgtgatcttttcaaatagactaaaaaccccatttctctagtaagtatcttatgtatatgtttgtaaaatatcttcatggtgggaatatgctctaccgcagttagccattcctcattgacagcggtagatgtattagacaaaactattccaatgtttaacaagggccattttacgagattattaaatccttgtttgataaatgtagccaatgagggttcgagttcaacgacgattgaattctcttcccgcggatgctgcatgatgaacgacgggatgttgttcgattgatttggaattctttttcgactttttgtttatattaaatattttaaaatttatagcggatagcaattcatgtaccacggataatgtagacgcgtattgcgcatcgatatctttattattagataaatttatcaataaatgtgagaagtttgcctcgttaaggtcttccatttaaatattatataaacatttgtgtttgtatcttattcgtcttttatggaatagttttttactagtaaagctgcaattacacactttgtccgtaaaacataaatataaacaccagcttttatcaatcgttccaaaaagtcgacggcggacatttttaacatggcatctattttaaatacacttaggtttttggaaaaaacatcattttataattgtaacgattcaataactaaagaaaagattaagattaaacataagggaatgtcatttgtattttataagccaaagcattctaccgttgttaaatacttgtctggaggaggtatatatcatgatgatttggttgtattggggaaggtaacaattaataatctaaagatgatgctattttacatggatttatcatatcatggagtgacaagtagtggagcaatttacaaattgggatcgtctatcgatagactttctctaaataggactattgttacaaaagttaataattatgatgatacattttttgacgacgatgattgatcgctattgcacaattttgtttttgtactttctaatatagtgtttaggttctttttcatatgagaatattgatttactaaaatatctatgtttaacttttgttctatgacgtccttatcggcggtatcggtacatatacgtaattcaccttcacaaaatacggagtcttcgataataatagccaatcgattattggatctagctgtctgtatcatattcaacatgtttaatatatcctttcgtttcccctttacaggcatcgatcgtagcatattttccgcgtctgatatggaaatgttaaaactacaaaaatgcgtaatgttagcccgtcctaatattggtacgtgtctataagtttggcatagtagaataatagacgtgtttaaatgccttccaaagtttaagaattctattagagtattgcattttgatagtttatcgcctacatcatcaaaaataagtaaaaagtgtgctgattttttatgattttgtgcgacagcaatacatttttctatgttacttttagttcgtatcagattatattctagagattcctgactactaacgaaattaatatgatttggccaaatgtatccatcataatctgggttataaacgggtgtaaacaagaatatatgtttatattttttaactagtgtagaaaacagagatagtaaatagatagtttttccagatccagatcctcctgttaaaaccattctaaacggcatttttaataaattttctcttgaaaattgtttttcttggaaacaattcataattatatttacagttactaaattaatttgataataaatcaaaatatggaaaactaaggttgttagtagggaggagaacaaagaaggcacatcgtgatataaataacatttattatcatgatgacaccagaaaacgacgaagagcagacatctgtgttctccgctactgtttacggagacaaaattcagggaaagaataaacgcaaacgcgtgattggtctatgtattagaatatctatggttatttcactactatctatgattaccatgtccgcgtttctcatagtgcgcctaaatcaatgcatgtctgctaacgaggctgctattactgacgccgctgttgccgttgctgctgcatcatctactcatagaaaggttgcgtctagcactacacaatatgatcacaaagaaagctgtaatggtttatattaccagggttcttgttatatattacattcagactaccagttattctcggatgctaaagcaaattgcactgcggaatcatcaacactacccaataaatccgatgtcttgactacctggctcattgattatgttgaggatacatggggatctgatggtaatccaattacaaaaactacatccgattatcaagattctgatgtatcacaagaagttagaaagtatttttgtgttaaaacaatgaactaatatttatttttgtacattaataaatgaaatcgcttaatagacaaactgtaagtaggtttaagaagttgtcggtgccggccgctataatgatgatactctcaaccattattagtggcataggaacatttctgcattacaaagaagaactgatgcctagtgcttgcgccaatggatggatacaatacgataaacattgttatttagatactaacattaaaatgtctacagataatgcggtttatcagtgtcgtaaattacgagctagattgcctagacctgatactagacatctgagagtattgtttagtattttttataaagattattgggtaagtttaaaaaagaccaatgataaatggttagatattaataatgataaagatatagatattagtaaattaacaaattttaaacaactaaacagtacgacggatgctgaagcgtgttatatatacaagtctggaaaactggttaaaacagtatgtaaaagtactcaatctgtactatgtgttaaaaaattctacaagtgacaacaaaaaatgaattaataataagtcgttaacgtacgccgccatggacgccgcgtttgttattactccaatgggtgtgttgactataacagatacattgtatgatgatctcgatatctcaatcatggactttataggaccatacattataggtaacataaaaactgtccaaatagatgtacgggatataaaatattccgacatgcaaaaatgctactttagctataagggtaaaatagttcctcaggattctaatgatttggctagattcaacatttatagcatttgtgccgcatacagatcaaaaaataccatcatcatagcatgcgactatgatatcatgttagatatagaagataaacatcagccattttatctattcccatctattgatgtttttaacgctacaatcatagaagcgtataacctgtatacagctggagattatcatctaatcatcaatccttcagataatctgaaaatgaaattgtcgtttaattcttcattctgcatatcagacggcaatggatggatcataattgatgggaaatgcaatagtaattttttatcataaaagttgtaaagtaaataataaaacaataaatattgaactagtagtacgtatattgagcaatcagaaatgatgctggtacctcttatcacggtgaccgtagttgcgggaacaatattagtatgttatatattatatatttgtaggaaaaagatacgtactgtctataatgacaataaaattatcatgacaaaattaaaaaagataaagagttctaattccagcaaatctagtaaatcaactgatagcgaatcagactgggaggatcactgtagtgctatggaacaaaacaatgacgtagataatatttctaggaatgagatattggacgatgatagcttcgctggtagtttaatatgggataacgaatccaatgttatggcgcctagcacagaacacatttacgatagtgttgctggaagcacgctgctaataaataatgatcgtaatgaacagactatttatcagaacactacagtagtaattaatgaaacggagactgttgaagtacttaatgaagataccaaacagaatcctaactattcatccaatcctttcgtaaattataataaaaccagtatttgtagcaagtcaaatccgtttattacagaacttaacaataaatttagtgagaataatccgtttagacgagcacatagcgatgattatcttaataagcaagaacaagatcatgaacacgatgatatagaatcatcggtcgtatcattggtgtgattagtttcctttttataaaattgaagtaatatttagtattattgctgccgtcacgttgtacaaatggagatattccctgtattcggcatttctaaaattagcaattttattgctaataatgactgtagatattatatagatacagaacatcaaaaaattatatctgatgagatcaatagacagatggatgaaacggtacttcttaccaacatcttaagcgtagaagttgtaaatgacaatgagatgtaccatcttattcctcatagattatcgacgattatactctgtattagttctgtcggaggatgtgttatctctatagataatgacatcaatggcaaaaatattctaacctttcccattgatcatgctgtaatcatatccccactgagtaaatgtgtcgtagttagcaagggtcctacaaccatattggttgttaaagcggatatacctagcaaacgattggtaacatcgtttacaaacgacatactatatgtaaacaatctgtcactgattaattatttgccgttgtctgtattcattattagacgagtcaccgactatttggatagacacatatgcgatcagatatttgctaataataagtggtattcccttataaccatcgacgataagcaatatcctattccatcaaactgtataggtatgtcctctgccaagtacataaattctagcatcgagcaagatactttaatccatgtttgtaacctcgagcatccgttcgactcagtatacaaaaaaatgcagtcgtacaattctctacctatcaaggaacaaatattgtacggtagaattgataatataaatatgagcattagtatttctgtggattaatagatttctagtatggggatcattaatcatctctaatctctaaatacctcataaaacgaaaaaaaagctattatcaaatactgtacggaatggattcattctcttctctttttatgaaactctgttgtatatctactgataaaactggaagcaaaaaatctgatagaaagaataagaataagatcaaggattatatggaacacgattattataaaataacaatagttcctggttcctcttccacgtctactagctcgtggtattatacacatgcctagtaatagtctctttgcgttgacggaaagcagactagaaataacaggctaaaatgttcagacaccataatagttcccaacccagataataacagagttccatcaacacattcctttaaactcaatcccaaacccaaaaccgttaaaatgtatccggccaattgatagtagataatgaggtgtacagcgcatgataatttacacagtaaccaaaatgaaaatactttagtaattataagaaatatagacggtaatgtcatcatcaacaatccgataatatgcctgagagtaaacattgacggataaaacaaaaatgctccgcataactctatcatggcaataacacaaccaaatacttgtaagattcctaaattagtagaaaatacaacgaatatcgatgtataagtgatctcgagaaataataagaataaagtaatgcccgtaaagataaacatcaacattgtttggtaatcattaaaccaattagtatgaagttgaactaatttcacagtagattttattccagtgttatcctcgcatgtataagtacctggtaagatatctttatattccataatcaatgagacatcactatctgataacgaatgaagtctagcactagtatgccatttacttaatattgtcgtcttggaagttttattataagttaaaatatcatggttatccaatttccatctaatatactttgtcggattatctatagtacacggaataatgatggtatcattacatgctgtatactctatggtctttgtagttgttataacaaccaacgtatagaggtatatcaacgatattctaactcttgacattttttatttatttaaaatgatacctttgttatttattttattctattttgctaacggtattgaatggcataagtttgaaacgagtgaagaaataatttctacttacttattagacgacgtattatacacgggtgttaatggggcggtatacacattttcaaataataaactaaacaaaactggtttaactaataataattatataacaacatctataaaagtagaggatgcggataaggatacattagtatgcggaaccaataacggaaatcccaaatgttggaaaatagacggttcagacgacccaaaacatagaggtagaggatacgctccttatcaaaatagcaaagtaacgataatcagtcacaacggatgtgtactatctgacataaacatatcaaaagaaggaattaaacgatggagaagatttgacggaccatgtggttatgatttattcacggcggataacgtaattccaaaagatggtttacgaggagcattcgtcgataaagacggtacttatgacaaagtttacattcttttcactgatactatcggctcaaagagaattgtcaaaattccgtatatagcacaaatgtgcctaaacgacgaaggtggtccatcatcattgtctagtcatagatggtcgacgtttctcaaagtcgaattagaatgtgatatcgacggaagaagttatagacaaattattcattctagaactataaaaacagataatgatacgatactatatgtattcttcgatagtccttattccaagtccgcattatgtacctattctatgaataccattaaacaatctttttctacgtcaaaattggaaggatatacaaagcaattgccgtctccagctcctggtatatgtttaccagctggaaaagttgttccacataccacgtttgaagtcatagaacaatataatgtactagatgatattataaagcctttatctaaccaacctatcttcgaaggaccgtctggtgttaaatggttcgatataaaggagaaggaaaatgaacatcgggaatatagaatatacttcataaaagaaaattctatatattcgttcgatacaaaatctaaacaaactcgtagctcgcaagtcgatgcgcgactattttcagtaatggtaactgcgaaaccgttatttatagcagatatagggataggagtaggaatgccacaaatgaaaaaaatacttaaaatgtaatcttaatcgagtacaccacacgacaatgaacaaacataagacagattatgctggttatgcttgctgcgtaatatgcggtctaattgtcggaattatttttacagcgacactattaaaagttgtagaacgtaaattagttcatacaccattaatagataaaacgataaaagatgcatatattagagaagattgtcctactgactggataagctataataataaatgtatccatttatctactgatcgaaaaacctgggaggaaggacgtaatgcatgcaaagctctaaattcaaattcggatctaattaagatagagactccaaacgagttaagttttttaagaagccttagacgaggctattgggtaggagaatccgaaatattaaaccagacaaccccatataattttatagctaagaatgccacgaagaatggaactaaaaaacggaaatatatttgtagcacaacgaatactcccaaactgcattcgtgttacactatataacaattacactacatttttatcataccactacttcggttagatgttttagaaaaaaataaatatcgccgtaccgttcttgtttttataaaaataacaattaacaattatcaaattttttctttaatattttacgtggttgaccattcttggtggtaaaataatctcttagtgttggaatggaatgctgtttaatgtttccacactcatcgtatattttgacgtatgtagtcacatcgtttacgcaatagtcagactgtagttctatcatgcttcctacatcagaaggaggaacagttttaaagtctcttggttttaatctattaccgttagttttcatgaaatcctttgttttatccacttcacattttaaataaatgtccactatacattcttttgttaattttactagatcgtcatgggtcatagaatttataggttccgtagtccatggatccaaactagcaaacttcgcgtatacggtatcgcgattagtgtatacaccaactgtatgaaaattaagaaaacagtttaataaatcaacagaaatatttaatcctccgtttgatacagatgcgccatatttatggatttcggattcacacgttgtttgtctgaggtgttcgtctagtgttgcttctacgtaaacttcgattcccatatattctttattgtcagaatcgcataccgatttatcatcatacactgtttgaaaactaaatggtatacacatcaaaataataaataataacgagtacattctgcaatattgttatcgtaattggaaaaatagtgttcgagtgagttggattatgtgagtattggattgtatattttattttatattttgtaataagaataaaatgctaatgtcaagtttattccaatagatgtcttattaaaaacatatataataaataacaatggctgaatggcataaaattatcgaggatatctcaaaaaataataagttcgaggatgccgccatcgttgattacaagactacaaagaatgttctagctgctattcctaacagaacatttgccaagattaatccgggtgaaattattcctctcatcactaatcgtaatattctaaaacctcttattggtcagaaatattgtattgtatatactaactctctaatggatgagaacacgtatgctatggagttgcttactgggtacgcccctgtatctccgatcgttatagcgagaactcataccgcacttatatttttgatgggtaagccaacaacatccagacgtgacgtgtatagaacgtgtagagatcacgctacccgtgtacgtgcaactggtaattaaaataaaaagtaatattcatatgtagtgtcaattttaaatgatgatgatgaaatggataatatccatattgacgatgtcaataatgccggtattggcatacagttcatcgatttttagatttcattcagaggatgtggaattatgttatgggcatttgtattttgataggatctataatgtagtaaatataaaatataatccgcatattccatatagatataattttattaatcgcacgttaaccgtagatgaactagacgataatgtcttttttacacatggttattttttaaaacacaaatatggttcacttaatcctagtttgattgtctcattatcaggaaacttaaaatataatgatatacaatgctcagtaaatgtatcgtgtctcattaaaaatttggcaacgagtacatctactatattaacatctaaacataagacttattctctacatcggtccacgtgtattactataataggatacgattctattatatggtataaagatataaatgacaagtataatgacatctatgattttactgcaatatgtatgctaatagcgtctacattgatagtgaccatatacgtgtttaaaaaaataaaaatgaactcttaattatgctatgctattagaaatggataaaatcaaaattacggttgattcaaaaattggtaatgttgttaccatatcgtataacttggaaaagataactattgatgtcacacctaaaaagaaaaaagaaaaggatgtattattagcgcaatcagttgctgtcgaagaggcaaaagatgtcaaggtagaagaaaaaaatattatcgatattgaagatgacgatgatatggatgtagaaagcgcgtaatacgatctataaaaataagtatataaatactttttatttactgtactcttactgtgtagtggtgataccctactcgattatttttttaaaaaaaaaatacttattctgattcttctagccatttccgtgttcgtttgaatgccacatcgacgtcaaagataggggagtagttgaaatctagttctgcattgttggtacgcacctcaaatgtagtgttggatatcttcaacgtatagttgttgagtagtgatggttttctaaatagaattctcttcatatcattcttgcacgcgtacatttttagcatccatcttggaatcctagatccttgttctattcccaatggtttcatcaatagaagattaaacatatcgtacgaacacgatggagagtaatcgtagcaaaagtaagcatttcctttaatcttagatcccggatactggatatattttgcagccaacacgtgcatccatgcagcatttcctacatatacccggctatgcaccgcgtcatcatcgactgtacgatacataatgttaccgtgttgcttacattgctcgtaaaagactttcatcaatttgtctccttctccgtaaattccagtgggtcttaggcaacaagtatacaattttgctccattcatgattacggaattattggctttcataaccagttgctcggccatacgtttactttttgcgtatacatgtcctggtgatatatcataaagggtatgctcatggccgatgaatggatcaccgtgtttattgggtcctattgcttccatgctactagtatagatcaaatacttgattcctaggtccacacaagctgccaaaatagtctgtgttccataatagtttactttcatgatttcattatcggtgtattttccaaatacatccactagagcagccgtatgaataatcagatttaccccatctagcgcttctctcaccttatcaaagtcgtttatatcacattgtatatagtttataaccttaactttcgaggttattggttgtggatcttctacaatatctatgactctgatttcttgaacatcatctgcactaattaacagttttactatatacctgcctagaaatccggcaccaccagtaaccgcgtacacggccattgctgccactcataatatcagactacttattctattttactaaataatggctgtttgtataatagaccacgataatatcagaggagttatttactttgaaccagtccatggaaaagataaagttttaggatcagttattggattaaaatccggaacgtatagtttgataattcatcgttacggagatattagtcaaggatgtgattccataggcagtccagaaatatttatcggtaacatctttgtaaacagatatggtgtagcatatgtttatttagatacagatgtaaatatatttacaattattggaaaggcgttatctatttcaaaaaatgatcagagattagcgtgtggagttattggtatttcttacataaatgaaaagataatacattttcttacaattaacgagaatggcgtttgatatatcagttaatgcgtctaaaacaataaatgcattagtttacttttctactcagcaaaataaattagtcatacgtaatgaagttaatgatacacactacactgtcgaatttgatagggacaaagtagttgacacgtttatttcatataatagacataatgacaccatagagataagaggggtgcttccagaggaaactaatattggttgcgcggttagtatgacttacttgtataataagtatagttttaaactgattttagcagaatatataagacacagaaatactatatccggcaatatttattcggcattgatgacactagatgatttggctattaaacagtatggagacattgatctattatttaatgagaaacttaaagtagactccgattcgggactatttgactttgtcaactttgtaaaggatatgatatgttgtgattctagaatagtagtagctctatctagtctagtatctaaacattgggaattgacaaataaaaaatataggtgtatggcattagccgaacatatatctgatagtattccaatatctgagctatctagactacgatacaatctatgtaagtatctacgcggacacactgagagcatagaggataaatttgattattttgaagacgatgattcgtctacatgttctgccgtaaccgacagggaaacggatgtataattttttttatagcgtgaaggatatgataaaaaatataattgttgtatttatcccattccaatcaccttatatgattctgtaacacaataaaggagtcttatagatgtatagaggtcagatactggtttgataaactgtttattccacataagtatgtttgactttatggttagacccgcatactttaacaaatcactgaaaattggagttaggtattgacctctcagaatcagttgccgttctggaacattaaatgtattttttatgatatactccaacgcatttatgtgggcatacaacaagtcattactaatggaatattccaagagttttagttgtctagtatttaacaagagaagagatttcaacagactgtttatgaactcgaatgccgcctcattgtcgcttatattgatgatgtcgaattctcccaatatcatcaccgatgagtagctcatcttgttatcgggatccaagttttctaaagatgtcattaaaccctcgatcatgaatggatttatcatcatcgtttttatgttggacatgagcttagtccgtttgtccacatctatagaagatgatttctgaattatttcatatatctctctctttaactccaggaacttgtcaggatggtctactttaatatgttctcgtctaagagatgaaaatctttggatggttgcacgcgacttttctctaaaggatgacgttgcccaagatcctctcttaaatgaatccatcttatccttggacaagatggacagtctattttccttagatggtttaatatttttgttacccatgatctataaaggtagacctaatcgtctcggatgaccatatatttattttcagttttattatacgcataaattgtaaaaaatatgttaggtttacgaaaatgtctcgtggggcattaatcgtttttgaaggattggacaaatctggaaaaacaacacaatgtatgaacatcatggaatcaataccttcaaacacaataaaataccttaactttcctcagagatccactgtcactggaaagatgatagatgactatctaactcgtaaaaaaacctataatgatcatatagttaatctattattttgtgcaaatagatgggagtttgcatcttttatacaagaacaactagaacagggaattactttaatagttgatagatacgcattttctggagtagcgtatgccgccgctaaaggcgcgtcaatgactctcagtaagagttatgaatctggattgcctaaacccgacttagttatattcttggaatctggtagcaaagaaattaatagaaacgtcggtgaggaaatttatgaagatgttacattccaacaaaaggtattacaagaatataaaaaaatgattgaagaaggagatattcattggcaaattatttcttctgaattcgaggaagatgtaaagaaggagttgattaagaatatagttatagaggctatacacacggttactggaccagtggggcaactgtggatgtaatagtgaaattacattttttataaatagatgttagtacagtgttataaatggatgaagcatattactctggcaacttggaatcagtactcggatacgtgtccgatatgcataccgaactcgcatcaatatctcaattagttattgccaagatagaaactatagataatgatatattaaacaaggacattgtaaattttatcatgtgtagatcaaacttggataatccatttatctctttcctagatactgtatatactattatagatcaagagaactatcagactgagttgattaattcattagacgacaatgaaattatcgattgtatagttaataagtttatgagcttttataaggataacctagaaaatatagtagatgctatcattactctaaaatatataatgaataatccagattttaaaactacgtatgccgaagtactcggttccagaatagccgatatagatattaaacaagtgatacgtaagaatatactacaattgtctaataatatccgcgaacgatatttgtgaaaatattaaaaaaaaatactttttttattaaatgacgtcttttcgtgaatttagaaaattatgctgtgctatatatcacgcatcaggatataaagaaaaatctaaattaattagagactttataacagatagggatgataaatatttgatcattaagctattgcttcccggattagacgatagaatttataacatgaacgataaacaaattataaaattatatagtataatatttaaacaatctcaggaagatatgctacaagatttaggatacggatatataggagacactattaggactttcttcaaagagaacacagaaatccgtccacgagataaaagcattttaactttagaagaagtggatagttttttaactacgttatcatccgtaactaaagaatcgcatcaaataaaattattgactgatgtagcatctgtttgtacatgtaatgatttaaaatgtgtagtcatgcttattgataaagatctaaaaattaaagcgggtcctcggtacgtacttaacgctattagtcctaatgcctatgatgtgtttagaaaatctaataacttgaaagagataatagaaaattcatctaaacaaaatctagactctatatctatttctgttatgactccaattaatcccatgttagcggaatcgtgtgattctgtcaataaggcgtttaaaaaatttccatcaggaatgtttgcggaagtcaaatacgatggtgaaagagtacaagttcataaaaataataacgagtttgccttctttagtagaaacatgaaaccagtactctctcataaagtggattatctcaaagaatacataccgaaagcatttaaaaaagctacgtctatcgtattggattctgaaattgttcttgtagacgaacataatgtaccgctcccgtttggaagtttaggtatacacaaaaagaaagaatataaaaactctaacatgtgtttgttcgtgtttgactgtttgtactttgatggattcgatatgacggacattccattgtacgaacgaagatcttttctcaaagatgttatggttgaaatacccaatagaatagtattctcagagttgacgaatattagtaacgagtctcagttaactgacgtattggatgatgcactaacgagaaaattagaaggattggtcttaaaagatattaatggagtatacgaaccgggaaagagaagatggttaaaaataaagcgagactatttgaacgagggttccatggcagattctgccgatttagtagtactaggtgcctactatggtaaaggagcaaagggtggtatcatggcagtctttctaatgggttgttacgacgatgaatccggtaaatggaagacggttaccaagtgttcaggacacgatgataatacgttaagggagttgcaagaccaattaaagatgattaaaattaacaaggatcccaaaaaaattccagagtggttagtagttaataaaatctatattcccgattttgtagtagaggatccgaaacaatctcagatatgggaaatttcaggagcagagtttacatcttccaagtcccataccgcaaatggaatatccattagatttcctagatttactaggataagagaggataaaacgtggaaagaatctactcatctaaacgatttagtaaacttgactaaatcttaatagttacatacaaactgaaaattaaaataacactatttagttggtggtcgccatggatggtgttattgtatactgtctaaacgcgctagtaaaacatggcgaggaaataaatcatataaaaaatgatttcatgattaaaccatgttgtgaaagagtttgtgaaaaagtcaagaacgttcacattggcggacaatctaaaaacaatacagtgattgcagatttgccatatatggataatgcggtatccgatgtatgcaattcactgtataaaaagaatgtatcaagaatatccagatttgctaatttgataaagatagatgacgatgacaagactcctactggtgtatataattattttaaacctaaagatgccattcctgttatcatatctataggaaaggataaagatgtctgtgaactattaatctcatcagacatatcgtgtgcatgcgtggagttaaattcatatcacgtagccattcttcccatggatgtttccttttttaccaaaggaaatgcatcattgattattctcctgtttgatttctctatcgatgcggcacctctcttaagaagtgtaaccgataataatgttattatatctagacaccagcgtctacatgacgagcttccgagttccaattggttcaagttttacataagtataaagtccgactattgttctatattatatatggttgttgatggatctgtgatgcatgcgatagctgataatagaactcacgcaattattagcaaaaatatattagacaatactacgattaacgatgagtgtagatgctgttattttgaaccacagattaggattcttgatagagatgagatgctcaatggatcatcgtgtgatatgaacagacattgtattatgatgaatttacctgatgtaggcgaatttggatctagtatgttggggaaatatgaacctgacatgattaagattgctctttcggtggctggtaatttaataagaaatcgagactacattcccgggagacgaggatatagctactacgtttacggtatagcctctagataatttttttaagcacgaaataaaaaacataattttaaaccaatctatttcatactattttgtgtgatcaccatggacataaagatagatattagtatttctggtgataaatttacggtgactactaggagggaaaatgaagaaagaaaaaaatatctacctctccaaaaagaaaaaactactgatgttatcaaacctgattatcttgagtacgatgacttgttagatagagatgagatgtttactattctagaggaatattttatgtacagaggtctattaggcctcagaataaaatatggacgactctttaacgaaattaaaaaattcgacaatgatgcggaagaacaattcggtactatagaagaactcaagcagaaacttagattaaattctgaagagggagcagataactttatagattatataaaggtacaaaaacaggatatcgtcaaacttactgtatacgattgcatatctatgataggattgtgtgcatgcgtggtagatgtttggagaaatgagaaactgttttctagatggaaatattgtttacgagcgattaaactgtttattgatgatcacatgcttgataagataaaatctatactgcagaatagactagtatatgtggaaatgtcatagaaagttaaaagttaatgagagcaaaaatatataaggttgtattccatatttgttatttttttctgtaatagttagaaaaatacattcgatggtctatctatcagattattatgtgttataaggtactttttctcataataaactagagtatgagtaagatagtgtttttcaaaacatataaatctaaaattgatggatgagatatacagctattaatttcgaaaatatattttaatctgataactttaaacatggatttttaatggtggtttaacgttttaaaaaaagattttgttattgtagtatatgataatattaaaagatggatataaagaatttgctgactgcatgtactattttttacattactacattggctacggcagatatacctacttcgtcactgccacacgctccggtaaacggggcatgtgacgagggagaatatcttgataagaggcataatcaatgttgtaatcagtgtccacctggagaatttgccaaggttagatgtaatggtaacgataacacaaaatgtgaacgctgcccacctcatacatataccgcaatccccaattactctaatggatgtcatcaatgtagaaaatgcccaacaggatcatttgataaggtaaagtgtaccggaacacagaacagtaaatgttcgtgtcttcctggttggtattgcgctactgattcttcacagactgaagattgtcgagattgtataccaaaaaggagatgtccatgcggatactttggtggaatagatgaacaaggaaatcctatttgtaaatcgtgttgtgttggtgaatattgcgactacctacgtaattatagacttgatccatttcctccatgcaaactatctaaatgtaattaattatgattttgatgataatgttaccatacattatatcgctacttggttagtgtattattcagtatgaagacctattaataattacttatcttttgacgatcttgttataattataatataaaaatacttatggcatagtaactcataattgctgacgcgataaattcgtaataatctgttttgttcaaatttttataaggaatctacaggcataaaaataaaaatataatttataatatactcttacagcgcgccatcatgaataacagcagtgaattgattgctgttattaatggatttagaaatagtggacgattttgtgatattaatatagttattaatgatgaaaggataaacgctcacagactcatcctatctggagcctccgaatatttttccattctgttttccaataattttatcgattctaatgaatacgaagttaatctaagtcatttagattatcaaagtgttaacgatttgatcgattacatttatgggatacctttgagcctaactaacgataacgtgaaatatattctttcaaccgctgattttttacaaattggatctgctattacggagtgtgaaaattacatacttaaaaatctttgttctagaaactgtatcgatttctacatatacgctgataaatataataacaagaaaatagaatcagcgtcgtttaacacaatattacaaaatattttgagactcatcaacgatgaaaactttaaatacttaacagaggaatcaatgataaaaattttaagcgatgatatgttaaatataaaaaatgaggatttcgccccactaattctcattaaatggttagagagtactcaacaaccatgcaccgtcgagttacttaaatgcctcagaatatcattgctttccccacaagttataaaatcactttatagtcatcgactggttagttcaatctacgaatgtataacattcttaaacaatatagcattcttggatgaatcatttcctagataccatagcatcgagttgatatctatcggtataagtaattcgcatgataagatttccataaactgctacaatcataaaaaaaatacatgggaaatgatatcttcacgtagatataggtgtagtttcgcagtggccgtcctggataatattatctatatgatgggtggatatgatcagtccccgtatagaagttcaaaggttatagcgtacaatacatgtacaaattcttggatatatgatataccagagctaaaatatcctcgttctaattgtgggggactggctgatgacgaatacatttattgtataggcggcatacgcgatcaggattcatcgttgacatctagtattgatagatggaagccatcaaaaccatattggcagaagtatgctaaaatgcgcgaaccaaaatgtgatatgggggttgcgatgttaaacggattaatatatgttataggtggaatcgttaaaggtgacacgtgtaccgacgcactagagagtttatcagaagatggatggatgaagcatcaacgtcttccaataaaaatgtccaatatgtcgacgattgttcatgatggcaagatttatatatctggaggttacaacaatagtagtgtagttaatgtaatatcgaatctagtccttagctataattcgatatatgatgaatggaccaaattatcatcattaaacattcctagaattaatcccgctctatggtcagcgcataataaattatatgtaggaggaggaatatctgatgatgttcgaactaatacatctgagacatacgacaaagaaaaagattgttggacattggataatggtcacgtgttaccacgcaattatataatgtataaatgcgaaccgattaaacataaatatccattggaaaaaacacagtacacgaatgattttctaaagtatttggaaagttttataggtagttgatagaacaaaatacataattttgtaaaaataaatcactttttatactaatatgacacgattaccaatacttttgttactaatatcattagtatacgctacaccttttcctcagacatctaaaaaaataggtgatgatgcaactctatcatgtaatcgaaataatacaaatgactacgttgttatgagtgcttggtataaggagcccaattccattattcttttagctgctaaaagcgacgtcttgtattttgataattataccaaggataaaatatcttacgactctccatacgatgatctagttacaactatcacaattaaatcattgactgctagagatgccggtacttatgtatgtgcattctttatgacatcgcctacaaatgacactgataaagtagattatgaagaatactccacagagttgattgtaaatacagatagtgaatcgactatagacataatactatctggatctacacattcaccggaaactagttctgagaaacctgattatatagataattctaattgctcgtcggtattcgaaatctaagctcaaaaattgaaaaactagcgtctttttttgctcgaagtcgaccaccatggtgggtgaggatagcgtgctgatcaccgagaacatgcacatgaaactgtacatggagggcaccgtgaacgaccaccacttcaagtgcacatccgagggcgaaggcaagccctacgagggcacccagaccatgaagatcaaggtggtcgagggcggccctctccccttcgccttcgacatcctggctaccagcttcatgtacggcagcaaaacctttatcaaccacacccagggcatccccgacttctttaagcagtccttccctgagggcttcacatgggagaggatcaccacatacgaagacgggggcgtgctgaccgctacccaggacaccagcctccagaacggctgcctcatctacaacgtcaagatcaacggggtgaacttcccatccaacggccctgtgatgcagaagaaaacactcggctgggaggccagcaccgagatgctgtaccccgctgacagcggcctgagaggccatagccagatggccctgaagctcgtgggcgggggctacctgcactgctccctcaagaccacatacagatccaagaaacccgctaagaacctcaagatgcccggcttctacttcgtggacaggagactggaaagaatcaaggaggccgacaaagagacctacgtcgagcagcacgagatggctgtggccaggtactgcgacctgcctagcaaactggggcacagctgattaattaatttttatcgatctaattcaacaatgtctggagagcttcgcaggatcccgactccggaaccaattactgataaagaagatcatacagttacagacactgtctcatacactacagtaagtacatcatctggaattgtcactactaaatcaaccaccgatgatacgtacaatgataatgatacagtaccaccaactactgtaggcggtagtacaacctctattagcaattataaaaccaaggactttgtagaaatatttggtattaccgcattaattatattgtcggccgtggcaatattctgtattacgtattatatatgtaataaacgttcacgtaaatacaaaacagagaacaaagtctagatttttgacttacataaatgtctgggatagtaaaatctatcatattgagcggaccatctggtttaggaaagacagccatagccaaaagactatgggaatatatttggatttgtggtgtcccataccactagatttcctcgtcctatggaacgagaaggtgttgattaccattacgttaacagagaggccatctggaagggaatagccgccggaaactttctagaacatactgagtttttaggaaatatttacggaacttctaaaacagctgtgaatacagcggctattaataatcgtatttgtgtgatggatctaaacatcgacggtgttagaagtcttaaaaatacgtacctaatgccttactcggtgtatataagacctacctctcttaaaatggttgagaccaagcttcgtcgtagaaacactgaagctaacgatgagattcatcgtcgtgtgatgttggcaaaaactgacatggatgaggcaggtgaagccggtctattcgacactattatcattgaagatgatgtgaatttagcatatagtaagttaattcagatactacaggaccgtattagaatgtattttaacactaattagagacttaagacttaaaacttgataattaataatataactcgtttttatatgtgtctatttcaacgtctaatgtattagttaaatattaaaacttaccacgtaaaacttaaaatttaaaatgatatttcattgacagatagatcacacattatgaactttcaaggacttgtgttaactgacaattgcaaaaatcaatgggtcgttggaccattaataggaaaaggtggattcggtagtatttatactactaatgacaataattatgtagtaaaaatagagcccaaagctaacggatcattatttaccgaacaggcattttatactagagtacttaaaccatccgttatcgaagaatggaaaaaatctcacaatataaagcacgtaggtcttatcacgtgcaaggcatttggtctatacaaatccattaatgtggaatatcgattcttggtaattaatagattaggtgcagatctagatgcggtgatcagagccaataataatagactaccaaaaaggtcggtgatgttgatcggaatcgaaatcttaaataccatacaatttatgcacgagcaaggatattctcacggagatattaaagcgagtaatatagtcttagatcaaatagataagaataaattatatctagtggattacggattggtttctaaattcatgtctaatggcgaacatgttccatttataagaaatccaaataaaatggataacggtactctagaatttacacctatagattcgcataaaggatacgttgtatctagacgtggagatctagaaacacttggatattgtatgattagatggttgggaggtatcttaccatggactaagatatctgaaacaaagaattgtgcattagtaagtgccacaaaacagaaatatgttaacaatactgcgactttgttaatgaccagtttgcaatatgcacctagagaattgctgcaatatattaccatggtaaactctttgacatattttgaggaacccaattacgacaagtttcggcacatattaatgcagggtgtatattattaagtgtggtgtttggtcgataaaaattaaaaaataacttaatttattattgatctcgtgtgtacaaccgaaatcatggcgatgttttacgcacacgctctcggtgggtacgacgagaatcttcatgcctttcctggaatatcatcgactgttgccaatgatgtcaggaaatattctgttgtgtcagtttataataacaagtatgacattgtaaaagacaaatatatgtggtgttacagtcaggtgaacaagagatatattggagcactgctgcctatgtttgagtgcaatgaatatctacaaattggaaatccgatccatgatcaagaaggaaatcaaatctctatcatcacatatcgccacaaaaactactatgctctaagcggaatcgggtacgagagtctagacttgtgtttggaaggagtagggattcatcatcacgtacttgaaacaggaaacgctgtatatggaaaagttcaacatgattattctactatcaaagagaaggccaaagaaatgagtgcacttagtccaggacctatcatcgattaccacgtctggataggagattgtatctgtcaagttactgctgtggacgtacatggaaaggaaattatgaaaatgagattcaaaaagggtgcggtgcttccgatcccaaatctggtaaaagttaaacttggggagaatgatacagaaaatctttcttctactatatcggcggcaccatcgaggtaaccacctctctggaagacagcgtgaatcatgtactcatgaaacgtttggaaactatacgccatatgtggtctgttgtatatgatcattttgatattgtgaatggtaaagaatgctgttatgtgcatacgcattcatctaatcaaaatcctataccgagtactgtaaaaacaaatttgtacatgaagactatgggatcatgcattcaaatggattccatggaagctctagagtatcttagcgaactgaaggaatcaggtggatggagtcccagaccagaaatgcaggaatttgaatatccagatggagtggaagacactgaatcaattgagagattggcagaggagttcttcaatagatcagaacttcaggctggtgaatcagtcaaatttggtaattctattaattgttaaacatacatctgtttcagctaagcaactaagaacacgtatacggcagcagcttccttctatactctcatcttttaccaacacaaagggtggatatttgttcattggagttgataataatacacacaaagtatttggattcacggtgggttacgactacctcagactgatagagaatgatatagaaaagcatatcaaaagacttcgtgttgtgcatttctgtgagaagaaagaggacatcaagtacgcgtgtcgattcatcaaggtatataaacctggggatgagactacctcgacatacgtgtgcgctatcaaagtggaaagatgctgttgtgctgtgtttgcagattggccagaatcatggtatatggatactaatggtatcaagaagtattctccagatgaatgggtgtcacatataaaattttaattaatgtaactatagagaacaaataataaggttgtaatatcatatagacaataactaacaattaattagtaactgttatctcttttttaactaaccaactaactatatacctattaatacatcgtaattatagttcttaacatctattaatcattaattcgcttctttaattttttataaactaacattgttaattgaaaagggataacatgttacagaatataaattatatatggatttttttaaaaaggaaatacttgactggagtatatatttatctcttcattatatagcacgcgtgttttccaatttttccacatcccatataatacaggattataatctcgttcgaacatacgagaaagtggataaaacaatagttgattttttatctaggttgccaaatttattccatattttagaatatggggaaaatattctacatatttattctatggatgatgctaatacgaatattataattttttttctagatagagtattaaatattaataagaacgggtcatttatacacaatctcgggttatcatcatccattaatataaaagaatatgtatatcaattagttaataatgatcatccagataataggataagactaatgcttgaaaatggacgtagaacaagacattttttgtcctatatatcagatacagttaatatctatatatgtattttaataaatcatggattttatatagatgccgaagacagttacggttgtacattattacatagatgtatatatcactataagaaatcagaatcagaatcatacaatgaattaattaagatattgttaaataatggatcagatgtagataaaaaagatacgtacggaaacacaccttttatcctattatgtaaacacgatatcaacaacgtggaattgtttgagatatgtttagagaatgctaatatagactctgtagactttaatagatatacacctcttcattatgtctcatgtcgtaataaatatgattttgtaaagttattaatttctaaaggagcaaatgttaatgcgcgtaataaattcggaactactccattttattgtggaattatacacggtatctcgcttataaaactatatttggaatcagacacagagttagaaatagataatgaacatatagttcgtcatttaataatttttgatgctgttgaatctttagattatctattatccagaggagttattgatattaactatcgtactatatacaacgaaacatctatttacgacgctgtcagttataatgcgtataatacgttggtctatctattaaacaaaaatggtgattttgagacgattactactagtggatgtacatgtatttcggaagcagtcgcaaacaacaacaaaataataatggaagtactattgtctaaacgaccatctttgaaaattatgatacagtctatgatagcaattactaaacataaacagcataatgcagatttattgaaaatgtgtataaaatatactgcgtgtatgaccgattatgatactcttatagatgtacagtcgctacagcaatataaatggtatattttaagatgtttcgatgaaatagatatcatgaagagatgttatataaaaaataaaactgtattccaattagttttttgtatcaaagacattaatactttaatgagatacggtaaacatccttctttcgtgaaatgcactagtctcgacgtatacggaagtcgtgtacgtaatatcatagcatctattagatatcgtcagagattaattagtctattatccaagaagctggatcctggagataaatggtcgtgttttcctaacgaaataaaatataaaatattggaaaactttaacgataacgaactatccacatatctaaaaatcttataaacattattaaaatataaaatctaagtaggataaaatcacactacatcattgtttccttttagtgctcgacagtgtatactatttttaacgctcataaataaaaatgaaaacgatttccgttgttacgttgttatgcgtactacctgctgttgtttattcaacatgtactgtacccactatgaataacgctaaattaacgtctaccgaaacatcgtttaatgataaccagaaagttacgtttacatgtgatcagggatatcattctttggatccaaatgctgtctgtgaaacagataaatggaaatacgaaaatccatgcaaaaaaatgtgcacagtttctgattatgtctctgaactatataataaaccgctatacgaagtgaattccaccatgacactaagttgcaacggcgaaacaaaatattttcgttgcgaagaaaaaaatggaaatacttcttggaatgatactgttacgtgtcctaatgcggaatgtcaacctcttcaattagaacacggatcgtgtcaaccagttaaagaaaaatactcatttggggaatatatgactatcaactgtgatgttggatatgaggttattggtgcttcgtacataagttgtacagctaattcttggaatgttattccatcatgtcaacaaaaatgtgatatgccgtctctatctaacggattaatttccggatctacattttctatcggtggcgttatacatcttagttgtaaaagtggttttacactaacggggtctccatcatccacatgtatcgacggtaaatggaatcccatactcccaatatgtgtacgaactaacgaaaaatttgatccagtggatgatggtcccgacgatgagacagatttgagcaaactctcgaaagacgttgtacaatatgaacaagaaatagaatcgttagaagcaacttatcatataatcatagtggcgttgacaattatgggcgtcatatttttaatctccgttatagtattagtttgttcctgtgacaaaaataatgaccaatataagttccataaattgctaccgtaaatataaatccgttaaaataattaataatttaataacaaacaagtatcaaaagattaaagacttatagctagaatcaattgagatgtcttcttcagtggatgttgatatctacgatgccgttagagcatttttactcaggcactattataacaagagatttattgtgtatggaagaagtaacgccatattacataatatatacaggctatttacaagatgcgccgttataccgttcgatgatatagtacgtactatgccaaatgaatcacgtgttaaacaatgggtgatggatacacttaatggtataatgatgaatgaacgcgatgtttctgtaagcgttggcaccggaatactattcatggaaatgtttttcgattacaataaaaatagtatcaacaatcaactaatgtatgatataattaatagcgtatctataattctagctaatgagagatatagaagcgcttttaacgacgatggtatatacatccgtagaaatatgattaacaagttgtacggatacgcatctctaactactattggcacgatcgctggaggtgtttgttattatctgttgatgcatctagttagtttgtataaataattatttcaatatactagttaaaattttaagattttaaatgtataaaaaactaataacgtttttatttgtaataggtgcattagcatcctattcgaataatgagtacactccgtttaataaactgagtgtaaaactctatatagatggagtagataatatagaaaattcatatactgatgataataatgaattggtgttaaattttaaagagtacacaatttctattattacagagtcatgcgacgtcggatttgattccatagatatagatgttataaacgactataaaattattgatatgtataccattgactcgtctactattcaacgcagaggtcacacgtgtagaatatctaccaaattatcatgccattatgataagtacccttatattcacaaatatgatggtgatgagcgacaatattctattactgcagagggaaaatgctataaaggaataaaatatgaaataagtatgatcaacgatgatactctattgagaaaacatactcttaaaattggatctacttatatatttgatcgtcatggacatagtaatacatattattcaaaatatgatttttaaaaatttaaaatatattatcacttcagtgacagtagtcaaataacaaacaacaccatgagatatattataattctcgcagttttgttcattaatagtatacatgctaaaataactagttataagtttgaatccgtcaattttgattccaaaattgaatggactggggatggtctatacaatatatcccttaaaaattatggcatcaagacgtggcaaacaatgtatacaaatgtaccagaaggaacatacgacatatccgcatttccaaagaatgatttcgtatctttctgggttaaatttgaacaaggcgattataaagtggaagagtattgtacgggactatgcgtcgaagtaaaaattggaccaccgactgtaacattgactgaatacgacgaccatatcaatttgtacatcgagcatccgtatgctactagaggtagcaaaaagattcctatttacaaacgcggtgacatgtgtgatatctacttgttgtatacggctaacttcacattcggagattctaaagaaccagtaccatatgatatcgatgactacgattgcacgtctacaggttgcagcatagactttgtcacaacagaaaaagtgtgcgtgacagcacagggagccacagaagggtttctcgaaaaaattactccatggagttcgaaagtatgtctgacacctaaaaagagtgtatatacatgcgcaattagatccaaagaagatgttcccaatttcaaggacaaaatggccagagttatcaagagaaaatttaatacacagtctcaatcttatttaactaaatttctcggtagcacatcaaatgatgttaccacttttcttagcatgcttaacttgactaaatattcataactaatttttattaatgatacaaaaacgaaataaaactgcatattatacactggttaacgcccttataggctctaaccattttcaagatgaggtccctgattatagtccttctgttcccctctatcatctactccatgtctattagacgatgtgagaagactgaagaggaaacatggggattgaaaatagggttgtgtataattgccaaagatttctatcccgaaagaactgattgcagtgttcatctcccaactgcaagtgaaggattgataactgaaggcaatggattcagggatatacgaaacaccgataaattataaaaaaagcaatgtgtccgctgtttccgttaataatactattttcgtaactggcggattattcataaataactctaatagcacgatcgtggttaacaatatggaaaaacttgacatttataaagacaaacaatggtcgattatagaaatgcctatggctagggtatatcacggcattgactcgacatttggaatgttatattttgccggaggtctatccgttaccgaacaatatggtaatttagagaaaaacaacgagatatcttgttacaatcctagaacgaataagtggtttgatatttcatatactatttataagatatccatatcatcattgtgtaaactaaataacgtcttctatgtatttagtaaggacattggatatgtggaaaagtatgatggtgcatggaagttagtacatgatcgtctccccgctataaaggcattatcaacttctccttattgattgaaaatgaaaatataaatagtttttatgtatagcagtattaccctatagttttattgcttactactaacatggatacagatgttacaaatgtagaagatatcataaatgaaatagatagagagaaagaagaaatactaaaaaatgtagaaattgaaaataataaaaacattaacaagaatcatcccaatgaatatattagagaagcactcgttattaataccagtagtaatagtgattccattgataaagaagttatagaatgtatcagtcacgatgtaggaatatagatcatatctactaatttttataatcgatacaaaacataaaaaacaactcgttattacatagcaggcatggaatccttcaagtattgttttgataacgatggcaagaaatggattatcggaaatactttatattctggtaattcaatactctataaggtcagaaaaaatttcactagttcgttctacaattacgtaatgaagatagatcacaaatcacacaagccattgttgtctgaaatacgattctatatatctgtattggatcctttgactatcgacaactggacacgggaacgtggtataaagtatttggctattccagatctgtatggaattggagaaaccgatgattatatgttcttcgttataaagaattcgggaagagtattcgccccaaaggatactgaatcagtcttcgaagcatgcgtcactatgataaacacgttagagtttatacactctcgaggatttacccatggaaaaatagaaccgaggaatatactgattagaaataaacgtctttcactaattgactattctagaactaacaaactatacaagagtggaaactcacatatagattacaacgaggacatgataacttcaggaaatatcaattatatgtgtgtagacaatcatcttggagcaacagtttcaagacgaggagatttagaaatgttgggatattgcatgatagaatggttcggtggcaaacttccatggaaaaacgaaagtagtataaaagtaataaaacaaaaaaaagaatataaaaaatttatagctactttctttgaggactgttttcctgaaggaaatgaacctctggaattagttagatatatagaattagtatacacgttagattattctcaaactcctaattatgacagactacgtaaactgtttatacaagattgaaattatattcttttttttatagagtgtggtagtgttacggatatctaatattaatattagactatctctatcgcgctacacgaccaatatcgattactatggatatcttctatgaaaggagagaatgtatttatttctccagcgtcaatctcgtcagtattgacaatactgtattatggagctaatggatccactgctgaacagctatcaaaatatgtagaaacggaggagaacacggataaggttagcgctcagaatatctcattcaaatccatgaataaagtatatgggcgatattctgccgtgtttaaagattcctttttgagaaaaattggcgataagtttcaaactgttgacttcactgattgtcgcactatagatgcaatcaacaagtgtgtagatatctttactgaggggaaaatcaatccactattggatgaaccattgtctcctagcaattagtgccgtatactttaaagcaaaatggttgacgccattcgaaaaggaatttaccagtgattatcccttttacgtatctccgacggaaatggtagacgtaagtatgatgtctatgtacggcaaggcatttaatcacgcatctgtaaaagaatcattcggcaacttttcaatcatagaactgccatatgttggagatactagtatgatggtcattcttccagacaagattgatggattagaatccatagaacaaaatctaacagatacaaattttaagaaatggtgtgactttatggatgctatgtttatagatgttcacattcccaagtttaaggtaacaggctcgtataatctggtggatactctagtaaagtcaggactgacagaggtgttcggttcaactggagattatagcaatatgtgtaatttagatgtgagtgtcgacgctatgatccacaaaacgtatatagatgtcaatgaagagtatacagaagcagctgcagcaacttctgtactagtggcagactgtgcatcaacaattacaaatgagttctgtgcagatcatccgttcatctatgtgattaggcatgttgatggaaaaattcttttcgttggtagatattgctctccgacaactaattgttaaccattttttttaaaaaaaatagaaaaaacatgtggtattagtgcaggtcgttgttcttccaattgcaattggtaagatgacggccaactttagtacccacgtcttttcaccacagcactgtggatgtgacagactgaccagtattgatgacgtcaaacaatgtttgactgaatatatttattggtcgtcctatgcataccgcaacaggcaatgcgctggacaattgtattccacactcctctcttttagagatgatgcggaattagtgttcatcgacattcgcgagctggtaaaaaatatgccgtgggatgatgtcaaagattgtacagaaatcatccgttgttatataccggatgagcaaaaaaccatcagagagatttcggccatcatcggactttgtgcatatgctgctacttactggggaggtgaagaccatcccactagtaacagtctgaacgcattgtttgtgatgcttgagatgctaaattacgtggattataacatcatattccggcgtatgaattgatgagttgtacatcttgacattttctttcttctcttctccctttcttctcttctcccttcctccctcttctccctttcccagaaacaaacttttttacccactataaaataaaatgagtatactacctattatatttcttcctatatttttttattcttcattcgttcagacttttaacgcgtctgaatgtatcgacaaagggcaatattttgcatcattcatggagttagaaaacgagccagtaatcttaccatgtcctcaaataaatacgctatcatccggatataatatattagatattttatgggaaaaacgaggagcggataatgatagaattataccgatagataatggtagcaatatgctaattctgaacccgacacaatcagactctggtatttatatatgcattaccacgaacgaaacctactgtgacatgatgtcgttaaatttgacaatcgtgtctgtctcagaatcaaatatagatcttatctcgtatccacaaatagtaaatgagagatctactggcgaaatggtatgtcccaatattaatgcatttattgctagtaacgtaaacgcagatattatatggagcggacatcgacgccttagaaataagagacttaaacaacggacacctggaattattaccatagaagatgttagaaaaaatgatgctggttattatacatgtgttttagaatatatatacggtggcaaaacatataacgtaaccagaattgtaaaattagaggtacgggatagaataataccttctactatgcaattaccagatggcattgtaacttcaataggtagtaatttgactattgcatgcagagtatcgttgagacctcccacaacggacaccgacgtcttttggataagtaatggtatgtattacgaagaagatgatggggacggaaacggtagaataagtgtagcaaataaaatctatatgaccgataagagacgtgttattacatcccggttaaacattaatcctgtcaaggaagaagatgctacaacgtttacgtgtatggcgtttactattcctagcatcagcaaaacagttactgttagtataacgtgaatgtatgttgttacatttccatgtcaattgagtttataagaatttttatacattatcttccaacaaacaattgacgaacgtattgctatgattaactcccacgatactatgcatattattaatcattaacttgcagactatacctagtgctattttgacatactcgtgttcttgtgtaattgcggtatctatattattaaagtacgtaaatctagctatagttttattatttaattttagataatataccgtctccttatttttaaaaattgccacatcctttattaaatcatgaatgggaatttctatgtcatcgttagtatattgtgaacaacaagagcagatatctataggaaagggtggaatgcgatacattgatctatgtagttttaaaacacacgcgaactttgaagaatttatataaatcattccatcgatacatccttctatgttgacatgtatatatccaggaattcttttattaatgtcaggaaatgtataaactaaaacattgcccgaaagcggtgcctctatctgcgttatatccgttcttaacttacaaaatgtaaccaatacctttgcatgacttgttttgttcggcaacgttagtttaaacttgacgaatggattaattacaatagcatgatccgcgcatctattaagtttttttactttaacgcccttgtatgtttttacagagactttatctaaatttctagtgcttgtatgtgttataaatataacgggatatagaaccgaatcacctaccttagatacccaattacattttatcagatccagataataaacaaattttgtcgccctaactaattctatattgttatatattttacaattggttatgatatcatgtaataacttggagtctaacgcgcatcgtcgtacgtttatacaattgtgatttagtgtagtatatctacacatgtatttttccgcactatagtattctggactagtgataaaactatcgttatatctgtcttcaatgaactcatcgagatattgctctctgtcatattcatacacctgcataaactttctagacatcttacaatccgtgttattttaggatcatatttacatatttacgggtatatcaaagatgttagattagttaatgggaatcgtctataataatgaatattaaacaattatatgaggacttttaccacaaagcatcataaaaatgagtcgtcgtctgatttatgttttaaatatcaaccgcaaatcaactcataaaatacaagagaatgaaatatatacatattttagtcattgcaatatagaccatacttctacagaacttgattttgtagttaaaaactatgatctaaacagacgacaacctgtaactgggtatactgcactacactgctatttgtataataattactttacaaacgatgtactgaagatattattaaatcatgacgtaaatgtaacgatgaaaaccagtagcggacgtatgcctgtttatatattgcttactagatgttgtaatatttcacatgatgtagtgatagatatgatagacaaagataaaaaccacttattacatagagactattccaacctattactagagtatataaaatctcgttacatgttattgaaggaagaggatatcgatgagaacatagtatccactttattagataagggaatcgatcctaactttaaacaagacggatatacagcgttacattattattatttgtgtctcgcacacgtttataaactaggtgagtgtagaaaaccgataacgataaaaaaggccaagcgaattatttctttgtttatacaacatggagctaatctaaacgcgttagataattgtggtaatacaccattccatttgtatcttagtattgaaatgtgtaataatattcatatgactaaaatgctgttgacttttaatccgaatttcaaaatatgtaataatcatggattaacgcctatactatgttatataacttccgactacatacaacacgatattcttgttatgttaatacatcactatgaaacaaatgttggagaaatgccgatagatgagcgtcgtatgatcgtattcgagtttatcaaaacatattctacacgtccggcagattcgataacttatttgatgaataggtttaaaaatataaatatttatacccgctatgaaggaaagacattattacacgtagcatgtgaatataataatacacaagtaatagattatcttatacgtatcaacggagatataaatgcgttaaccgacaataacaaacacgctacacaactcattatagataacaaagaaaattccccatataccattaattgtttactgtatatacttagatatattgtagataagaatgtgataagatcgttggtggatcaacttccatctctacctatcttcgatataaaatcatttgagaaattcatatcctactgtatacttttagatgacacattttacgataggcacgttaagaatcgcgattctaaaacgtatcgatacgcattttcaaaatacatgtcgtttgataaatacgatggtataataactaaatgtcacgacgaaacaatgttactcaaactgtccactgttctagacactacactatatgcagttttaagatgtcataattcgagaaagttaagaagatacctcaacgagttaaaaaaatataataacgataagtcctttaaaatatattctaatattatgaatgagagataccttaatgtatattataaagatatgtacgtgtcaaaggtatatgataaactatttcctgttttcacagataaaaattgtctactaacattactaccttcagaaattatatacgaaatattatacatgctgacaattaacgatctttataatatatcgtatccacctaccaaagtatagttgtatttttctcatgcgatgtgtgtaaaaaaactgatattatataaatattttagtgccgtataataaagatgacgatgaaaatgatggtacatatatatttcgtatcattattgttattgctattccacagttacgccatagacatcgaaaatgaaatcacagaattcttcaataaaatgagagatactctaccagctaaagactctaaatggttgaatccagcatgtatgttcggaggcacaatgaatgatatagccgctctaggagagccattcagcgcaaagtgtcctcctattgaagacagtcttttatcgcacagatataaagactatgtggttaaatgggagaggctagaaaagaatagacggcgacaggtttctaataaacgtgttaaacatggtgatttatggatagccaactatacatctaaattcagtaaccgtaggtatttgtgcaccgtaactacaaagaatggtgactgtgttcagggtatagttagatctcatattaaaaaacctccttcatgcattccaaaaacatatgaactaggtactcatgataagtatggcatagacttatactgtggaattctttacgcaaaacattataataatataacttggtataaagataataaggaaattaatatcgacgacattaagtattcacaaacgggaaaggaattaattattcataatccagagttagaagatagcggaagatacgactgttacgttcattacgacgacgttagaatcaagaatgatatcgtagtatcaagatgtaaaatacttacggttataccgtcacaagaccacaggtttaaactaatactagatccgaaaatcaacgtaacgataggagaacctgccaatataacatgcactgctgtgtcaacgtcattattgatcgacgatgtactgattgaatgggaaaatccatccggatggcttataggattcgattttgatgtatactctgttttaactagtagaggcggtatcaccgaggcgaccttgtactttgaaaatgttactgaagaatatataggtaatacatataaatgtcgtggacacaactattattttgaaaaaacccttacaactacagtagtattggagtaaatatacaatgcatttttatatacattactgaattattattactgaattattattactgaattattattaattatatcgtatttgtgctatagaatggatgaagatacgcgactatctaggtatttgtatctcaccgatagagaacatataaatgtagactctattaaacagttgtgtaaaatatcagatcctaatgcatgttatagatgtggatgtacggctttacatgagtacttttataattatagatcagtcaacggaaaatacaagtatagatacaacggttactatcaatattattcatctagcgattatgaaaattataatgaatattattatgatagaactggtatgaacagtgagagtgataatatatcaatcaaaacagaatatgaattctatgatgaaacacaagatcaaagtacacaactagtaggttacgacattaaactcaaaaccaatgaggatgattttatggctatgatagatcagtgggtgtccatgattatatagatgaatcaattaataaagtagtatatggaagagagtctcacgtaagatggcgggatatatggcaagaacataatgatggcgtatacagtataggaaaggagtgcatagataatatatacgaagacaaccataccgtagacgaattctacaagatagacagcgtatcagatgtagatgacgcggaacacatatctccgataactaaaaaaccatagaatcagttgatgataatacctacatttctaatcttccgtataccatcaaatacaaaatattcgagcaacaataagtattttttatacctttaaaactgataaataaattttttctagtgatattttggcaagatgagaatcctatttctcatcgctttcatgtatgggtgtgttcactcatatgttaacgcggttgaaaccaaatgtccaaatctagacattgtaacatcttctggagaatttcattgttcaggatgtgtggaacatatgcctgagtttagctatatgtattggttggcaaaggatatgaaatcggacgaggataccaagtttatagaacatctgggtgatggcatcaaagaagatgaaaccgttcgtaccacagatagtggaatcgtcactctacgtaaagtccttcatgtgactgatactaataaatttgataattataggttcacttgtgtcctcgctacgctagatggcatttataaaaagaatgtttgctgaagtagttgtgtgctactatttttatttatgatataatctaatggaattaatttgaattgatatttatccaatactaaagattatattagaatcaaattaatcttttatacgagaaaaaataacgacatacgtcgtcaacaaattaaactttttatttattagttaactagcttatagaacttgctcattgttatgtttctaaaacgggtacggcatataggacaattatccgacgcaccggtttctcttcgtgttctatgccatatattgatgcatgttatgcaaaatatatgagtacacgaatccaataaaccaaagtatctatcgttttgagtaaacaacttcatagcaaattccacattctttttctttacttactctatacacgtcctcgtatttatttagtattttgatgatatccaactcagaaatggttgttgtattattgggtgtatttggagtataggtattattagctatgtaccaatttaccaaccctcttaatattgattgataatcacatcggttatccaattaataactaaattgtagtgtatatatagaccatatatgtttctatttttttgacagttacgtatagtttcagtaagttttgattgttgtattcctgtatctctagataagttagtcatatagtcccttccggcgatacgttttttccaagcccgaaattgattagccaaatgtgtatttatttttgtgatattgatataatatttcggataatgcatactgttagtcttatatcatttggttcatctatgtattgtaatattgttacatgatctatagatgatgtattgattttggcaggatcgaattccatatccgcgactaaacagtgaaaaaaatgtaaatactttttaaattttaaattagtaaaacttttttttattttttatgattccaaaaatactgaatacaaagtcctaaattataaatatggagatcatactaccacaacttattattatgtatacaaggccggtgtaatagatagatatatataattctattacaccggcagacaattaccgaccggtatttgtcgttaccaacataccgtataatatgtaatatacaattccataacccattgacagttgttatacatcaaaattgcaattcttttgattacgatgttataagaatgtagttaattgatgtatgatgttaatgtgtcctctttcctcttataacatcgtaatcaaaaacttttttataatatatacctaataatgtgtcttaatagttctcgtgattcgtcaaacaatcattcttataaaatataataaagcaacgtaaaaacacataaaaataagcgtaactaataagacaatggatatttacgacgataaaggtctacagactattaaactgtttaataatgaatttgattgtataaggaatgacatcagagaattatttaaacatgtaactgattccgatagtatacaacttccgatggaagacaattctgatattatagaaaatatcagaaaaatactatatagacgattaaaaaatgtagaatgtgttgacatcgataacacaataacttttatgaaatacgatccaaatgatgataataagcgtacgtgttctaattgggtacccttaactaataactatatggaatattgtctagtaatatatttggaaacaccgatatgtggaggcaaaataaaattataccaccctacaggaaatataaagtcggataaggatattatgtttgcaaagactctagactttaaatcaacgaaagtgttaactggacgtaaaacaattgccgttctagacatatccgtttcatataatagatcaatgactactattcactacaacgacgacgttgatatagatatacatactgataaaaatggaaaagagttatgttattgttatataacaatagatgatcattacttggttgatgtggaaactataggagttatagtcaatagatctggaaaatgtctgttagtaaataaccatctaggtataggtatcgttaaagataaacgtataagcgatagttttggagatgtatgtatggatacaatatttgacttttctgaagcacgagagttattttcattaactaatgatgataacaggaatatagcatgggacactgataaactagacgatgatacagatatatggactcccgtcacagaagatgattacaaatttctttctagactagtattgtatgcaaaatctcaatcggatactgtatttgactattatgttcttactggtgatacggaaccacccactgtattcattttcaaggtaactagattttactttaatatgccgaaataaaaaatttttgtataatatctagaggtagaggtattgtttagataaatacaaataacatagatacatcgcatacttagcatttttataaatatacataagacatacactttatacatttttgtaaaaatactcataaaaaaatttataaaaattatggcacaaccatatcttgtataggtagtttagttcgtcgagtgaacctataaacagataatagacaacacataataatgcctactaatacaagcataataccgggagatgggatatatgacgttgtagtgtttgggttttctgaacgttgatagtctactaatactacatgctgacatctaatgcctgtataaccatgagagcatctacaatacataccgtcaatatctctagcgtggatacagtcaccgtgtaaacaatatccatctccctctggaccgcataatctgatagctggaatatctgttgtagcgtttgtaatttctggcaatgtcgtttcgatagcgttaccactatcggcgaatgatctgattatcatagcagcgaacaacaacatcagataatttatcaacatttttgatggattctgtgtttatgctgtttctcagtgtgtgtttatgacaagattgggaattttatattattaattcagtaatataaactaataatatattgttaattgtgtaaataatataaaaataacaatacaatattgaatgtgttgctgttaaaaatgtatgtgttaatataatagaataaaataaatgagtatgatcattttagataacgattgattttatcattaccgcttcattcttatattctttgcttacggaacctatatttagaaacatctactaacaattttttatgcttgcattattaatggtatgtaatatgattgattgtgtacgcaataccaatttgttaagtatgaatacggggtacaaacataaattgaaatttaacattatttatttatgatatatatcgttatcgttaggtctataccatggatatctttaaagaactaatcttaaaacaccctgatgaaaatgttttgatttctccagtttccattttatctactttatctattctaaatcatggagcagctggttctacagctgaacaactatcaaaatatatagagaatatgaatgagaatacacccgatgacaataatgatgacatggaggtagatattccgtattgtgcgacactagctaccgcaaataaaatatacggtagcgatagtatcgagttccacgcctccttcctacaaaaaataaaagacgattttcaaactgtaaactttaataatgctaaccaaacaaaggaactaatcaacgaatgggttaagacaatgacaaatggtaaaattaattccttattgactagtccgctatccattaatactcgtatgacagttgttagcgccgtccattttaaagcaatgtggaaatatccattttctaaacatcttacatatacagacaagttttatatttctaagaatatagttaccagcgttgatatgatggtgggtaccgagaataacttgcaatatgtacatattaatgaattattcggaggattctctattatcgatattccatacgagggaaactctagtatggtaattatactaccggacgacatagaaggtatatataacatagaaaaaaatataacagatgaaaaatttaaaaaatggtgtggtatgttatctactaaaagtatagacttgtatatgccaaagtttaaagtggaaatgacagaaccgtataatctggtaccgattttagaaaatttaggacttactaatatattcggatattatgcagattttagcaagatgtgtaatgaaactatcactgtagaaaaatttctacatacgacgtttatagatgttaatgaggagtatacagaagcatcggccgttacaggagtatttacgattaacttttcgatggtatatcgtacgaaggtctacataaaccatccattcatgtacatgattaaagacaccacaggacgtatactttttatagggaaatactgctatccgcaataaatataaacaaatagacttttataaagagtcttcaacgataagtatatcgacatactacttatgctgcgaaagattctgaacgagaacgactatctcaccctcttggatcatatccgcactgctaaatactaaatctccactacactttttatcatcttatgaggaatgattgccttcgtgaaataggaataattagcaccagaatagctatggattattgtggtagagagtgcactattctatgtcgtctactggatgaagatgtgacgtacaaaaaaataaaactagaaattgaaacgtgtcacaacttatcaaaacatatagatagacgaggaaacaatgcgctacattgttacgtctccaataaatgcgatacagacattaagattgttctctcgcggagtcgagagactttgtagaaacaacgaaggattaactccgctaggagtatacagtaagcatagatacgtaaaatctcagattgtgcatctactgatatccagctattcaaattcctctaacgaactcaagtcgaatataaatgatttcgatctgtattcggataatatcgacttacgtctgctaaaatacctaattgtggataaacggatacgtccgtccaagaatacgaattatgcaatcaatggtctcggattggtggatatatacgtaacgacgcctaatccgagaccagaagtattgctatggcttcttaaatcagaatgttacagcaccggttacgtatttcgtacctgtatgtacgacagtgatatgtgtaagaactctcttcattactatatatcgtctcatagagaatctcaatctctatccaaggatgtaattaaatgtttgatcgataacaatgtttccatccatggcagagacgaaggaggatctttacccatccaatactactggtctttctcaaccatagatatagagattgttaaattattattaataaaggatgtggacacgtgtagagtatacgacgtcagccctatattagaggcgtattatctaaacaagcgatttagagtaaccccatataatgtagacatggaaatcgttaatcttcttattgagagacgtcatactcttgtcgacgtaatgcgtagtattacttcgtacgattccagagaatataaccactacatcatcgataacattctaaagagatttagacaacaggatgaatccatcgtacaagccatactgataaactacttacattacggcgatatggtcgttcgatgcatgttagataacggacaacaactatcctctacacgactactttgttaataataatctcgtcgatgtaaacgtcgtaaggtttatcgtggaaaatatggacacgcggctgtaaatcacgtatcgaacaatggccgtctatgtatgtacggtctgatattatcgagatttaataattgcgggtatcactgttatgaaaccatactgatagatgtatttgatatactaagcaagtacatggatgatatagatatgatcgataactctactatattacgcggtcgatgtcaataatatacaatttgcaaagcggttattggaatatggagcgagtatcacgctcgataatcaatacggccatccagaaaagcagttacagaagagaaaacaaaacgaaatcgttgttctacaagatgtctctccctacgacgattactacgtaaaaaagatactagcctactgcctattaagggacgagtcattcgcggaactacatagtaaattctgtttaaacgaggactataaaagtgtatttatgaaaaatatatcattcgataagatagattccatcatcgtgacataagtcgcctcaaagagattcgaatctccgacaccgacctgtatacggtatcacagctatcttaaagccatacattcagacagtcacatttcatttcccatgtacgacgatctcatagaacagtgccatctatcgatggagcgtaaaagtaaactcgtcgacaaagcactcaataaattagagtctaccatcggtcaatctagactatcgtatttgcctccggaaattatgcgcaatatcatctaaacagtatgttgtacggaaagaaccattacaaatattatccatgatagaaagaaaatatctatatgattggagaagtaggaaacaggaacaagacaacgattactacattattaaatcatgaagtccgtattatactcgtatatattgtttctctcatgtataataataaacggaagagatatagcaccgcatgcaccatccgatggaaagtgtaaagacaacgaatacaaacgccataatttgtgtccgggaacatacgcttccagattatgcgatagcaagactaacacacgatgtacgccgtgtggttcgggtaccttcacatctcgcaataatcatttacccgcttgtctaagttgtaacggaagacgcgatcgtgtaacacgactcacaatagaatctgtgaatgctctcccggatattattgtcttctcaaaggatcatccggatgcaaggcatgtgtttcccaaacaaaatgtggaataggatacggagtatccggagacgtcatctgttctccgtgtggtctcggaacatattctcacaccgtctcttccgcagataaatgcgaacccgtacccagaaatacgtttaactatatcgatgtggaaattaacctgtatccagttaacgacacgtcgtgtactcggacgaccactaccggtctcagcgaatccatctcaacgtcggaactaactattactatgaatcataaagactgtaatcccgtatttcgtgatggatacttctccgttcttaataaggtagcgacttcaggtttctttacaggagaaaggtgtgcactctgaatttcgagattaaatgcaataacaaagattcttcctccaaacagttaacgaaagcaaagaatgatactatcatgccgcattcggagacagtaactctagtgggcgacatctatatactatatagtaataccaatactcaagactacgaaactgatacaatctcttatcatgtgggtaatgttctcgatgtcgatagccatatgcccggtagttgcgatatacataaactgatcactaattccaaacccacccactttttatagtaagtttttcacccataaataataaatacaataattaatttctcgtaaaagtagaaaatatattctaatttattgcacggtaaggaagtagaatcataaagaacagtactcaatcaatagcaattatgaaacaatatatcgtcctggcatgcatgtgcctggcggcagctgctatgcctgccagtcttcagcaatcatcctcatcctcctcctcgtgtacggaagaagaaaacaaacatcatatgggaatcgatgttattatcaaagtcacaaagcaagaccaaacaccgaccaatgataagatttgccaatccgtaacggaaattacagagtccgagtcagatccagatcccgaggtggaatcagaagatgattccacatcagtcgaggatgtagatcctcctaccacttattactccatcatcggtggaggtctgagaatgaactttggattcaccaaatgtcctcagattaaatccatctcagaatccgctgatggaaacacagtgaatgctagattgtccagcgtgtccccaggacaaggtaaggactctcccgcgatcactcatgaagaagctcttgctatgatcaaagactgtgaagtgtctatcgacatcagatgtagcgaagaagagaaagacagcgacatcaagacccatccagtactcgggtctaacatctctcataagaaagtgagttacgaagatatcatcggttcaacgatcgtcgatacaaaatgcgtcaagaatctagagtttagcgttcgtatcggagacatgtgcaaggaatcatctgaacttgaggtcaaggatggattcaagtatgtcgacggatcggcatctgaaggtgcaaccgatgatacttcactcatcgattcaacaaaactcaaagcgtgtgtctgaatcgataactctattcatctgaaattggatgagtagggttaatcgaacgattcaggcacaccacgaattaaaaaagtgtaccggacactatattccggtttgcaaaacaaaaatgttcttaactacattcacaaaaagttacctctcgcgacttcttctttttctgtctcaatagtgtgatacgattatgacactattcctattcctattcctatttcctttcagagtatcacaaaaatattaaacctctttctgatggtctcataaaaaaagttttacaaaaatatttttattctctttctctctttgatggtctcataaaaaaagttttacaaaaatatttttattctctttctctctttgatggtctcataaaaaaagttttacaaaaatatttttattctctttctctctttgatggtctcataaaaaaagttttacaaaaatatttttattctctttctctctttgatggtctcataaaaaaagttttacaaaaatatttttattctctttctctctttgatggtctcataaaaaaagttttacaaaaatatttttattctctttctctctttgatggtctcataaaaaaagttttacaaaaatatttttattctctttctctctttgatggtctcataaaaaaagttttacaaaaatatttttattctctttctctctttgatggtctcataaaaaaagttttacaaaaatatttttattctctttctctctttgatggtctcataaaaaaagttttacaaaaatatttttattctctttctctctttgatggtctcataaaaaaagttttacaaaaatatttttattctctttctctctttgatggtctcataaaaaaagttttacaaaaatatttttattctctttctctctttgatggtctcataaaaaagttttacaaaaatatttttattctctttctctctttgatggtctcataaaaaagttttacaaaaatatttttattctctttctctctttgatggtctcataaaaaaagttttacaaaaatatttttattctctttctctctttgatggtctcataa

(The sequence listing continues in the following parts.)
